United States Patent Application Publication US 2016/0230186 A1 - sequence listing, part 4

SEQ ID NO: 3905 - DNA, 422 bp, Diabrotica virgifera
ctagcagttgccgctaaggcatccctgtcattgcgttcgtcgcaatccgtgactgcacgccggggtttgtcctagttgggtcagagagagcagcatatgtgcctcctgatgagagactaataagtttcgaaaccggtagaggtgcttgctgcactctctgattgaactggaataatgatgcggctgtagttttgtattgcaacgaaattgaaaatggttattcatttttagttaaacagaataattcaatttggacgttgcgagttgcccgttacgaatttgtatggttacgaactgtcgccgttacgaattgtcgccgttacgaactgtcgctgttacgaattgtcgctgttgcgagttgtccgttgccagttgtccggttgcgaactgtcacgttgcgagatgtcatcgaaccaggcaaa

SEQ ID NO: 3906 - DNA, 5712 bp, Diabrotica virgifera
gctgagcgaaagttgaagtggtcaaaactggaagaataaattataatcatgaaggttccctttctgtttataacagtactgggatgttcgttggctagtcctaatgggtactaccatcaggagtacaactataaaacatcacaatcatcttacaaaaacaatgaattgcaacataagactgatgatcaaggttattataaaaaagatggtgatttagaaaatagatataagcctatcgaagattcaaacagcgaacattcagaatatataaatccaaaactgcaaaacggccagtatggattggacacaaactcctatggtcacatgagagctgacggaacctatggatatggcaaccaaaacagcatgggtgtcgaaggtctcgccagaaacgacaggatctatggcagtcaagctggatattctgctggttacggtagcagcaacagtcacagctacagtacaaactccaaccttaggatgttaacgtctcgtcttcaacaagaattggagagagatttgcaagaagctgttcgccaaaacagcgcctattctcaatctaggatagatatgactgaacttgaaagagagctaaggaggaatttaacggagaggctaaacaacgagctgaatcttaaatacggtcaacaaattgttcgcagtgggatgtcctattccatgagtggaggaagattacaaccaactgcaaactacgataaccaagaacttgtagaccttaagagccagatagaaaacaccttgctcaatcagttacgcacccaatatagccaatacagtcaacagagcagctatggtagttcaaactcttaccaacacaatggaggtgcctacgtttaccccgtaacacagagaccagtatactacaccacaacctacaggccgatttacccaaccttgacatctggaggatacgtcgacacccacaatcaacaatataacacggttaagacacgatacactccaattgctaatcctgaaagtctcacatcgattgcttcaagagtccaaagtcaattggacgcaaatctgaacaacgtactggacgaaacacgtagaactcacttctcatcaagtcaacagtactctttgacgaaccctgatgctcttcttgaaagattgaggaacgaactgagaaacaacatcacctaccaattagacgatatgatcagtaagaattacggatcgcagacgcaaaaagacggatacttgtactctgtcggatctaacggtgccatatcgacagattacaattacggattgagagatatggaaaatttgaaggagcagatccaaagaaatttgattaataaattggaaagagactttgaatcttccagaaagagttggtcttcctcttcctcgtacagcagccagtccagctacggtaacacctacggttcagctcaaccagcttattaccagccaggtgtcaaagcaggatacaattcaggcagtgaatacaattcagccagtagatataactcagccagcggatataacacagcaaatcaacataactcagccagcggatacaattcaggtggcaccacctacagcagcggaaacatggcggagttgcagagacaacttcaagctgatctatcgagacagcttaaccaagcgttaaaccaagagtcgcacagttcatacagctatactcctcaaaattaccagtcttccctccaagacctgtctgatcaattgaataggaatcttacaaagcatttacaagaatatagtgccagtggatcctatgcagcctacggaaacttcgatagatcccaaatggcagatcttagagctaaactggaagaatctctgatgaaccaattgcgacaaggactacaacaatcaatgcagactcacagttcatacagttcaagtagcagcagcagtagcagtagtagcaactccgctggctacagaccagcagctaattaccagatgggaggatacagttcagatggaacatgttgtcaaggagataaccggagatataaacgatccccacaacaacaaacacagccacaagatatcggctggaaaccacagggaagccaagttcctcctccaccaaaacctgcaccagctaagtccagaagtcaacgagaatttggattcggcgatggttttctaaaaatgaaaacaaatctcgaacagacacaaaaagatttaaaagcaaattttgagcagggacataaagattttactaaaaaagctgaagaagtaggtgaaggaattgcagatataggccataaagtattcaactggaaaccatggggaaacaatggtcatcctggacgtcatgataatggaagaaggccctggaaccgcggacaggggaatagatatcaacaacaaatagaagatcaagaacaaattggccaacagcaggaacctgatgaagacttgggtcagcgtcaagagcaaggaagtagatatagtaaaattaccaaaatcacacatgtaggtcagcatgtagaagatctcggtcaagaacaagtagaagatcttggtcagcaagtagaattaggacaaaaccaaatcgatcttggccaacaattagaagataatgatgactttagtcaacatcaagtccgaagaaacaaatatcgtgtttcaaaaattattagaggccaatcacagtcacaaattggtcaacaaactgaagacctcggtcaacaacaagtagaggattttggacaacagcaagtagaattgggacaaagtcaaatcgatctgggccaacaactggaagatactgattttggtcaacaattagaagatggagaagaccttggtcaccaaggaaccagatatagtaaaattaccagagtaactaaaattattcgaggcaaaactcattcgaaagtagatcaacaatctgaaaatttaggtcaacagcaagtcgaagatcttggccaattagtagacactgacgaaaatcttggtcaacatcaaattcacggaactggatatagtaaaattacaaagattattcgtgggggcacaagttttgtagatggccagcaggtagaagatctaggtcagaaagtagaagaccaacaacagcaacaagtagaagatgttgaagatcttggtcaacatcaaattcacggaactggatatagtaaaattacaaagattattcgtgggggcacaagttttgtagatggccagcaagtagaagatctaggtcagaaagtagaagaccaacaacagcaacaagtagaagatgttgaggacactacagatattggtcaaaaaattgaacacgttctacataaagtaacaggaggaaagctgcatttaaaacctttagatcagggacagcaagtagaagaccttagtcaacagcaacaggtagattttggccaacaaattgaagaggggggaaaaatacatcaaacaaatggaggaaaaatacagcaaaaaaaccttgaccaaaatcaacaaaccgaagatcttagccaacaacaacagatagactttggccagcaaattgaagaagagaccaccactataggccaggaaattgaagagacgaccactgtagtctaccagaaagtcgaaaatatcgaccaacaacagcaaattgattttggtcaacaaatagaagaaacccacttagatcagagcaaattgcatttaaaacctttagatcaatctcaacaacaagaagaacttggtcaagagcaagaagaagtcaactttactataggtccacaagttgaagacgactttcctcatggaaaccaaggaaaaattcaaattggtggttcacaggatcaagaacaggaacaggacactcaacaagtggaacagcagatcagtggttggcacgaccaaccaagaatacaacaaaagccattagaccaaagccaagagccaactgacacacagcaagttgaaatttttgatgtgaattcagtaaagggtactgatgatcacctaccaaaggacattttgaaaaaggttaaatttattgaggataagctatcaaacaagttagaagctgccatcataggattttgtggtacagatagacttaatgttccccaaatgagatcagaactcattaatgatgttaaaaagaacattactgaagaattcaacaagggattctctagatactatctacaaaatgatcttggtttaactgataaacaaatagctagaattcaagctatactgttagatagactcttagcgaaaattgaagaaggcgttgaaagagcgaaaaaggaacatgaaacaaggaaaacaacgacaataattaagacatcacaagaacctgatgacaccggtatatttgatgacataaaaccagaaggatcaatattccaaagtggacataggacaattataagaaatagaacagtgataacgacccatactacatcagggggagcctcctttggaattacagaccaaggtcaatttatatcacaaccaaaatctacacagggtgcagaaaatgaagctgattctttaataacagctcttagaaacttaagtaactccaaacacaagacagtagtagagcaagaaccaacagataatcatgttaacagttattcacatacaacagtttatcaaggtggcagtagcattggtggatatcaagaacaagaggtacagacaggacatggtaataatgacggcttcgataatcaagaacaagagattcaaactggatatggtggccgcggtagccatcattcttcaatatatagtaatcaagaacaagaaattcaaactggatatggtcgcaatagacatcgtggttcaggctacgataatcaagaacaagaaatccaatctggatatggaggtcataatagacatcgtgtttcagggcttgattatcaagaacaagaaatccaaacaggatatggcaatcataataaccaccatacttctagctatgatgttcaagaacaggaaataactggatatggcggacatggtcacataagttcttcacattctggatatggcggacgtgatcatataagttcttcacattctggatatgatcatcacgatcacaatcatggatatgataaccatgatattgaagtcatacatagtggaagccaccatactagctttgacgaaccgcttagttttaatcatcatgatataagtgacagtcattccctagaccatcatcatggcggttacggtcacccagaatacttagacatagaagatccccacagccattactatacaagacatgaagtacacgttgaagaagtaccacaccacactcactcacatagttatcaacaagaacaagaaataataggccaagaatcagggtatgatgatcaggcccaagaagaagaatcaattcccttaccaaacgaacaactacaatcttcatctcaggaacagcaaaaaatagaagtcataagacatgatcattatgacgatgtaaatgctgttcccagtgtttctgtagaccaagaagttgaagaaccacaccatcatgatgtaattcacatagaggaggttcatgtagatcaagaaaattctgttcctccagaagtatatgaagaattaccttggtggaagaaggctgcttcaaaaatacggcatggagctcataaggtgaaggaaggggcgatcaaattgaaggagaaagttgttggatgttaaatgttagatttaaaaatagtattt

SEQ ID NO: 3907 - DNA, 3692 bp, Diabrotica virgifera
aacgatccccacaacaacaaacacagccacaagatatcggctggaaaccacagggaagccaagttcctcctccaccaaaacctgcaccagctaagtccagaagtcaacgagaatttggattcggcgatggttttctaaaaatgaaaacaaatctcgaacagacacaaaaagatttaaaagcaaattttgagcagggacataaagattttactaaaaaagctgaagaagtaggtgaaggaattgcagatataggccataaagtattcaactggaaaccatggggaaacaatggtcatcctggacgtcatgataatggaagaaggccctggaaccgcggacaggggaatagatatcaacaacaaatagaagatcaagaacaaattggccaacagcaggaacctgatgaagacttgggtcagcgtcaagagcaaggaagtagatatagtaaaattaccaaaatcacacatgtaggtcagcatgtagaagatctcggtcaagaacaagtagaagatcttggtcagcaagtagaattaggacaaaaccaaatcgatcttggccaacaattagaagataatgatgactttagtcaacatcaagtccgaagaaacaaatatcgtgtttcaaaaattattagaggccaatcacagtcacaaattggtcaacaaactgaagacctcggtcaacaacaagtagaggattttggacaacagcaagtagaattgggacaaagtcaaatcgatctgggccaacaactggaagatactgattttggtcaacaattagaagatggagaagaccttggtcaccaaggaaccagatatagtaaaattaccagagtaactaaaattattcgaggcaaaactcattcgaaagtagatcaacaatctgaaaatttaggtcaacagcaagtcgaagatcttggccaattagtagacactgacgaaaatcttggtcaacatcaaattcacggaactggatatagtaaaattacaaagattattcgtgggggcacaagttttgtagatggccagcaggtagaagatctaggtcagaaagtagaagaccaacaacagcaacaagtagaagatgttgaagatcttggtcaacatcaaattcacggaactggatatagtaaaattacaaagattattcgtgggggcacaagttttgtagatggccagcaagtagaagatctaggtcagaaagtagaagaccaacaacagcaacaagtagaagatgttgaggacactacagatattggtcaaaaaattgaacacgttctacataaagtaacaggaggaaagctgcatttaaaacctttagatcagggacagcaagtagaagaccttagtcaacagcaacaggtagattttggccaacaaattgaagaggggggaaaaatacatcaaacaaatggaggaaaaatacagcaaaaaaaccttgaccaaaatcaacaaaccgaagatcttagccaacaacaacagatagactttggccagcaaattgaagaagagaccaccactataggccaggaaattgaagagacgaccactgtagtctaccagaaagtcgaaaatatcgaccaacaacagcaaattgattttggtcaacaaatagaagaaacccacttagatcagagcaaattgcatttaaaacctttagatcaatctcaacaacaagaagaacttggtcaagagcaagaagaagtcaactttactataggtccacaagttgaagacgactttcctcatggaaaccaaggaaaaattcaaattggtggttcacaggatcaagaacaggaacaggacactcaacaagtggaacagcagatcagtggttggcacgaccaaccaagaatacaacaaaagccattagaccaaagccaagagccaactgacacacagcaagttgaaatttttgatgtgaattcagtaaagggtactgatgatcacctaccaaaggacattttgaaaaaggttaaatttattgaggataagctatcaaacaagttagaagctgccatcataggattttgtggtacagatagacttaatgttccccaaatgagatcagaactcattaatgatgttaaaaagaacattactgaagaattcaacaagggattctctagatactatctacaaaatgatcttggtttaactgataaacaaatagctagaattcaagctatactgttagatagactcttagcgaaaattgaagaaggcgttgaaagagcgaaaaaggaacatgaaacaaggaaaacaacgacaataattaagacatcacaagaacctgatgacaccggtatatttgatgacataaaaccagaaggatcaatattccaaagtggacataggacaattataagaaatagaacagtgataacgacccatactacatcagggggagcctcctttggaattacagaccaaggtcaatttatatcacaaccaaaatctacacagggtgcagaaaatgaagctgattctttaataacagctcttagaaacttaagtaactccaaacacaagacagtagtagagcaagaaccaacagataatcatgttaacagttattcacatacaacagtttatcaaggtggcagtagcattggtggatatcaagaacaagaggtacagacaggacatggtaataatgacggcttcgataatcaagaacaagagattcaaactggatatggtggccgcggtagccatcattcttcaatatatagtaatcaagaacaagaaattcaaactggatatggtcgcaatagacatcgtggttcaggctacgataatcaagaacaagaaatccaatctggatatggaggtcataatagacatcgtgtttcagggcttgattatcaagaacaagaaatccaaacaggatatggcaatcataataaccaccatacttctagctatgatgttcaagaacaggaaataactggatatggcggacatggtcacataagttcttcacattctggatatggcggacgtgatcatataagttcttcacattctggatatgatcatcacgatcacaatcatggatatgataaccatgatattgaagtcatacatagtggaagccaccatactagctttgacgaaccgcttagttttaatcatcatgatataagtgacagtcattccctagaccatcatcatggcggttacggtcacccagaatacttagacatagaagatccccacagccattactatacaagacatgaagtacacgttgaagaagtaccacaccacactcactcacatagttatcaacaagaacaagaaataataggccaagaatcagggtatgatgatcaggcccaagaagaagaatcaattcccttaccaaacgaacaactacaatcttcatctcaggaacagcaaaaaatagaagtcataagacatgatcattatgacgatgtaaatgctgttcccagtgtttctgtagaccaagaagttgaagaaccacaccatcatgatgtaattcacatagaggaggttcatgtagatcaagaaaattctgttcctccagaagtatatgaagaattaccttggtggaagaaggctgcttcaaaaatacggcatggagctcataaggtgaaggaaggggcgatcaaattgaaggagaaagttgttggatgttaaatgttagatttaaaaatagtattt

SEQ ID NO: 3908 - DNA, 2119 bp, Diabrotica virgifera
gctgagcgaaagttgaagtggtcaaaactggaagaataaattataatcatgaaggttccctttctgtttataacagtactgggatgttcgttggctagtcctaatgggtactaccatcaggagtacaactataaaacatcacaatcatcttacaaaaacaatgaattgcaacataagactgatgatcaaggttattataaaaaagatggtgatttagaaaatagatataagcctatcgaagattcaaacagcgaacattcagaatatataaatccaaaactgcaaaacggccagtatggattggacacaaactcctatggtcacatgagagctgacggaacctatggatatggcaaccaaaacagcatgggtgtcgaaggtctcgccagaaacgacaggatctatggcagtcaagctggatattctgctggttacggtagcagcaacagtcacagctacagtacaaactccaaccttaggatgttaacgtctcgtcttcaacaagaattggagagagatttgcaagaagctgttcgccaaaacagcgcctattctcaatctaggatagatatgactgaacttgaaagagagctaaggaggaatttaacggagaggctaaacaacgagctgaatcttaaatacggtcaacaaattgttcgcagtgggatgtcctattccatgagtggaggaagattacaaccaactgcaaactacgataaccaagaacttgtagaccttaagagccagatagaaaacaccttgctcaatcagttacgcacccaatatagccaatacagtcaacagagcagctatggtagttcaaactcttaccaacacaatggaggtgcctacgtttaccccgtaacacagagaccagtatactacaccacaacctacaggccgatttacccaaccttgacatctggaggatacgtcgacacccacaatcaacaatataacacggttaagacacgatacactccaattgctaatcctgaaagtctcacatcgattgcttcaagagtccaaagtcaattggacgcaaatctgaacaacgtactggacgaaacacgtagaactcacttctcatcaagtcaacagtactctttgacgaaccctgatgctcttcttgaaagattgaggaacgaactgagaaacaacatcacctaccaattagacgatatgatcagtaagaattacggatcgcagacgcaaaaagacggatacttgtactctgtcggatctaacggtgccatatcgacagattacaattacggattgagagatatggaaaatttgaaggagcagatccaaagaaatttgattaataaattggaaagagactttgaatcttccagaaagagttggtcttcctcttcctcgtacagcagccagtccagctacggtaacacctacggttcagctcaaccagcttattaccagccaggtgtcaaagcaggatacaattcaggcagtgaatacaattcagccagtagatataactcagccagcggatataacacagcaaatcaacataactcagccagcggatacaattcaggtggcaccacctacagcagcggaaacatggcggagttgcagagacaacttcaagctgatctatcgagacagcttaaccaagcgttaaaccaagagtcgcacagttcatacagctatactcctcaaaattaccagtcttccctccaagacctgtctgatcaattgaataggaatcttacaaagcatttacaagaatatagtgccagtggatcctatgcagcctacggaaacttcgatagatcccaaatggcagatcttagagctaaactggaagaatctctgatgaaccaattgcgacaaggactacaacaatcaatgcagactcacagttcatacagttcaagtagcagcagcagtagcagtagtagcaactccgctggctacagaccagcagctaattaccagatgggaggatacagcaatggctaccaatcaggtagagatagctacgacggtcacaactatcgataaaaaatagcaacaatgacagaacttatttaatttaaagtgtaataggttacaataagtataaatataaaaaaaaataaagtttttctac

SEQ ID NO: 3909 - DNA, 3622 bp, Diabrotica virgifera
  SmartBlast Evalue=0; Info=Matrix metalloproteinase 1 n=2 Tax= Tribolium castaneum RepID=D6WKX8_TRICA
aattagaaaatataatttattggtttattgctaatttgagaataacaatacatacttcatcgtataaatttgttcttgtgataaatataaaagttttatattaatatcgtttgataaaacataaaaacaaaaattatgttttcgaaatatttaacgaaatgtataagtacaaaattcttctctatattacaataaataattacatactgattactgaaatggacacaaaattatttttgcaaatggtattgagaccacaatggtaaatgaagatgagatgatttacatatgcattttaataattatcatgaggaataataatgtgatattttttttgcaaaagaacacttctgataaaaatattgcttatgaatcttgattgagaatatttgcaaagcccaactttagaatttaaagcgctacctgtatttttaagagaataaaatatgagtttattttctacctaagctgaaagtatgcaactaaaaatacaggcaagacatttcataaattatgcaacataatctacagcgttaaccgatcttttaaatgttgagaattcagaaacatttaatcaattttataacttgacttgtaccacttggtagttttaagcttcatttacacttggcaagtttactagctgaaagcacttgcggccactaaacttgcggtcactacttttatttgaagagaaacaggacttctgatccatgtctcagaatttacaggttcaaccagttttaacagtttttgaaaatttgaaaagataacctcaaaaaatttctataagaatgcagatctttaactgcaactgctatctcctttaacagtcgttccgacctacacagagaattttcccgccttatccaatgtcaaattaaaactcgtctctctgtttttcttgagttgcaacataactattaaactattggcaattccacctaccaaaacactaacagcagcacgctccacggtacgtggagacattttctcctccaactaccaacaaataaactggaaaatatataggcagtgtaccacaaacaagtttagtggttacaggtaccttcggccagtaaacttgccaagtgtaatacttggcaagtttactggctgaaagcatttgcttgtggttttccgtcttcatattttcaagtttatttgctaatagttagataagaaaatgactccaagtgcagtagtccgtgcagctgtcaatgttttggcaagtcaaattgccaacagtcaatagttgttacaacgcaagaaaaacaggaaaaatgagtttggattagagattgtataaggcgtagaaatactctgggtgtgtttagaacaactggtaaaggagatagagttgaaggatttttatgaggttatcttactaaaagtttcaaaaactgttaaaactagttgaatctaaacctacaaagtctgaaacatggatgagaagtcctgtttgtcctgaaacataagtagaactaacattacgatatcttgctactggtgatagcttagcaaatagtgggcaagtggcaagtaaactagtcggtctgtctagcaagcgcttgcctattgtttacacatggcaagtttagcggccggaagcactttcagtcagtaaacctgtcaaatgtaaatgaagcttaactcttgtagtattttacagtttaacttatgagtaaaaaataggttttttacatgttttaactaaaattattgtaatgtgtatttatttggcgtcaatgaatttgatgatataaacgtaaatgtcactttctaactaataaaaacctaaatcaaatcacaatattgttaatagtctcagtcaaagtggcttcgtttataaaacgaaaagatcacttcgtctattctatgaaacactagctagaaacattgccgccagtgtcgctagtgtcactagaagaaaagaaattcctgtgcgactagcgtggttatttccgtttccgctgtaaaattcttgcggtggtaactcggacatgtcatggtgcacatctgtatcattatcattcgaagtatcgaaaaatttcggatatgagctctcttcaccaatcagtgttcctctcattgactcactagatccgatggtaccagccggtgcgtccttacaaccgaaccaccagtacgccgtcgaccttgggaacgccggcgtcgtcacgtctactgcgaaggctctgtcattaaacctataataagcattatttttataaaagtaagtatatccattggtccactggaaggctgcgtcaatgttatttgggattccgtcccagttggagatgggtttggggtagttactcttcacgggaggtttttgagatgggtcaaatctccagaacttactgcccttgtagaagtatatttttccgttaccactccatactaaagctgaatctacatcatcaggtattcctgtgaagcctacagagatttcttttgggtaatcgccgtcgggtttcttgcccttgtacctccagtatttagatcctttgaagaagtaagtctttccgtttttgtaggtaaaagcagcatcaatattaccaggtaatccgacccagtagtcagaaatcaattttggaaatccaggtgcaatactatcgtcagtcagtctccagtacttttctcctttaaaaacgtaggtgtatccttctgcagaagtaaatatggtatcaaaggtcggatcggcgcacaaacttggatctgagcctccggaaggtttagttttaggtacgttatggctattatcgtagtcgctgtcctgatcaccgtcgtcaaatcttggagggaatttgttggtcttctgtccgtaaagtgcttgaatcccttcaatatcgtcactatctaattcaaaatttggagcgtatcctctatagaaaggagccataagagcttgtctaacgtctgagtggctaagaccaagagagtggccaaattcgtgagcggctacttggaaaagatttgtacctctgtaactatttatagaccatgattctgaagcgtcaaagtgagcatctcctccaaaaacaggaaagtaagcatgagccaaggtaccaccaggtccatcgaaaggatctccatctccgtgttcgccatattcaaatctaatttctatatgtacttgaccacttttaggagtaaatgtcaaatcggtatatgtagtccatacgtcaaacgctctttgtacttctgaatcaacatctgcacgttttaatttgcttggatattttgaaattttgtaggtcagatcctttaccttccatctactaccttgtaatgcgtatctcttcgccctgttgtctgctgttccaactttatctttaacaccacatcttggtaaggtcatcgtgtgtttagtagttgcatctagttcacccgtaacatttaatccagcaaatgcttgaaactcctctatggctttcgtatacgttcgttcatctaataattgactagaatttcccctggttggtgagaggtaaccaaattgggatagatataacaatgcattgctgtcacttggggcagtgtaggtgtattttaacgaacacagaattacagaaaaaatcacaataatctgcatcttgatttctcgaaccgaacg

SEQ ID NO: 3910 - DNA, 3541 bp, Diabrotica virgifera
  SmartBlast Evalue=0; Info=Matrix metalloproteinase 1 n=2 Tax= Tribolium castaneum RepID=D6WKX8_TRICA
aattagaaaatataatttattggtttattgctaatttgagaataacaatacatacttcatcgtataaatttgttcttgtgataaatataaaagttttatattaatatcgtttgataaaacataaaaacaaaaattatgttttcgaaatatttaacgaaatgtataagtacaaaattcttctctatattacaataaataattacatactgattactgaaatggacacaaaattatttttgcaaatggtattgagaccacaatggtaaatgaagatgagatgatttacatatgcattttaataattatcatgaggaataataatgtgatattttttttgcaaaagaacacttctgataaaaatattgcttatgaatcttgattgagaatatttgcaaagcccaactttagaatttaaagcgctacctgtatttttaagagaataaaatatgagtttattttctacctaagctgaaagtatgcaactaaaaatacaggcaagacatttcataaattatgcaacataatctacagcgttaaccgatcttttaaatgttgagaattcagaaacatttaatcaattttataacttgacttgtaccacttggtagttttaagcttcatttacacttggcaagtttactagctgaaagcacttgcggccactaaacttgcggtcactacttttatttgaagagaaacaggacttctgatccatgtctcagaatttacaggttcaaccagttttaacagtttttgaaaatttgaaaagataacctcaaaaaatttctataagaatgcagatctttaactgcaactgctatctcctttaacagtcgttccgacctacacagagaattttcccgccttatccaatgtcaaattaaaactcgtctctctgtttttcttgagttgcaacataactattaaactattggcaattccacctaccaaaacactaacagcagcacgctccacggtacgtggagacattttctcctccaactaccaacaaataaactggaaaatatataggcagtgtaccacaaacaagtttagtggttacaggtaccttcggccagtaaacttgccaagtgtaatacttggcaagtttactggctgaaagcatttgcttgtggttttccgtcttcatattttcaagtttatttgctaatagttagataagaaaatgactccaagtgcagtagtccgtgcagctgtcaatgttttggcaagtcaaattgccaacagtcaatagttgttacaacgcaagaaaaacaggaaaaatgagtttggattagagattgtataaggcgtagaaatactctgggtgtgtttagaacaactggtaaaggagatagagttgaaggatttttatgaggttatcttactaaaagtttcaaaaactgttaaaactagttgaatctaaacctacaaagtctgaaacatggatgagaagtcctgtttgtcctgaaacataagtagaactaacattacgatatcttgctactggtgatagcttagcaaatagtgggcaagtggcaagtaaactagtcggtctgtctagcaagcgcttgcctattgtttacacatggcaagtttagcggccggaagcactttcagtcagtaaacctgtcaaatgtaaatgaagcttaactcttgtagtattttacagtttaacttatgagtaaaaaataggttttttacatgttttaactaaaattattgtaatgtgtatttatttggcgtcaatgaatttgatgatataaacgtaaatgtcactttctaactaataaaaacctaaatcaaatcacaatattgttaatagtctcagtcaaagtggcttcgtttataaaacgaaaagatcacttcgtctattctatgaaacactagctagaaacattgccgccagtgtcgctagtgtcactagaagaaaagaaattcctgtgcgactagcgtggttatttccgtttccgctgtaaaattcttgcggtggtaactcggacatgtcatggtgcacattagatccgatggtaccagccggtgcgtccttacaaccgaaccaccagtacgccgtcgaccttgggaacgccggcgtcgtcacgtctactgcgaaggctctgtcattaaacctataataagcattatttttataaaagtaagtatatccattggtccactggaaggctgcgtcaatgttatttgggattccgtcccagttggagatgggtttggggtagttactcttcacgggaggtttttgagatgggtcaaatctccagaacttactgcccttgtagaagtatatttttccgttaccactccatactaaagctgaatctacatcatcaggtattcctgtgaagcctacagagatttcttttgggtaatcgccgtcgggtttcttgcccttgtacctccagtatttagatcctttgaagaagtaagtctttccgtttttgtaggtaaaagcagcatcaatattaccaggtaatccgacccagtagtcagaaatcaattttggaaatccaggtgcaatactatcgtcagtcagtctccagtacttttctcctttaaaaacgtaggtgtatccttctgcagaagtaaatatggtatcaaaggtcggatcggcgcacaaacttggatctgagcctccggaaggtttagttttaggtacgttatggctattatcgtagtcgctgtcctgatcaccgtcgtcaaatcttggagggaatttgttggtcttctgtccgtaaagtgcttgaatcccttcaatatcgtcactatctaattcaaaatttggagcgtatcctctatagaaaggagccataagagcttgtctaacgtctgagtggctaagaccaagagagtggccaaattcgtgagcggctacttggaaaagatttgtacctctgtaactatttatagaccatgattctgaagcgtcaaagtgagcatctcctccaaaaacaggaaagtaagcatgagccaaggtaccaccaggtccatcgaaaggatctccatctccgtgttcgccatattcaaatctaatttctatatgtacttgaccacttttaggagtaaatgtcaaatcggtatatgtagtccatacgtcaaacgctctttgtacttctgaatcaacatctgcacgttttaatttgcttggatattttgaaattttgtaggtcagatcctttaccttccatctactaccttgtaatgcgtatctcttcgccctgttgtctgctgttccaactttatctttaacaccacatcttggtaaggtcatcgtgtgtttagtagttgcatctagttcacccgtaacatttaatccagcaaatgcttgaaactcctctatggctttcgtatacgttcgttcatctaataattgactagaatttcccctggttggtgagaggtaaccaaattgggatagatataacaatgcattgctgtcacttggggcagtgtaggtgtattttaacgaacacagaattacagaaaaaatcacaataatctgcatcttgatttctcgaaccgaacg

SEQ ID NO: 3911 - DNA, 2074 bp, Diabrotica virgifera
aattagaaaatataatttattggtttattgctaatttgagaataacaatacatacttcatcgtataaatttgttcttgtgataaatataaaagttttatattaatatcgtttgataaaacataaaaacaaaaattatgttttcgaaatatttaacgaaatgtataagtacaaaattcttctctatattacaataaataattacatactgattactgaaatggacacaaaattatttttgcaaatggtattgagaccacaatggtaaatgaagatgagatgatttacatatgcattttaataattatcatgaggaataataatgtgatattttttttgcaaaagaacacttctgataaaaatattgcttatgaatcttgattgagaatatttgcaaagcccaactttagaatttaaagcgctacctgtatttttaagagaataaaatatgagtttattttctacctaagctgaaagtatgcaactaaaaatacaggcaagacatttcataaattatgcaacataatctacagcgttaaccgatcttttaaatgttgagaattcagaaacatttaatcaattttataacttgacttgtaccacttggtagttttaagcttcatttacacttggcaagtttactagctgaaagcacttgcggccactaaacttgcggtcactacttttatttgaagagaaacaggacttctgatccatgtctcagaatttacaggttcaaccagttttaacagtttttgaaaatttgaaaagataacctcaaaaaatttctataagaatgcagatctttaactgcaactgctatctcctttaacagtcgttccgacctacacagagaattttcccgccttatccaatgtcaaattaaaactcgtctctctgtttttcttgagttgcaacataactattaaactattggcaattccacctaccaaaacactaacagcagcacgctccacggtacgtggagacattttctcctccaactaccaacaaataaactggaaaatatataggcagtgtaccacaaacaagtttagtggttacaggtaccttcggccagtaaacttgccaagtgtaatacttggcaagtttactggctgaaagcatttgcttgtggttttccgtcttcatattttcaagtttatttgctaatagttagataagaaaatgactccaagtgcagtagtccgtgcagctgtcaatgttttggcaagtcaaattgccaacagtcaatagttgttacaacgcaagaaaaacaggaaaaatgagtttggattagagattgtataaggcgtagaaatactctgggtgtgtttagaacaactggtaaaggagatagagttgaaggatttttatgaggttatcttactaaaagtttcaaaaactgttaaaactagttgaatctaaacctacaaagtctgaaacatggatgagaagtcctgtttgtcctgaaacataagtagaactaacattacgatatcttgctactggtgatagcttagcaaatagtgggcaagtggcaagtaaactagtcggtctgtctagcaagcgcttgcctattgtttacacatggcaagtttagcggccggaagcactttcagtcagtaaacctgtcaaatgtaaatgaagcttaactcttgtagtattttacagtttaacttatgagtaaaaaataggttttttacatgttttaactaaaattattgtaatgtgtatttatttggcgtcaatgaatttgatgatataaacgtaaatgtcactttctaactaataaaaacctaaatcaaatcacaatattgttaatagtctcagtcaaagtggcttcgtttataaaacgaaaagatcacttcgtctattctatgaaacactagctagaaacattgccgccagtgtcgctagtgtcactagaagaaaagaaattcctgtgcgactagcgtggttatttccgtttccgctgtaaaattcttgcggtggtaactcggacatgtcatggtgcacatttataagaaatggtttgcggctggacttcactgcctcgggttggctcggtagtgc

SEQ ID NO: 3912 - DNA, 4118 bp, Diabrotica virgifera
  SmartBlast Evalue=0; Info="Bent, isoform C n=7 Tax=melanogaster subgroup RepID=Q7KQP6_DROME"
gtgcatctggagtcttaatttgaggaaggctaggtctaggttgttcagatatagctgactgagaaggagctttttcttttccttcgactgagatagatggtctttccttagagaatttactcttttctctaccagcatattctggagcatcatgtttttcgaatttctctaacactggtctgtcgtaatcagggatattttcccaagcattaatatcataatcttcttttttggcagaagattttttgactgttgtctttttctcttcaactgctcctttcttcaagtcaacttcaagtttattcgccttttcagcttttttaccctccgattgaactggtttcaattgaatgttcaagaacgaacccttttgagcttcttctttagggggtattacccttttaggtttttccagcttcttcagagacgcacgtctttcttcaagattcagaacagttaattctgatttttgaggctctctcttagcgaaaggttggggtgttaggggtttattttcttccttaggcttttcgactttctcgaaaagcgatggcctgtctgtaggcttttctggttctgtgatcaagggtgtgcctaatctgttctgtgtaggtgtaagcttgttttcagttgtgttaggatctggggtcaaggaatggcgcggagttgtttgtgttggtgccaatttctcctccttaagttgtggtttgtcttcagattttttgggctctgaagttattgatgtacgaggggacttaagtgaggaaggtaatttgtcttcttttattgatgtacggggggatttgagtatagagggcaatttgtcctcctttagttgtggcttttcttcggattttttggggtctgaagttattgaagtacgaggagatgtgaggggagaaggtaatttgtcttctttaggttggggttttccagaatctggggttaggagtttgcttggagttgtttctgatacagatttacgtgaaactaatgtttcatcttttggtttaggtactgattctggtgtaagagattttcgaggaattgaggcaggacttgaagattcatctgttggtttagttttgtcttgtggtttctcaggttcaggagttagggatttccgtgtaagggtttttgttggagatacctttttctcctgaagtttggacttctcgggttcaggtgtaagggattttctagtagcagttttaattggcgctaatttgtcacttttcggtttaggctcctctggttctggctcttttggtttttccactttcttttcgacctcttttttaatctcagttttggttttctcctctactcgtgttttggtggtggcttcggtcttgggtttgtcctcaggtttggattctggtacctttttagtgtccgtagccttttggaaactatcttcaatgtgattgagtggtgtgtcaggggttttcacttcttttgtggtttccaattttttggtatctttggttatctttttcttgtcatctactaatgatgtgcgcctggactcagtcttactctcctcattgacttttgaaatggaagatttcctactaacttttccatctttgataactttttcttcggtttgtataattgagcttctgcgtgattcggttcttacttcttcgttctgttgaaccgatgtacgccttattttcttctcaacatctttcttttcctcttcctttttggccacaatcttttcgtcttttttcttttcttcgtccttcttaattatcattttctcctcttcttttctttcctctttcttttctatctttttaactgctttcttttcttctgttttcttttcctctttcttttctactttcttttcaaccttctcttctttcttttctacctttttttcttcttttttctcttcaactttcttttcctgtttttcttctttcttttcttctttcttttcctctttcttttcttcgataacctcctcttcggattcttcttcttcttcatcttcctctttagcttcgtttactttaagtgtagcgcttatttcgtcttcgccaaattcgtttttggcaacgcacttgtatgtagcggaatgtgatactttacatttactaatgctaagtcgcgtcacagtgccatcaaaagagattttgatttctgaagattcggttatcacagtggtgttcttgtaccatgtgattttgactgttttgtcttcgattttgagagaagttataaaatcaactgattttccttcgtcagtaacgatattggttagtttggtcagtttcggcttgtctcctttgggtttctcctctggaggtaactcagtgacttcaacgacttgtgaagttgcctcacccttttcgtttttagcaaccaatttgtacatacctttgtcttttttctcaacttcattaatttcgagtttaacagtaaattcgccgtctttaacttggtcaacgtgaacagtatgtcttgaatcttctttaacggcatcgctttccttaaaccatgtacaatcaggtgcaaacttgctgagaactttacattcaacaataacagttttcttcttaatgattttaataactttgggtttttctttgataacaggaataatctcgatgtttaaggtgaggttggcgttgagttcaccaagtgtgttccttatattgcatttgtacaagccagagtcatcaatccccggatcattgagttccaatttgacgtaatatatatcttcttctgtttgtttaatactgatcttaattttggatgattctgtgacttctttgctttctctgtaccaaactatagtaggtttaggattagcacgaactttacactccatgacaacgagtttgcctccatcgtgagaggttatcctgggtttttcgacgaacgttggtccttctccttctggttctggttctgcttcgatatttaggttcagatttgcattactttctccgtattcgttcttcacatggcatctgtaagtacccccatcagctgccgatggatccttgatttctaaggacagttcgaatttgtcttcttcgagatcaacgatctggattttaattttggaagattccttgacggctgtggttccgcggaaccacgtgacgtcaggtttaggtttagctttgcatttacatttcatagtaataagagtgccactctcattaggtatgattttgggtttctcaaggaaagaaggcgcaaagccatcagcgctatctccactgtcaaagttaaggctgattgtggcgttactttctcccaagtcattttttgcggtcaccttgtatttgccagcatcctctaccgtgacatcgattatttcaagggtcgcaaaatatgaatggccatctttatctatcctcaacttgtgacgtggaccttcgctaacagcgttgccattgtgggaccaactgacggttggacggggatcggcctgtatcctacattcgaataataattttttgccatcatcttcttggcgaatagctggtttcttcgcaaaagtgggtgctaggccgtctatttgtttttcttttggttcgtccatggggctgaagttgagattgatggaggctgctatttcccccatggtatttttcgctttgaccttgtaaaggccagcgtcggtttcaataacatcatctaattcgagtactactaaaaatttgttggtgcctatggattgaattttaaaattagttctactgtcttctgaaagtggtatatcgcttcgaaaccattcgatttccggtttcggagcagccagtaactggcattcgaaaatgagtttgtttccatcgtcctcctgcctcaattgaggcttttgcgtgaagctgggagcgaaatcctctgccactcccatgctattgctcttttacttcgatatagaacacatgaaatcggccttcttagaagggttgaattttgaagattttagtagcacttcacttcactgcacacacagaaaatggcaaaatggcgcgtggtgtcgtattgtgtatttttttgtcgtgtgcgtcgcagcgcgtcgtcgcgagcgtcgttcgtctatcctagaaattgcttcgtggcctctaaagcactgactaaag

SEQ ID NO: 3913 - DNA, 3423 bp, Diabrotica virgifera
  SmartBlast Evalue=1E-144; Info="Titin, putative n=1 Tax= Pediculus humanus corporis RepID=E0VID6_PEDHC"
gtgcatctggagtcttaatttgaggaaggctaggtctaggttgttcagatatagctgactgagaaggagctttttcttttccttcgactgagatagatggtctttccttagagaatttactcttttctctaccagcatattctggagcatcatgtttttcgaatttctctaacactggtctgtcgtaatcagggatattttcccaagcattaatatcataatcttcttttttggcagaagattttttgactgttgtctttttctcttcaactgctcctttcttcaagtcaacttcaagtttattcgccttttcagcttttttaccctccgattgaactggtttcaattgaatgttcaagaacgaacccttttgagcttcttctttagggggtattacccttttaggtttttccagcttcttcagagacgcacgtctttcttcaagattcagaacagttaattctgatttttgaggctctctcttagcgaaaggttggggtgttaggggtttattttcttccttaggcttttcgactttctcgaaaagcgatggcctgtctgtaggcttttctggttctgtgatcaagggtgtgcctaatctgttctgtgtaggtgtaagcttgttttcagttgtgttaggatctggggtcaaggaatggcgcggagttgtttgtgttggtgccaatttctcctccttaagttgtggtttgtcttcagattttttgggctctgaagttattgatgtacgaggggacttaagtgaggaaggtaatttgtcttcttttattgatgtacggggggatttgagtatagagggcaatttgtcctcctttagttgtggcttttcttcggattttttggggtctgaagttattgaagtacgaggagatgtgaggggagaaggtaatttgtcttctttaggttggggttttccagaatctggggttaggagtttgcttggagttgtttctgatacagatttacgtgaaactaatgtttcatcttttggtttaggtactgattctggtgtaagagattttcgaggaattgaggcaggacttgaagattcatctgttggtttagttttgtcttgtggtttctcaggttcaggagttagggatttccgtgtaagggtttttgttggagatacctttttctcctgaagtttggacttctcgggttcaggtgtaagggattttctagtagcagttttaattggcgctaatttgtcacttttcggtttaggctcctctggttctggctcttttggtttttccactttcttttcgacctcttttttaatctcagttttggttttctcctctactcgtgttttggtggtggcttcggtcttgggtttgtcctcaggtttggattctggtacctttttagtgtccgtagccttttggaaactatcttcaatgtgattgagtggtgtgtcaggggttttcacttcttttgtggtttccaattttttggtatctttggttatctttttcttgtcatctactaatgatgtgcgcctggactcagtcttactctcctcattgacttttgaaatggaagatttcctactaacttttccatctttgataactttttcttcggtttgtataattgagcttctgcgtgattcggttcttacttcttcgttctgttgaaccgatgtacgccttattttcttctcaacatctttcttttcctcttcctttttggccacaatcttttcgtcttttttcttttcttcgtccttcttaattatcattttctcctcttcttttctttcctctttcttttctatctttttaactgctttcttttcttctgttttcttttcctctttcttttctactttcttttcaaccttctcttctttcttttctacctttttttcttcttttttctcttcaactttcttttcctgtttttcttctttcttttcttctttcttttcctctttcttttcttcgataacctcctcttcggattcttcttcttcttcatcttcctctttagcttcgtttactttaagtgtagcgcttatttcgtcttcgccaaattcgtttttggcaacgcacttgtatgtagcggaatgtgatactttacatttactaatgctaagtcgcgtcacagtgccatcaaaagagattttgatttctgaagattcggttatcacagtggtgttcttgtaccatgtgattttgactgttttgtcttcgattttgagagaagttataaaatcaactgattttccttcgtcagtaacgatattggttagtttggtcagtttcggcttgtctcctttgggtttctcctctggaggtaactcagtgacttcaacgacttgtgaagttgcctcacccttttcgtttttagcaaccaatttgtacatacctttgtcttttttctcaacttcattaatttcgagtttaacagtaaattcgccgtctttaacttggtcaacgtgaacagtatgtcttgaatcttctttaacggcatcgctttccttaaaccatgtacaatcaggtgcaaacttgctgagaactttacattcaacaataacagttttcttcttaatgattttaataactttgggtttttctttgataacaggaataatctcgatgtttaaggtgaggttggcgttgagttcaccaagtgtgttccttatattgcatttgtacaagccagagtcatcaatccccggatcattgagttccaatttgacgtaatatatatcttcttctgtttgtttaatactgatcttaattttggatgattctgtgacttctttgctttctctgtaccaaactatagtaggtttaggattagcacgaactttacactccatgacaacgagtttgcctccatcgtgagaggttatcctgggtttttcgacgaacgttggtccttctccttctggttctggttctgcttcgatatttaggttcagatttgcattactttctccgtattcgttcttcacatggcatctgtaagtacccccatcagctgccgatggatccttgatttctaaggacagttcgaatttgtcttcttcgagatcaacgatctggattttaattttggaagattccttgacggctgtggttccgcggaaccacgtgacgtcaggtttaggtttagctttgcatttacatttcatagtaataagagtgccactctcattaggtatgattttgggtttctcaaggaaagaaggcgcaaagccatcagcgctatctccaccttggaaattcaatgcaatatttgcattgctttcaccaaattcattgaaagcgttacatctataatgtccgccatcttcgcgagtgggatttgcgatttctaaagtgagaagatacgtgtctttacacgtggtctttcggagcatgcgtactcgcgtgctgtcggcgatgcttt

SEQ ID NO: 3914 - DNA, 991 bp, Diabrotica virgifera
  SmartBlast Evalue=1E-121; Info=Muscle M-line assembly protein unc-89 n=1 Tax=Harpegnathos saltator RepID=E2BUG2_9HYME
aggttcaccgacgcagcggcacaggaaggtgatggtggacccgtcttccgtctgtctgatgagtggtctctccgtgaaggtcggcctgatgccctccttttccggcacaggtgcctcatcgctgtcaaagttaaggctgattgtggcgttactttctcccaagtcattttttgcggtcaccttgtatttgccagcatcctctaccgtgacatcgattatttcaagggtcgcaaaatatgaatggccatctttatctatcctcaacttgtgacgtggaccttcgctaacagcgttgccattgtgggaccaactgacggttggacggggatcggcctgtatcctacattcgaataataattttttgccatcatcttcttggcgaatagctggtttcttcgcaaaagtgggtgctaggccgtctatttgtttttcttttggttcgtccatggggctgaagttgagattgatggaggctgctatttcccccatggtatttttcgctttgaccttgtaaaggccagcgtcggtttcaataacatcatctaattcgagtactactaaaaatttgttggtgcctatggattgaattttaaaattagttctactgtcttctgaaagtggtatatcgcttcgaaaccattcgatttccggtttcggagcagccagtaactggcattcgaaaatgagtttgtttccatcgtcctcctgcctcaattgaggcttttgcgtgaagctgggagcgaaatcctctgccactcccatgctattgctcttttacttcgatatagaacacatgaaatcggccttcttagaagggttgaattttgaagattttagtagcacttcacttcactgcacacacagaaaatggcaaaatggcgcgtggtgtcgtattgtgtatttttttgtcgtgtgcgtcgcagcgcgtcgtcgcgagcgtcgttcgtctatcctagaaattgcttcgtggcctctaaagcactgactaaag

SEQ ID NO: 3915 - DNA, 2709 bp, Diabrotica virgifera
  SmartBlast Evalue=1E-144; Info=Neutral alpha-glucosidase ab (Glucosidase ii alpha subunit) (Alpha glucosidase 2) n=1 Tax= Aedes aegypti RepID=Q16SF9_AEDAE
tttaatttttggaatattttatggtaaaaataatagaagctcatataatattgacaaaatacaacattatattaaaagctgagttctaatgttccatttccttctcttaatgctttggctatatcaattttatgaagaggaattccacctgaagttttcgtaaacattgatttcttgatttgtagttcacctgtttcagactctagtagttcatgtactacaactttaacgtaaaatactctgatgctttgatcgggtgtaccgctaattgtcgtcatatacattttttcagatcctggaatccacttggcttcactatagaagtagttgtccttttgataattgaagctgtacaaatcatctttgtatagacgacccttagctgaattccttctatcaacgttgacatatatcgagtagaagtcatccttggcctcaactgctgattttctgggggtttcaaggacgaagacgatgcttccagctctgtagaacactggcgagctagtgatgtccacttctatctgttcaactagtccagctctatattgggagaattgcttctgatcagctctataccagaagtcggtctgtttgtcgaagggatcagtgtcagagtagccaccagggaaatagacttcgacagattttacaccaggtttggtgacagcaactgacattatatcagcaccaatcattgtttgagtatctctgtcgttaactcgtgggtattgatagtagagtgggctgataatagggtctcctgtaactgtatgttcgtagaagagggtgtagatagctggaatgtgttgataacgcagtcttaaagcatttcggatgacatcttgaacatctttggaaaatagatatggctcacgtcgtttgctctctctgctggagtgtcctctaaagaaaggagtccaaactgctccctgataccatctttgtaaaagttcgtcggacggatcgccgatgaagcctccgatatcagctccacagaataccattcccagcatattggcattcatgcattcagaaatggagttggcaaagtgttcccaagtggcgctgttatcaccggtccacatagcagcgtatctttgtgatcctgcgaagttggatctggttagaacgaaaggacgttttgcattttggtctctagccattagacctttgtgggtggatttgacatgaagaagaccgtagatattatgaatatctccgtgttcgacacctccataatgctgtacctcccaaggcatggtcttttctgtactatcatcaaatacagcaggttcattcatgtcgttccagattccagccaacgttggagtactaccgttgaatttttcaaaagaaaaccaagtcgagtaatagtcagcggcttcagggttcaaatagtcgatccagctggatgctccgggccaacaatcagcaacatattcacttccgtttgcccatttggtgaagtatttgcccttagctccggcatagacgtcgtaatcatcgtcgactttgatgtggggatcagaaattgaaacgcagacccttccggtagcagaaatgttttgttgtagctcaacgggatcagtgtaagtggtgtggttccagtggaaccatttgtagtcatctgtgtggtcaccgtctaaccaaatggcgtcccagggaaaatcgttttcatccaaacgagctactacgtcttttacgtcgtcttgggatttgtaggaaaatctgcactggtggtaaccgagtgcccagatctgaggtaaatgagctttgcctgttagtcctgtaaactgcctaacgatttctttgggagtaggccctagaagtatgaatagatcaaacgctgctctctctacgatgaaataaactgatgggtccttgcctctgatccagaagaagcatctatccattgttcagctgcgttatgtaggaaaataccagaggttttgtttgcagaatgaccgtagactactggtctggctccatacagggccattggagaattggcttcgtagccccaagaatcagaatttctaagacggagcggatctccagattcagcagtaccattattggtatctcccaaagccaaactccaagcgtgatccaatagcccgtatagtctgttcgcttcagggaagtctgctttgaaagtaaatgctttactttcatcagtgctttcatacactaatctttcaccatctagaacaacttgtttcaatccgccgtagtagaaagttatatttaggggtggtcctgcatcaataaccactttataaggaagagactcatctttaggggtcactaataggctaccatctgtaccatccaatgtgtcactcaccaatggtaactcttttagttcttcgatgatgacgatatctccaagttcaaatcttttgctatctgggtcttcaactttaacccttattttgttgccttcgaacatagagacaagcaggttcaagctgttgccgttttcgttcttcaaaggtaccgtcagtatgttgtctttgatagatgcggaatatacatcggctgagtatttggatttatcatcgaccacatagttacggagacgattgcaaaatggtcgttcggaacagcttttgaagactgttttgtcaatggctgcggctgtggttgccaaaacaaccagtagtatggcgtacctaatcatctctgccattcgaagtacaccac

SEQ ID NO: 3916 - DNA, 2711 bp, Diabrotica virgifera
  SmartBlast Evalue=1E-145; Info=Neutral alpha-glucosidase ab (Glucosidase ii alpha subunit) (Alpha glucosidase 2) n=1 Tax= Aedes aegypti RepID=Q16SF9_AEDAE
tttaatttttggaatattttatggtaaaaataatagaagctcatataatattgacaaaatacaacattatattaaaagctgagttctaatgttccatttccttctcttaatgctttggctatatcaattttatgaagaggaattccacctgaagttttcgtaaacattgatttcttgatttgtagttcacctgtttcagactctagtagttcatgtactacaactttaacgtaaaatactctgatgctttgatcgggtgtaccgctaattgtcgtcatatacattttttcagatcctggaatccacttggcttcactatagaagtagttgtccttttgataattgaagctgtacaaatcatctttgtatagacgacccttagctgaattccttctatcaacgttgacatatatcgagtagaagtcatccttggcctcaactgctgattttctgggggtttcaaggacgaagacgatgcttccagctctgtagaacactggcgagctagtgatgtccacttctatctgttcaactagtccagctctatattgggagaattgcttctgatcagctctataccagaagtcggtctgtttgtcgaagggatcagtgtcagagtagccaccagggaaatagacttcgacagattttacaccaggtttggtgacagcaactgacattatatcagcaccaatcattgtttgagtatctctgtcgttaactcgtgggtattgatagtagagtgggctgataatagggtctcctgtaactgtatgttcgtagaagagggtgtagatagctggaatgtgttgataacgcagtcttaaagcatttcggatgacatcttgaacatctttggaaaatagatatggctcacgtcgtttgctctctctgctggagtgtcctctaaagaaaggagtccaaactgctccctgataccatctttgtaaaagttcgtcggacggatcgccgatgaagcctccgatatcagctccacagaataccattcccagcatattggcattcatgcattcagaaatggagttggcaaagtgttcccaagtggcgctgttatcaccggtccacatagcagcgtatctttgtgatcctgcgaagttggatctggttagaacgaaaggacgttttgcattttggtctctagccattagacctttgtgggtggatttgacatgaagaagaccgtagatattatgaatatctccgtgttcgacacctccataatgctgtacctcccaaggcatggtcttttctgtactatcatcaaatacagcaggttcattcatgtcgttccagattccagccaacgttggagtactaccgttgaatttttcaaaagaaaaccaagtcgagtaatagtcagcggcttcagggttcaaatagtcgatccagctggatgctccgggccaacaatcagcaacatattcacttccgtttgcccatttggtgaagtatttgcccttagctccggcatagacgtcgtaatcatcgtcgactttgatgtggggatcagaaattgaaacgcagacccttccggtagcagaaatgttttgttgtagctcaacgggatcagtgtaagtggtgtggttccagtggaaccatttgtagtcatctgtgtggtcaccgtctaaccaaatggcgtcccagggaaaatcgttttcatccaaacgagctactacgtcttttacgtcgtcttgggatttgtaggaaaatctgcactggtggtaaccgagtgcccagatctgaggtaaatgagctttgcctgttagtcctgtaaactgcctaacgatttctttgggagtaggccctagaagtatgaatagatcaaacgctgctctctctacgatgaaataaactgatgggtccttgcctctgatccagaagaagcatctatccattgttcagctgcgttatgtaggaaaataccagaggttttgtttgcagaatgaccgtagactactggtctggctccatacagggccattggagaattggcttcgtagccccaagaatcagaatttctaagacggagcggatctccagattcagcagtaccattattggtatctcccaaagccaaactccaagcgtgatccaatagcccgtatagtctgttcgcttcagggaagtctgctttgaaagtaaatgctttactttcatcagtgctttcatacactaatctttcaccatctagaacaacttgtttcaatccgccgtagtagaaagttataagtagtggtggtcctgcatcaataaccactttataaggaagagactcatcttgaggggtcactaataggctaccatctgtaccatccaatgtgtcactcaccaatggtaactctttcagttcttcgatgatgacgatatctccgagttcaaaccttttgctatctgggtcttcaactttaacccttattttgttgccttcaaacatagagaccagtaggttcaagttgttgccgttttcgttcttcaaaggtacagtcagaatgttgtttttgatagatgcggaatatacatcggctgagtatttggatttatcatcgaccacatagttacggagacgattgcaaaatggtcgttcggaacagtttttgaagactgttttgtcaatggctgtggctgtggtggccaaaacaaccagtaatatggcgtacctaatcatctctgccattcgaagtacaccactt

SEQ ID NO: 3917 - DNA, 2701 bp, Diabrotica virgifera
  SmartBlast Evalue=1E-145; Info=Neutral alpha-glucosidase ab (Glucosidase ii alpha subunit) (Alpha glucosidase 2) n=1 Tax= Aedes aegypti RepID=Q16SF9_AEDAE
tttaatttttggaatattttatggtaaaaataatagaagctcatataatattgacaaaatacaacattatattaaaagctgagttctaatgttccatttccttctcttaatgctttggctatatcaattttatgaagaggaattccacctgaagttttcgtaaacattgatttcttgatttgtagttcacctgtttcagactctagtagttcatgtactacaactttaacgtaaaatactctgatgctttgatcgggtgtaccgctaattgtcgtcatatacattttttcagatcctggaatccacttggcttcactatagaagtagttgtccttttgataattgaagctgtacaaatcatctttgtatagacgacccttagctgaattccttctatcaacgttgacatatatcgagtagaagtcatccttggcctcaactgctgattttctgggggtttcaaggacgaagacgatgcttccagctctgtagaacactggcgagctagtgatgtccacttctatctgttcaactagtccagctctatattgggagaattgcttctgatcagctctataccagaagtcggtctgtttgtcgaagggatcagtgtcagagtagccaccagggaaatagacttcgacagattttacaccaggtttggtgacagcaactgacattatatcagcaccaatcattgtttgagtatctctgtcgttaactcgtgggtattgatagtagagtgggctgataatagggtctcctgtaactgtatgttcgtagaagagggtgtagatagctggaatgtgttgataacgcagtcttaaagcatttcggatgacatcttgaacatctttggaaaatagatatggctcacgtcgtttgctctctctgctggagtgtcctctaaagaaaggagtccaaactgctccctgataccatctttgtaaaagttcgtcggacggatcgccgatgaagcctccgatatcagctccacagaataccattcccagcatattggcattcatgcattcagaaatggagttggcaaagtgttcccaagtggcgctgttatcaccggtccacatagcagcgtatctttgtgatcctgcgaagttggatctggttagaacgaaaggacgttttgcattttggtctctagccattagacctttgtgggtggatttgacatgaagaagaccgtagatattatgaatatctccgtgttcgacacctccataatgctgtacctcccaaggcatggtcttttctgtactatcatcaaatacagcaggttcattcatgtcgttccagattccagccaacgttggagtactaccgttgaatttttcaaaagaaaaccaagtcgagtaatagtcagcggcttcagggttcaaatagtcgatccagctggatgctccgggccaacaatcagcaacatattcacttccgtttgcccatttggtgaagtatttgcccttagctccggcatagacgtcgtaatcatcgtcgactttgatgtggggatcagaaattgaaacgcagacccttccggtagcagaaatgttttgttgtagctcaacgggatcagtgtaagtggtgtggttccagtggaaccatttgtagtcatctgtgtggtcaccgtctaaccaaatggcgtcccagggaaaatcgttttcatccaaacgagctactacgtcttttacgtcgtcttgggatttgtaggaaaatctgcactggtggtaaccgagtgcccagatctgaggtaaatgagctttgcctgttagtcctgtaaactgcctaacgatttctttgggagtaggccctagaagtatgaatagatcaaacgctgctctctctacgatgaaataaactgatgggtccttgcctctgatccagaagaagcatctatccattgttcagctgcgttatgtaggaaaataccagaggttttgtttgcagaatgaccgtagactactggtctggctccatacagggccattggagaattggcttcgtagccccaagaatcagaatttctaagacggagcggatctccagattcagcagtaccattattggtatctcccaaagccaaactccaagcgtgatccaatagcccgtatagtctgttcgcttcagggaagtctgctttgaaagtaaatgctttactttcatcagtgctttcatacactaatctttcaccatctagaacaacttgtttcaatccgccgtagtagaaagttataagtagtggtggtcctgcatcaataaccactttataaggaagagactcatcttgaggggtcactaataggctaccatctgtaccatccaatgtgtcactcaccaatggtaactctttcagttcttcgatgatgacgatatctccgagttcaaaccttttgctatctgggtcttcaactttaacccttattttgttgccttcaaacatagagaccagtaggttcaagttgttgccgttttcgttcttcaaaggtacagtcagaatgttgtttttgatagatgcggaatatacatcggctgagtatttggatttatcatcgaccacatagttacggagacgattgcaaaatggtcgttcggaacagtttttgaagactgttttgtcaatggctgtggctgtggtggccaaaacaaccagtaatatggcgtacctaatcatctctgccattcgaag

SEQ ID NO: 3918 - DNA, 2533 bp, Diabrotica virgifera
ttttgttaaataattatttcgattttattatattctatctttacaaatttagacaagaaatctatattagttaattatttgattcgaaaaaatcgaaaaaaattattctgttgttggccttatgatttgcaccaggccataagatcccagagtttgccagtggggtaccacacagtgttgaatctcattttaaggaaatctccaacgacatttccgatgagtccagtgttgagggcagttttaacacctgtttgaatggctacagctgtagcatctccaatgagtcccaatccactaatatccacatctacatcatcaacgtgccatttaacagtgaagtcattcacggtggcgttgggttggattttatttgcgcttatttttccagtccatactggtttctccatgaccattttgaagcttcctttgtaatgctgtgtaaggaacagttctttaacggttgctcggtagttgccggagattgtgaaaacgggccatctattgacccagtcaaagaccgctacattatcagcgtcatcattgatttgcttagcagtaacgttccagtcggcaagaccataccatctcaatgtgtcgatgtcgattgaggtgctagcaacaccgatgtctccatgccatgatatgttcttactaaaggcgacgaagggatcatgttgtggaactcccaattcaggtactcctggtctcattgctttgttggcgcatctcaaaacttccatgccataatcaaggtcttttccagctgaggctaaaagggcaaagcccaagaccaagagcatcttagggacaaacatttttgttattagtgaaattgttttttatcgtgttcgttttctaccaaacagtggaaacgaagaatgcatctctactagatgttagtaacctggatgaagatgacttgactgtaacgttgttaaagccctcaagcaagattcgcggacacagattaatgactcgattgggacaagactactatgctttccaagatattccttatgctcaagcaccaattggtaaaaatcgttttaagccagcaattgtatcagagggatggccagatatacttgacgcaactagtaataaaaagaaatgttttcagcccggatcaccagttccatttgatacactaatagaaactgaagattgtttacttgtgaatgtatatacacctgtgaaacctggcactcgcccttatttgcctgtttatttttggattcatggaggaggttttaatacaggtaacggagcaattggcacattggatcccagaaattttatggactatgacgtaatagttgtaacaattaattacaggttgggagtgctaggttttctatcaaccgatgacgaaagtattcctggaaatttggggttaaaagatcaacaatttgctctaaaatggacttacgataatataaaagcttttggtggtgatccgaaaaaaatcactatagggggtgaaagtgcaggagcttcatcagttagctatcatctattgcatactggaaataaggatttgattaaaggcattatacaagaaagcggttccgctcttaacacatttgcataccagattaattgtacagagaatgcctttacatatgctaggcttcttgaccaaacttttacctcaaatagctctcaagatttgctagaacttctacaaaaaactccagcagaaactttaatagaaactcagtctaatatgcattcgggagaactattaggttttatgagtggtgattattggaaaccaattattgaaagtgacagtaacactgatgcatacgtaactggacccatgcaagaaaattttatgcagggaaattttcttagggttccctcatttgtcggttttaactcagaggaatcattaacattcttaatggcagcgactgaggatcaatatgagaaaagtgtgaaacaatttgatgagcaccccgaacttatgatatcgaataagttaaatactattggaaatgaagtaaaagatgtagttcgcgattggaagaaaatctacactgatgtaccatttgcacaaaacaaggctgcatttgtaaaatatagtagtgatgctggttatattcatcccttaacacggcaagcagagctgacctcacaattcgctcccgtttatatgtaccaatttgcgtatggagagccattcttgaatgtatcaggtacggagcacgttggacacgcagaggagttaatgtacttatggaatttgccatttcttcctgttgggattgatgaacaatttcgtaccattcttataaagttttggacaaacttcattacataccaaaaccctacacctcattatgatgacattatttactggcctaaagttgatccagaaaatttagaatatctaaatatcaatgaaaccttagagataagaactggtccaagaaactatctggaagtaaaaaatatacgagagagatgtataatagaaccttatacaatatattaaatttcaagattgtaaatataatgtacctattct

SEQ ID NO: 3919 - DNA, 1726 bp, Diabrotica virgifera
gaacgtcataataatgttattagtgaaattgttttttatcgtgttcgttttctaccaaacagtggaaacgaaggcatctctactagatgttagtaacctggatgaagatgaattgattgtaacgttgttaaagccctcaagcaagattcgcggacacagattaatgactcgattgggacaagactactatgctttccaagatattccttatgctcaagcaccaattggtaaaaatcgctttaagccagcaattgcgtcagagggatggccagatatacttgacgcaactagtaataaaaagaaatgttttcagcccggatcaccagttccatttgatacactaatagaaactgaagattgtttacttgtgaatgtatatacacctgtgaaacctggcactcgcccttatttgcctgtttatttttggattcatggaggaggttttaatacaggtaacggagcaattggcacattggatcccagaaattttatggactatgacgtaatagttgtaacaattaattacaggttgggagtgctaggttttctatcaaccgatgacgaaagtattcctggaaatttggggttaaaagatcaacaatttgctctaaaatggacttacgataatataaaagcttttggtggtgatccgaaaaaaatcactatagggggtgaaagtgcaggagcttcatcagttagctatcatctattgcatactggaaataaggatttgattaaaggcattatacaagaaagcggttccgctcttaacacatttgcataccagattaattgtacagagaatgcctttacatatgctaggcttcttgaccaaacttttacctcaaatagctctcaagatttgctagaacttctacaaaaaactccagcagaaactttaatagaaactcagtctaatatgcattcgggagaactattaggttttatgagtggtgattattggaaaccaattattgaaagtgacagtaacactgatgcatacgtaactggacccatgcaagaaaattttatgcagggaaattttcttagggttccctcatttgtcggttttaactcagaggaatcattaacattcttaatggcagcgactgaggatcaatatgagaaaagtgtgaaacaatttgatgagcaccccgaacttatgatatcgaataagttaaatactattggaaatgaagtaaaagatgtagttcgcgattggaagaaaatctacactgatgtaccatttgcacaaaacaaggctgcatttgtaaaatatagtagtgatgctggttatattcatcccttaacacggcaagcagagctgacctcacaattcgctcccgtttatatgtaccaatttgcgtatggagagccattcttgaatgtatcaggtacggagcacgttggacacgcagaggagttaatgtacttatggaatttgccatttcttcctgttgggattgatgaacaatttcgtaccattcttataaagttttggacaaacttcattacataccaaaaccctacacctcattatgatgacattatttactggcctaaagttgatccagaaaatttagaatatctaaatatcaatgaaaccttagagataagaactggtccaagaaactatctggaagtaaaaaatatacgagagagatgtataatagaaccttatacaatatattaaatttcaagattgtaaatataatgtacctattct

SEQ ID NO: 3920 - DNA, 1717 bp, Diabrotica virgifera
aataatgttattagtgaaattgttttttatcgtgttcgttttctaccaaacagtggaaacgaaggcatctctactagatgttagtaacctggatgaagatgaattgattgtaacgttgttaaagccctcaagcaagattcgcggacacagattaatgactcgattgggacaagactactatgctttccaagatattccttatgctcaagcaccaattggtaaaaatcgctttaagccagcaattgcgtcagagggatggccagatatacttgacgcaactagtaataaaaagaaatgttttcagcccggatcaccagttccatttgatacactaatagaaactgaagattgtttacttgtgaatgtatatacacctgtgaaacctggcactcgcccttatttgcctgtttatttttggattcatggaggaggttttaatacaggtaacggagcaattggcacattggatcccagaaattttatggactatgacgtaatagttgtaacaattaattacaggttgggagtgctaggttttctatcaaccgatgacgaaagtattcctggaaatttggggttaaaagatcaacaatttgctctaaaatggacttacgataatataaaagcttttggtggtgatccgaaaaaaatcactatagggggtgaaagtgcaggagcttcatcagttagctatcatctattgcatactggaaataaggatttgattaaaggcattatacaagaaagcggttccgctcttaacacatttgcataccagattaattgtacagagaatgcctttacatatgctaggcttcttgaccaaacttttacctcaaatagctctcaagatttgctagaacttctacaaaaaactccagcagaaactttaatagaaactcagtctaatatgcattcgggagaactattaggttttatgagtggtgattattggaaaccaattattgaaagtgacagtaacactgatgcatacgtaactggacccatgcaagaaaattttatgcagggaaattttcttagggttccctcatttgtcggttttaactcagaggaatcattaacattcttaatggcagcgactgaggatcaatatgagaaaagtgtgaaacaatttgatgagcaccccgaacttatgatatcgaataagttaaatactattggaaatgaagtaaaagatgtagttcgcgattggaagaaaatctacactgatgtaccatttgcacaaaacaaggctgcatttgtaaaatatagtagtgatgctggttatattcatcccttaacacggcaagcagagctgacctcacaattcgctcccgtttatatgtaccaatttgcgtatggagagccattcttgaatgtatcaggtacggagcacgttggacacgcagaggagttaatgtacttatggaatttgccatttcttcctgttgggattgatgaacaatttcgtaccattcttataaagttttggacaaacttcattacataccaaaaccctacacctcattatgatgacattatttactggcctaaagttgatccagaaaatttagaatatctaaatatcaatgaaaccttagagataagaactggtccaagaaactatctggaagtaaaaaatatacgagagagatgtataatagaaccttatacaatatattaaatttcaagattgtaaatataatgtacctattct

SEQ ID NO: 3921 - DNA, 2276 bp, Diabrotica virgifera
  SmartBlast Evalue=0; Info=ATP-dependent RNA helicase p62 n=1 Tax=Tribolium castaneum RepID=UPI0001C0B395
tttgctgtgaaccttcaaagggaacggttgtgtcaaattacaattttttctgattgtaatttttgctcgattaattaaagtagtgatattttaaattcgcgttcaacgcttcagagctaaaagaaaactaaaaatgacttatccacaaaacggtgatgatggttaccaggctcgttccaatggtttctccaatttcaaaagtggaggaaacagtggaggaggaggaggttacaacaacagaaatggcggtggctataataagaccggaggtggatttaataacggcagatttaataattctttcggggataacagttacaataatcgcaacgggggagggtatcaaaataatttcaacaggaacaatcaaggatatggtggcaacggggggttgagacaggtcgaatgggctaacaaaaagttacgtccagtagagaaacacttctacgtgccccatccttctgtggcaagccgtactccctttgaggttgagcagtttcgcaaagcaaaagaaattacagtcgaaggggaagcacctaaccccattcagaacttcgacgaagcaaatttccctgattacatcttgacggaagtttgcaataaggggtatgaagctccgacgccaattcaagcacaaggctggccaattgcaatgagtggtcatgatatggttggtatagcacaaacaggatctggaaaaactctagcttatatcctacctgctgcaattcatatcaacaaccaaccacctctaaataaaggggaaggaccaattgttttggtacttgctcctactagagaactggctcaacagattcaagaggtttccaatgattttggccggtctacgaacatccgtaactcttgtatattcggaggtgctcccaaaggaccccaagctcgtgacctacaaaggggtattgagatctgtatcgccacacccggtcgtctcatagattttctcgaaaagggatctactaacctagagagatgtacatatttggtccttgacgaagctgacagaatgttagatatgggattcgaacctcaaattcgcaagatcctcagtcaagtcagacctgacagacaaacacttatgtggtctgctacatggcccaaagaggttaggaaattggcctccgatttcatgaagaacccagtttacatcaacataggttcaaagaacttatctgcaaataataatattgtacagttcgttgatgtctgccaggagcatgaaaaggaaaggaagttgggaagtctcttgcaagagatcaacaccaatgctgacactggctcgaaaattatcattttcgtagagaccaaaaagaaagttgaaggaataacgcgatcaataagaagcattggttggtcagcattgtccatgcacggagataagagccagcaggaacgtgactatgtcctgagggaatttagaactggaaaatctagtattttggtagctactgatgtagctgccagggggttagatgttgagggtataaaatatgttgtaaattacgattatcctcactcctcagaagattacattcacagaatcggtagaactggtcgttctgacagtgccggtacgtcctatgcatttttcacaccttccaactataagcaagctagagatctgatctccgttctcaatgagactaaccaggcaataaatccaaaattgactgaaattgctggaaaaacaaacagctatggcaaaggtaattcacgttggggaaatggaggaggtttcaataaaaggtttaacaaccaaggaggcggcagcggcggcggaggttataggaaatttggtaataactcaaataattactcaaacggatcaacaggatactcaaatggattcaataatggcaatagttattgaagtttgagtggaccagaaggtggtatataggttttagatatttatcagtatttctctcaagtgcataatgtgctgcacgtttccagtttttatttttatagattgacatgtaatatttaaagcagttttactacgacacagtatattaccagtaaaatgtcttacttgtttcaagtagtgaagtgaatttcagttgtttttcttgttttattggtagaattctttgtttaggtaaagaacttgaatcataaatgtgatttgtttatctaagactttgtcctacacaaattgtaaatttttgtggttgtaacgctgtgatataaatatttatttctctaggttattttttctctgtgcataatgcaccatatataaaggattaaataaa

SEQ ID NO: 3922 - DNA, 1765 bp, Diabrotica virgifera
  SmartBlast Evalue=1E-164; Info=ATP-dependent RNA helicase p62 n= 1 Tax=Tribolium castaneum RepID=UPI0001C0B395
tttgctgtgaaccttcaaagggaacggttgtgtcaaattacaattttttctgattgtaatttttgctcgattaattaaagtagtgatattttaaattcgcgttcaacgcttcagagctaaaagaaaactaaaaatgacttatccacaaaacggtgatgatggttaccaggctcgttccaatggtttctccaatttcaaaagtggaggaaacagtggaggaggaggaggttacaacaacagaaatggcggtggctataataagaccggaggtggatttaataacggcagatttaataattctttcggggataacagttacaataatcgcaacgggggagggtatcaaaataatttcaacaggaacaatcaaggatatggtggcaacggggggttgagacaggtcgaatgggctaacaaaaagttacgtccagtagagaaacacttctacgtgccccatccttctgtggcaagccgtactccctttgaggttgagcagtttcgcaaagcaaaagaaattacagtcgaaggggaagcacctaaccccattcagaacttcgacgaagcaaatttccctgattacatcttgacggaagtttgcaataaggggtatgaagctccgacgccaattcaagcacaaggctggccaattgcaatgagtggtcatgatatggttggtatagcacaaacaggatctggaaaaactctagcttatatcctacctgctgcaattcatatcaacaaccaaccacctctaaataaaggggaaggaccaattgttttggtacttgctcctactagagaactggctcaacagattcaagaggtttccaatgattttggccggtctacgaacatccgtaactcttgtatattcggaggtgctcccaaaggaccccaagctcgtgacctacaaaggggtattgagatctgtatcgccacacccggtcgtctcatagattttctcgaaaagggatctactaacctagagagatgtacatatttggtccttgacgaagctgacagaatgttagatatgggattcgaacctcaaattcgcaagatcctcagtcaagtcagacctgacagacaaacacttatgtggtctgctacatggcccaaagaggttaggaaattggcctccgatttcatgaagaacccagtttacatcaacataggttcaaagaacttatctgcaaataataatattgtacagttcgttgatgtctgccaggagcatgaaaaggaaaggaagttgggaagtctcttgcaagagatcaacaccaatgctgacactggctcgaaaattatcattttcgtagagaccaaaaagaaagttgaaggaataacgcgatcaataagaagcattggttggtcagcattgtccatgcacggagataagagccagcaggaacgtgactatgtcctgagggaatttagaactggaaaatctagtattttggtagctactgatgtagctgccagggggttaggtgagtttcccccctgaacagtggggattagttacaaaatcggtttgttgggaattataccatgttcatttgtgataaaaaagtattgaaagttaaatttggtatagtagcagtacgatttggggatttcagactggtttacgtattttattgaatttaataagtaaataattggttgggggatttttgttcttaaatttaaaaattattggggggagatttagtatgttttgtcataaaagccaatttactggcttacttgtattgaaatgtaa

SEQ ID NO: 3923 - DNA, 1590 bp, Diabrotica virgifera
  SmartBlast Evalue=4E-29; Info=ATP-dependent RNA helicase p62 n= 1 Tax=Tribolium castaneum RepID=UPI0001C0B395
gatagatttcgcttctggtgatcatatccttttaacctttcccacccccccacaacctttttgttttgctcaagaaaacctaggtttctacgacgtgggatttttgtgcacttcaatacaaaaacatatgtcatttttatgtcttcccattggtcaatttactgcgatgtttgagtagaccacaaaattgccgtaaggtagcaggaggtcaactgaagcaagcaggataatatttttgctactattcctttaaatcgtttattcactcagatcacaactcatggaatttcctttgaaactggttagtatgtttttagttatgttttcttttattttttaattaatagaatactttaagaaaacatatatacatgttcgaatttgaaatcgtgttggatctataagacgaagcactcaaattcatggacatctcgaaaactagcagttcgcactactatttatagtaaaacaagtgattgtttatcaattcttgattttttttagaaaaaatttcattgaaattgtgtgtaacatctagttttatttttattaggtatgaataagaattacttcgtaatttgacagcaatttttttagtaaaattaaataaataaatttggatttgactatcaaaaagaaattcttaatcatgttacataggctacaatataattagtcaatctgaagaaacctaacaatctataaaaaatacttcaacgaaataataattgaattttgtttgaataaaaattcttcaggttggctagtatttgactgatttctaatatgtcctttcttatttagatgttgagggtataaaatatgttgtaaattacgattatcctcactcctcagaagattacattcacagaatcggtagaactggtcgttctgacagtgccggtacgtcctatgcatttttcacaccttccaactataagcaagctagagatctgatctccgttctcaatgagactaaccaggcaataaatccaaaattgactgaaattgctggaaaaacaaacagctatggcaaaggtaattcacgttggggaaatggaggaggtttcaataaaaggtttaacaaccaaggaggcggcagcggcggcggaggttataggaaatttggtaataactcaaataattactcaaacggatcaacaggatactcaaatggattcaataatggcaatagttattgaagtttgagtggaccagaaggtggtatataggttttagatatttatcagtatttctctcaagtgcataatgtgctgcacgtttccagtttttatttttatagattgacatgtaatatttaaagcagttttactacgacacagtatattaccagtaaaatgtcttacttgtttcaagtagtgaagtgaatttcagttgtttttcttgttttattggtagaattctttgtttaggtaaagaacttgaatcataaatgtgatttgtttatctaagactttgtcctacacaaattgtaaatttttgtggttgtaacgctgtgatataaatatttatttctctaggttattttttctctgtgcataatgcaccatatataaaggattaaataaa

SEQ ID NO: 3924 - DNA, 1871 bp, Diabrotica virgifera
  SmartBlast Evalue=0; Info=Beta-N-acetylglucosaminidase NAG1 n=1 Tax=Tribolium castaneum RepID=A5YVX3_TRICA
gagtaggtatataatattgctcggaaaacaatactcgcttattcagtgttggtcaacctttacatcgatatgactttcactgattttgaatcactgaattattaagtaggtattaatagttattagtagtgcaacggtaaaataattgtcagtatggcatatttgaatttggcacattttatctggattggattgttaatttattctagctcagcattaaattcatcatggagatgggaatgcgaaaacaatgtgtgtcaaagaaagaggatcacaaatgctacaatctcgacagcactaagtcttccagcttgtcgtttattctgtactgatagtgcaggaatatggccaaaatctaccggagagttctcaatgggcagtctactaacaaaaatcaatgcttacagcatagacgttgtttcaaattcttctggaactgccattgcaagtttaataaaaggcgctataaaagaatttaagtctgatattcaggcttccattacatcgcctatagagtctggaggaaaatctgtattggtatctatccgtgtaactaattcatctattaatcaactgactctacaaacggacgaaagctattctttgtatatttcggaaactaactatggattaatcgaggttttaattatatccaacaatttctttggagcgcgtcatggtctccaaactttaagtcaaataattatctttgataacttaagaaacgagttacagatgccaatggaggcaagtataacagacaagccaaattttccgcatagaggaattttattagatacttccagaaactttgttaatgtagatacaattaaaaaaaccataaaagcaatgggcgcttcaaaactgaacacatttcattggcacattactgattcccacagctttccctatgtatcacgatctcatccagaattatccaagttaggcgcatatagtccctcaaaaacatacactgctaaagatattaaagaaatcgtacattacggaaaaatcaggggagttaaaatcattccagaatttgatgctccagctcacgttggggagggatggcaggatagtgggtttgtagtgtgcctaaatgctcagccatggcaaaattattgcgtagaaccaccatgtggacaatttgatcctacacaagataagttatatgatgttattgaagacctttatggtgacatgctggcccaatttgaaccagaattatttcatatgggcggagatgaggttgcctttcaatgttggaaaagcacgccaaaaatcgtcgagtggattaaaagtaaaaattgggaaaccacaacggatgaaggctatttcaaattatgggagtactttcaaaataatgcattggagagactttataaaaaagcaggtaaaaaaattccagccattatgtggacgagtcatttgacagaacctcaaaatttaaggattttaccgaaagaaaaatatataatacaagtttggactttgggcaacgattcacaaattaaaaacttattagaaaaagggtacaacataattctaagtaattacgatgctttgtacttcgattgtggatttgctggctgggttcaagatggaaataactggtgttctccttatattggttggcagaaagtatatgaaaataagcctgaaaaattagcaggaaataaagttagtcaagtgcttggagctgaagcagctctgtggacagaacaggctgactccgcatcagtagatactcgtttatggccaagagcggcagccatggctgaagtactctggtctaatcccgcaactggattggaaagaagcggagcatcgattttttggtacacagggaaagacttatatcccttggaata

SEQ ID NO: 3925 - DNA, 1845 bp, Diabrotica virgifera
  SmartBlast Evalue=0; Info=Beta-N-acetylglucosaminidase NAG1 n=1 Tax=Tribolium castaneum RepID=A5YVX3_TRICA
aaaataattcagttacataacgtatgtgaaatattgattgtgatatactccacagtcctacagtaatcgctgtaactatagtttttattgaaacaccagattttgatcaggtatttattagataggtatggcatatttgaatttggcacattttatctggattggattgttaatttattctagctcagcattaaattcatcatggagatgggaatgcgaaaacaatgtgtgtcaaagaaagaggatcacaaatgctacaatctcgacagcactaagtcttccagcttgtcgtttattctgtactgatagtgcaggaatatggccaaaatctaccggagagttctcaatgggcagtctactaacaaaaatcaatgcttacagcatagacgttgtttcaaattcttctggaactgccattgcaagtttaataaaaggcgctataaaagaatttaagtctgatattcaggcttccattacatcgcctatagagtctggaggaaaatctgtattggtatctatccgtgtaactaattcatctattaatcaactgactctacaaacggacgaaagctattctttgtatatttcggaaactaactatggattaatcgaggttttaattatatccaacaatttctttggagcgcgtcatggtctccaaactttaagtcaaataattatctttgataacttaagaaacgagttacagatgccaatggaggcaagtataacagacaagccaaattttccgcatagaggaattttattagatacttccagaaactttgttaatgtagatacaattaaaaaaaccataaaagcaatgggcgcttcaaaactgaacacatttcattggcacattactgattcccacagctttccctatgtatcacgatctcatccagaattatccaagttaggcgcatatagtccctcaaaaacatacactgctaaagatattaaagaaatcgtacattacggaaaaatcaggggagttaaaatcattccagaatttgatgctccagctcacgttggggagggatggcaggatagtgggtttgtagtgtgcctaaatgctcagccatggcaaaattattgcgtagaaccaccatgtggacaatttgatcctacacaagataagttatatgatgttattgaagacctttatggtgacatgctggcccaatttgaaccagaattatttcatatgggcggagatgaggttgcctttcaatgttggaaaagcacgccaaaaatcgtcgagtggattaaaagtaaaaattgggaaaccacaacggatgaaggctatttcaaattatgggagtactttcaaaataatgcattggagagactttataaaaaagcaggtaaaaaaattccagccattatgtggacgagtcatttgacagaacctcaaaatttaaggattttaccgaaagaaaaatatataatacaagtttggactttgggcaacgattcacaaattaaaaacttattagaaaaagggtacaacataattctaagtaattacgatgctttgtacttcgattgtggatttgctggctgggttcaagatggaaataactggtgttctccttatattggttggcagaaagtatatgaaaataagcctgaaaaattagcaggaaataaagttagtcaagtgcttggagctgaagcagctctgtggacagaacaggctgactccgcatcagtagatactcgtttatggccaagagcggcagccatggctgaagtactctggtctaatcccgcaactggattggaaagaagcggagcatcgattttttggtacacagggaaagacttatatcccttggaata

SEQ ID NO: 3926 - DNA, 1830 bp, Diabrotica virgifera
  SmartBlast Evalue=0; Info=Beta-N-acetylglucosaminidase NAG1 n=1 Tax=Tribolium castaneum RepID=A5YVX3_TRICA
aaaataattcagttacataacgtatgtgaaatattgattgtgatatactccacagtcctacagtaatcgctgtaactatagtttttattgaaacaccagattttgatcaggtatggcatatttgaatttggcacattttatctggattggattgttaatttattctagctcagcattaaattcatcatggagatgggaatgcgaaaacaatgtgtgtcaaagaaagaggatcacaaatgctacaatctcgacagcactaagtcttccagcttgtcgtttattctgtactgatagtgcaggaatatggccaaaatctaccggagagttctcaatgggcagtctactaacaaaaatcaatgcttacagcatagacgttgtttcaaattcttctggaactgccattgcaagtttaataaaaggcgctataaaagaatttaagtctgatattcaggcttccattacatcgcctatagagtctggaggaaaatctgtattggtatctatccgtgtaactaattcatctattaatcaactgactctacaaacggacgaaagctattctttgtatatttcggaaactaactatggattaatcgaggttttaattatatccaacaatttctttggagcgcgtcatggtctccaaactttaagtcaaataattatctttgataacttaagaaacgagttacagatgccaatggaggcaagtataacagacaagccaaattttccgcatagaggaattttattagatacttccagaaactttgttaatgtagatacaattaaaaaaaccataaaagcaatgggcgcttcaaaactgaacacatttcattggcacattactgattcccacagctttccctatgtatcacgatctcatccagaattatccaagttaggcgcatatagtccctcaaaaacatacactgctaaagatattaaagaaatcgtacattacggaaaaatcaggggagttaaaatcattccagaatttgatgctccagctcacgttggggagggatggcaggatagtgggtttgtagtgtgcctaaatgctcagccatggcaaaattattgcgtagaaccaccatgtggacaatttgatcctacacaagataagttatatgatgttattgaagacctttatggtgacatgctggcccaatttgaaccagaattatttcatatgggcggagatgaggttgcctttcaatgttggaaaagcacgccaaaaatcgtcgagtggattaaaagtaaaaattgggaaaccacaacggatgaaggctatttcaaattatgggagtactttcaaaataatgcattggagagactttataaaaaagcaggtaaaaaaattccagccattatgtggacgagtcatttgacagaacctcaaaatttaaggattttaccgaaagaaaaatatataatacaagtttggactttgggcaacgattcacaaattaaaaacttattagaaaaagggtacaacataattctaagtaattacgatgctttgtacttcgattgtggatttgctggctgggttcaagatggaaataactggtgttctccttatattggttggcagaaagtatatgaaaataagcctgaaaaattagcaggaaataaagttagtcaagtgcttggagctgaagcagctctgtggacagaacaggctgactccgcatcagtagatactcgtttatggccaagagcggcagccatggctgaagtactctggtctaatcccgcaactggattggaaagaagcggagcatcgattttttggtacacagggaaagacttatatcccttggaata

SEQ ID NO: 3927 - DNA, 1768 bp, Diabrotica virgifera
  SmartBlast Evalue=0; Info=V-type proton ATPase subunit d 1 n=22 Tax=Endopterygota RepID=VA0D1_DROME
gtattttgaccgtgctaaggtagaatcatatgacacttgggtgaggtgtttttatcccgtgagatatttttgcagtccttttaataaaattcttcataattcaccatgaagggctgcgttttcaacatcgacaacggttatttggaaggcctgtgtcgtggctttaaatgtgggatcctgaaacaatccgattatttgaatttggtccagtgtgaaactcttgaagatttaaaactgcacttgcaaggcactgactatggaacttttttggccaatgaaccttcacctttgtcagtatccgtcatcgattcaagacttcgagaaaaactcgtgattgagttccagcacatgcgtaaccaagcagtagagcctctctcgacatttatggacttcattacctacagttacatgatcgacaacataattttgcttattacaggaactcttcaccagagaccaatcagtgaattaatccctaaatgtcaccctctaggtagcttcgagcaaatggaagccatccacgtagctgctactccagctgagttatacaacgctgtattggtggacacaccacttgctccattcttcgttgattgcatcagtgaacaagatttggatgaaatgaacattgaaatcatcagaaacaccttatacaaagcttacttggaagcattttataccttctgcaaggaaattggaggtactactgccgatagcatgtgtgaaattttggcttttgaggcagatagacgtgctattattattaccatcaactcgtttggcactgaattaagcaaagatgaccgtgctaagttgtaccctcgctgtggaagactcaaccccgatggtttggctgctctagtgagagccgaggactacgaccaagttaaagcagttgctgaatactacgctgaatattccaaactgtttgaaggagctggcaacaacccgggagacaaaacattggaagacaaattctttgaatacgaagtacgtcttaacatcaatgctttcatgcaacagtttcactttggggtgttctactcttacttgaaattgaaggaacaggaatgcagaaatattgtatggattgctgaatgcgtagctcaaaaacacagggctaaaatcgataactacatcccaatattctaaaggaatttcttgtttgcactattgtttgcattccatttggctcatttagttcttagtgtcagtaagtggaattatcaaaagtatcagtttctatgattcagatgtactattcagaccttcagacaaatccagttagtacaatgttttcgtttcacatttattatcaactaatctttcagtcgtccaagattgttataaaattaaatatacattaaatgtgttgatgttttaacaatacatagcaaatccgcaaaaagaacaataaaaagactatagcagtttattttgaaggaaaatccattgagtattaaggtatcctaaaatatataataataaaattacatggtcatatcagttttatcgcctttcagaaatttgctgttacctatccttattggttattatattttttaaagatcggtatgtttttgatattattttagttttctggaaataataatgcacaacttcttgattcaacatgtatcaatgtaattttagactttgttgagtcatatcataaatattattatgttttctgtgtataaagcgtagttaggccaaaatgttatttctgttgtatatctaagaataaataaaattatatgtatctaga

SEQ ID NO: 3928 - DNA, 1762 bp, Diabrotica virgifera
  SmartBlast Evalue=0; Info=V-type proton ATPase subunit d 1 n=22 Tax=Endopterygota RepID=VA0D1_DROME
gtattttgaccgtgctaaggtagaatcatatgacacttgggtgaggtgtttttatcccgtgagatatttttgcagtccttttaataaaattcttcataattcaccatgaagggctgcgttttcaacatcgacaacggttatttggaaggcctgtgtcgtggctttaaatgtgggatcctgaaacaatccgattatttgaatttggtccagtgtgaaactcttgaagatttaaaactgcacttgcaaggcactgactatggaacttttttggccaatgaaccttcacctttgtcagtatccgtcatcgattcaagacttcgagaaaaactcgtgattgagttccagcacatgcgtaaccaagcagtagagcctctctcgacatttatggacttcattacctacagttacatgatcgacaacataattttgcttattacaggaactcttcaccagagaccaatcagtgaattaatccctaaatgtcaccctctaggtagcttcgagcaaatggaagccatccacgtagctgctactccagctgagttatacaacgctgtattggtggacacaccacttgctccattcttcgttgattgcatcagtgaacaagatttggatgaaatgaacattgaaatcatcagaaacaccttatacaaagcttacttggaagcattttataccttctgcaaggaaattggaggtactactgccgatagcatgtgtgaaattttggcttttgaggcagatagacgtgctattattattaccatcaactcgtttggcactgaattaagcaaagatgaccgtgctaagttgtaccctcgctgtggaagactcaaccccgatggtttggctgctctagtgagagccgaggactacgaccaagttaaagcagttgctgaatactacgctgaatattccaaactgtttgaaggagctggcaacaacccgggagacaaaacattggaagacaaattctttgaatacgaagtacgtcttaacatcaatgctttcatgcaacagtttcactttggggtgttctactcttacttgaaattgaaggaacaggaatgcagaaatattgtatggattgctgaatgcgtagctcaaaaacacagggctaaaatcgataactacatcccaatattctaaaggaatttcttgtttgcactattgtttgcattccatttggctcatttagttcttagtgtcagtaagtggaattatcaaaagtatcagtttttatgattcagatgtactattcagaccttcagacaaatccagttagtacaatgttttcgtttcacatttattatcaactacatctttcagtcgtccaagattgttatgaaattaaatatacattaaatgtgttgatgttttaacaatacatagcaaatcctcaaaaagaacaataaaaagactcgcagtttattttgaaggaaaatccattgagtattaatgtatcctaaaatatgtaatcataaaattacatggtcatatcagttttatcgcctttcagaaatttgctgttacctatccttattgtttattatattttttaatgatcggtatgtttttgatattattttagttttctggaaataatattgcacaaattcttagttatctgattcaacatgtatcaatgctttgttgagtcatatcataaatattattatgttttctgtgtataaagcgtagctaggccaaaatgttatttctgttgtatatgtaagaataaataaaattatatgtatct

SEQ ID NO: 3929 - DNA, 1365 bp, Diabrotica virgifera
  SmartBlast Evalue=0; Info=V-type proton ATPase subunit d 1 n=22 Tax=Endopterygota RepID=VA0D1_DROME
gtattttgaccgtgctaaggtagaatcatatgacacttgggtgaggtgtttttatcccgtgagatatttttgcagtccttttaataaaattcttcataattcaccatgaagggctgcgttttcaacatcgacaacggttatttggaaggcctgtgtcgtggctttaaatgtgggatcctgaaacaatccgattatttgaatttggtccagtgtgaaactcttgaagatttaaaactgcacttgcaaggcactgactatggaacttttttggccaatgaaccttcacctttgtcagtatccgtcatcgattcaagacttcgagaaaaactcgtgattgagttccagcacatgcgtaaccaagcagtagagcctctctcgacatttatggacttcattacctacagttacatgatcgacaacataattttgcttattacaggaactcttcaccagagaccaatcagtgaattaatccctaaatgtcaccctctaggtagcttcgagcaaatggaagccatccacgtagctgctactccagctgagttatacaacgctgtattggtggacacaccacttgctccattcttcgttgattgcatcagtgaacaagatttggatgaaatgaacattgaaatcatcagaaacaccttatacaaagcttacttggaagcattttataccttctgcaaggaaattggaggtactactgccgatagcatgtgtgaaattttggcttttgaggcagatagacgtgctattattattaccatcaactcgtttggcactgaattaagcaaagatgaccgtgctaagttgtaccctcgctgtggaagactcaaccccgatggtttggctgctctagtgagagccgaggactacgaccaagttaaagcagttgctgaatactacgctgaatattccaaactgtttgaaggagctggcaacaacccgggagacaaaacattggaagacaaattctttgaatacgaagtacgtcttaacatcaatgctttcatgcaacagtttcactttggggtgttctactcttacttgaaattgaaggaacaggaatgcagaaatattgtatggattgctgaatgcgtagctcaaaaacacagggctaaaatcgataactacatcccaatattctaaaggaatttcttgtttgcactattgtttgcattccatttggctcatttagttcttagtgtcagtaagtggaattatcaaaagtatcagttttatgattcacatgtactatttagaccttcagacaactccaatcaactacatctttcagtcgtccaagattgttataaaattaaatatacattcaatgtgttgatgttttaacaatacatagca

SEQ ID NO: 3930 - DNA, 1372 bp, Diabrotica virgifera
  SmartBlast Evalue=1E-168; Info="Ornithine aminotransferase, mitochondrial n=6 Tax=melanogaster group RepID=OAT_DROME"
gatacaaaatatacactttatttttgtaagccattaatagtgtttacaataatgttaatagattcttcgagttgttccttgttaataacaagaggaggggcaaatctaatgatgtcttcgtgagtatgtttggcaataagaccgttctctttcatcttcaaacatacatcccacgcatcagctacacctctgttgatgactacagcgttcaaaagaccttttcctctaacttccgttacaatatctttatttaatttgctttgaagctctcttctgaagatctctcccatgttgaaagcgttttctgcgatgttctcgtcttctaaaactcctagggaaacaattgctactctagaacctagagggttacctccgaaggtggatccgtgagtacctggttcaatcaccaacataacatcatcgttagctaagcaagctgacactggataaaccccacctcccagcgcctttccaaggaccagaatatcaggcttgacattttcgtaatctacagccagtctttttccagttcttcctaaaccagtttggatttcatcggcaatccaaaggacgttgtatttggtgcagagttctctgacgccttttaaataacctggagatggtactctaataccggcttctccttggattggttcaaccatataggcacatacgttgggatcttttaattcctcctctaatgccttcagatcgtcgtaaggtataattttaaagccaggcatgaacggtccatagtcctcatagctagtgggatctgtagacgctgacactgctgccaaagatcttccccaaaagttgtcttgtgcaaaaataattttggcctgatttttgggtatccctttctttctgtatccccatttcctggctaatttacaggcagtatcgtcggcttcaacacctgtattcatcggcaaaaccttgtcgtacccaaaaagcttggttagaacctctgcatattctccaagttgatcggaaaaaaatgctctggatgtgtggtgaagtactgcactttggtcttgtaaagctttgacgattttcggatgacagtgaccaaaattgttggcggaataaccacttaagtaatcaaaatatctttttccttcgacgtcccatacaaaaacaccttgtcctttcgctagagcaactggtagaggatggtagttatgggctgcatacttctcttccttatggataaccttttcggtactcaaagccttcttggacaagttaatgcagcttttggcattttccaaaagtcgtggggcgtgtcgagaaggaatcatttctgcatccaatcaatcaatcgatttctgcaaccgaatctcatccactccgctctagtagatagcac

SEQ ID NO: 3931 - DNA, 1372 bp, Diabrotica virgifera
  SmartBlast Evalue=1E-168; Info="Ornithine aminotransferase, mitochondrial n=6 Tax=melanogaster group RepID=OAT_DROME"
gatacaaaatatacactttatttttgtaagccattaatagtgtttacaataatgttaatagattcttcgagttgttccttgttaataacaagaggaggggcaaatctaatgatgtcttcgtgagtatgtttggcaataagaccgttctctttcatcttcaaacatacatcccacgcatcagctacacctctgttgatgactacagcgttcaaaagaccttttcctctaacttccgttacaatatctttatttaatttgctttgaagctctcttctgaagatctctcccatgttgaaagcgttttctgcgatgttctcgtcttctaaaactcctagggaaacaattgctactctagaacctagagggttacctccgaaggtggatccgtgagtacctggttcaatcaccaacataacatcatcgttagctaagcaagctgacactggataaaccccacctcccagcgcctttccaaggaccagaatatcaggcttgacattttcgtaatctacagccagtctttttccagttcttcctaaaccagtttggatttcatcggcaatccaaaggacgttgtatttggtgcagagttctctgacgccttttaaataacctggagatggtactctaataccggcttctccttggattggttcaaccatataggcacatacgttgggatcttttaattcctcctctaatgccttcagatcgtcgtaaggtataattttaaagccaggcatgaacggtccatagtcctcatagctagtgggatctgtagacgctgacactgctgccaaagatcttccccaaaagttgtcttgtgcaaaaataattttggcctgatttttgggtatccctttctttctgtatccccatttcctggctaatttacaggcagtatcgtcggcttcaacacctgtattcatcggcaaaaccttgtcgtacccaaaaagcttggttagaacctctgcatattctccaagttgatcggaaaaaaatgctctggatgtgtggtgaagtactgcactttggtcttgtaaagctttgacgattttcggatgacagtgaccaaaattgttggcggaataaccacttaagtaatcaaaatatctttttccttcgacgtcccatacaaaaacaccttgtcctttcgctagagccacaggtagaggatggtagttatgggctgcatacttctcttccttatggataaccttttcggtactcaaagccttcttggacaagttaatgcagcttttggcattttctaaaagtcgtggggcgtgccgtgaaggaatcatttctgcatccaatcaatcaatcgatttctgcaaccgaatatctcacccactgcgctctagtagatagc

SEQ ID NO: 3932 - DNA, 1369 bp, Diabrotica virgifera
  SmartBlast Evalue=1E-168; Info="Ornithine aminotransferase, mitochondrial n=6 Tax=melanogaster group RepID=OAT_DROME"
gatacaaaatatacactttatttttgtaagccattaatagtgtttacaataatgttaatagattcttcgagttgttccttgttaataacaagaggaggggcaaatctaatgatgtcttcgtgagtatgtttggcaataagaccgttctctttcatcttcaaacatacatcccacgcatcagctacacctctgttgatgactacagcgttcaaaagaccttttcctctaacttccgttacaatatctttatttaatttgctttgaagctctcttctgaagatctctcccatgttgaaagcgttttctgcgatgttctcgtcttctaaaactcctagggaaacaattgctactctagaacctagagggttacctccgaaggtggatccgtgagtacctggttcaatcaccaacataacatcatcgttagctaagcaagctgacactggataaaccccacctcccagcgcctttccaaggaccagaatatcaggcttgacattttcgtaatctacagccagtctttttccagttcttcctaaaccagtttggatttcatcggcaatccaaaggacgttgtatttggtgcagagttctctgacgccttttaaataacctggagatggtactctaataccggcttctccttggattggttcaaccatataggcacatacgttgggatcttttaattcctcctctaatgccttcagatcgtcgtaaggtataattttaaagccaggcatgaacggtccatagtcctcatagctagtgggatctgtagacgctgacactgctgccaaagatcttccccaaaagttgtcttgtgcaaaaataattttggcctgatttttgggtatccctttctttctgtatccccatttcctggctaatttacaggcagtatcgtcggcttcaacacctgtattcatcggcaaaaccttgtcgtacccaaaaagcttggttagaacctctgcatattctccaagttgatcggaaaaaaatgctctggatgtgtggtgaagtactgcactttggtcttgtaaagctttgacgattttcggatgacagtgaccaaaattgttggcggaataaccacttaagtaatcaaaatatctttttccttcgacgtcccatacaaaaacaccttgtcctttcgctagagccacaggtagaggatggtagttatgggctgcatacttctcttccttatggataaccttttcggtactcaaagccttcttggacaagttaatgcagcttttggcattttctaaaagtcgtggggcgtgccgtgaaggaatcatttctgcatccaatcaatcaatcgatttctgcaaccgaatatctcacccactgcgctctagtagat

SEQ ID NO: 3933 - DNA, 1541 bp, Diabrotica virgifera
  SmartBlast Evalue=1E-112; Info=saccharopine dehydrogenase-like n=1 Tax=Tribolium castaneum RepID=UPI0001A47C97
aaccgctcgcctgttatgagatatcacaaaaatgtaaacattcatgtaaacacgaaatattatctataatagtggctgacgttagttaaccttgcacacccaaaaaaattaatattcgttgaggccaaccgccgaccataaccaatgatcagaccggtgaagtgactagtgaggaactcatttacttatagtacaacgcgacgccgacattaaaagtctcatagtatggctgaacgtctagatcttctcctatttggagcaacaggggtcacaggtctacatgctattcgataccttcacaaattttcgaaagaaaaaaagttaacctggggtgtttctggacgctcggagacaaaacttaaagcagttttaaagaatgaaggtttacggatgggtgaagatttatccataatcccaatcgtacttgccgatacaaaagatcagaaatctttaaatgaaatggctaaaaaagcaaaagttttgctgaattgttgtggaccatacagactgttgggctttccggtagtagaagcttgtattaaagctgggactcaccatttagatgtaagtggtgaacccagttatatagattcacttccagaaaagtacgatgctgctgcaaaagaaaaaggaatttatatcgtcagtgcgtgtggtgtcgactgtgttcccacggatttgggttcggcatatctgcagcaaaaatttgatggcgtattgaattcagtggttgcctacgtggaactatggactgaaggtaaaagtagcggatccgttggcggttatgggacttggcaaagccttgtttatgaattccagacaatgggttcattaagtaaactaaaagcaaagctgattccaccttcagactctgcgtttaaaccaacgttgccagttaagatccgtccattctattcggaggtaactaagggttgggtgatgccctttgcaggacacgatagaaagataatgcaagagactcaaaagtatttctacgaaaaagaatcgcaaagaccaattaatggtcaagtactgatgtccgttacgagtatctttacattgatttatattaatattgtattgttaacgctatttgctttagctcaattttccttcacaagaaattggttgatagaatatccccaaatcttttcttttggctacgtcaaaaaagaagagcatccttctgaagaagtcaaagcaggcggtcgctatcgtctaacattgtatggagaaggatggaaagagaagctggcaaatgtaaacgatcagtacgctatgccacctaacaggagcattttagctcaattacaatttgaaaatttctacacttttactgttctcggattaatgtgtgccggtatcgctattttgaacgaaaaagacaaattgccgaaaagtggtggtgtatatagtgcaggagcagcttttgggaaaacgtctcttatgaaaatgttgatagagaatggaacttcattcgaaataaaaagtgtgaaagacatataataaatttaaataaaatataaatacacatccgtaac

SEQ ID NO: 3934 - DNA, 1354 bp, Diabrotica virgifera
  SmartBlast Evalue=1E-113; Info=saccharopine dehydrogenase-like n=1 Tax=Tribolium castaneum RepID=UPI0001A47C97
aatcctcagtttgttagcactcactgtctaaagttagtatggctgaacgtctagatcttctcctatttggagcaacaggggtcacaggtctacatgctattcgataccttcacaaattttcgaaagaaaaaaagttaacctggggtgtttctggacgctcggagacaaaacttaaagcagttttaaagaatgaaggtttacggatgggtgaagatttatccataatcccaatcgtacttgccgatacaaaagatcagaaatctttaaatgaaatggctaaaaaagcaaaagttttgctgaattgttgtggaccatacagactgttgggctttccggtagtagaagcttgtattaaagctgggactcaccatttagatgtaagtggtgaacccagttatatagattcacttccagaaaagtacgatgctgctgcaaaagaaaaaggaatttatatcgtcagtgcgtgtggtgtcgactgtgttcccacggatttgggttcggcatatctgcagcaaaaatttgatggcgtattgaattcagtggttgcctacgtggaactatggactgaaggtaaaagtagcggatccgttggcggttatgggacttggcaaagccttgtttatgaattccagacaatgggttcattaagtaaactaaaagcaaagctgattccaccttcagactctgcgtttaaaccaacgttgccagttaagatccgtccattctattcggaggtaactaagggttgggtgatgccctttgcaggacacgatagaaagataatgcaagagactcaaaagtatttctacgaaaaagaatcgcaaagaccaattaatggtcaagtactgatgtccgttacgagtatctttacattgatttatattaatattgtattgttaacgctatttgctttagctcaattttccttcacaagaaattggttgatagaatatccccaaatcttttcttttggctacgtcaaaaaagaagagcatccttctgaagaagtcaaagcaggcggtcgctatcgtctaacattgtatggagaaggatggaaagagaagctggcaaatgtaaacgatcagtacgctatgccacctaacaggagcattttagctcaattacaatttgaaaatttctacacttttactgttctcggattaatgtgtgccggtatcgctattttgaacgaaaaagacaaattgccgaaaagtggtggtgtatatagtgcaggagcagcttttgggaaaacgtctcttatgaaaatgttgatagagaatggaacttcattcgaaataaaaagtgtgaaagacatataataaatttaaataaaatataaatacacatccgtaac

SEQ ID NO: 3935 - DNA, 1350 bp, Diabrotica virgifera
  SmartBlast Evalue=1E-113; Info=saccharopine dehydrogenase-like n=1 Tax=Tribolium castaneum RepID=UPI0001A47C97
aatcctcagtttgttagcactcactgtctaaagtatggctgaacgtctagatcttctcctatttggagcaacaggggtcacaggtctacatgctattcgataccttcacaaattttcgaaagaaaaaaagttaacctggggtgtttctggacgctcggagacaaaacttaaagcagttttaaagaatgaaggtttacggatgggtgaagatttatccataatcccaatcgtacttgccgatacaaaagatcagaaatctttaaatgaaatggctaaaaaagcaaaagttttgctgaattgttgtggaccatacagactgttgggctttccggtagtagaagcttgtattaaagctgggactcaccatttagatgtaagtggtgaacccagttatatagattcacttccagaaaagtacgatgctgctgcaaaagaaaaaggaatttatatcgtcagtgcgtgtggtgtcgactgtgttcccacggatttgggttcggcatatctgcagcaaaaatttgatggcgtattgaattcagtggttgcctacgtggaactatggactgaaggtaaaagtagcggatccgttggcggttatgggacttggcaaagccttgtttatgaattccagacaatgggttcattaagtaaactaaaagcaaagctgattccaccttcagactctgcgtttaaaccaacgttgccagttaagatccgtccattctattcggaggtaactaagggttgggtgatgccctttgcaggacacgatagaaagataatgcaagagactcaaaagtatttctacgaaaaagaatcgcaaagaccaattaatggtcaagtactgatgtccgttacgagtatctttacattgatttatattaatattgtattgttaacgctatttgctttagctcaattttccttcacaagaaattggttgatagaatatccccaaatcttttcttttggctacgtcaaaaaagaagagcatccttctgaagaagtcaaagcaggcggtcgctatcgtctaacattgtatggagaaggatggaaagagaagctggcaaatgtaaacgatcagtacgctatgccacctaacaggagcattttagctcaattacaatttgaaaatttctacacttttactgttctcggattaatgtgtgccggtatcgctattttgaacgaaaaagacaaattgccgaaaagtggtggtgtatatagtgcaggagcagcttttgggaaaacgtctcttatgaaaatgttgatagagaatggaacttcattcgaaataaaaagtgtgaaagacatataataaatttaaataaaatataaatacacatccgtaac

SEQ ID NO: 3936 - DNA, 1308 bp, Diabrotica virgifera
  SmartBlast Evalue=2E-52; Info=Pancreatic triacylglycerol lipase n=1 Tax=Harpegnathos saltator RepID=E2B986_9HYME
ttaagggttttcaattatttattttttatttttttttattttttcctgttatacatttatatcaatgttgggcatatggtgattgactatttgtgttgaggtaatatccgcctttggcacttttgttgatattgtattctcccatattggatgttcctccattacattgattgttgttaaaatctttgtagcaattacattgttttgcagcaaatcctccactaattaaagactccgcatagtagtaatatgatctactgtgtctgcacattcctacaacatccaaagtgcaaccaggttgatcttttccgccattagggtaataatctgagtgtccaatatctacatcaaaaccgagtaaacctgcgcatgtgtgtattacttcgacgtattgtgcatcggaggggtccaatcttgtactgatatcgttgtatgagaagcatggtagagcagggtccagacctacaatgttactaatccgtccgttcagttcagctccggccaatccagcgacatgagctcccaaagaatggccaacgatagaagctttattcaaatccaatttattgttgttgaccaaatttctaatgagtgttcctagtaattgaccgacctctggaactgctttgtaagctactaagtagaggttgctggcgattttgttccaatcgattaggaaaacgtttatgtcgtcgttctggaggacagctttggatatctcatcgcagactggcgagtcgtgaccgttgtgccagccgtggacaacaaacattgtatctttatttggtgaaaatcccaacgcatcgacttccgaactatggttaatgtctattggtactgaactctcaggatgatctttgtttctaaaataaactttaatatcatcggaagatgcattaaaactggcgtctttcttgaagaatgggcatggaattgatccttgaggataatatttctgtaatcttcctggtacactggagtgctcagtactaaggtaacaacccccagtaaacaaagaatcaccttcattttctctttgcctgtcacttcagcagcgaactatcgaatatgtattttattgatttttcttataggtatacacgtactaattaaaaaggattaattggtgcaaaaaatagcatgttcgttcatttatatattattttagtcaaatatctattatcatgtttattatcataatatctacagtacttgaagttaaaatataaaacaaattcttgattaaagttcacaccctttaagtgtctattatcattattgtccagcctactgcgtcacaagttgaac

SEQ ID NO: 3937 - DNA, 1160 bp, Diabrotica virgifera
  SmartBlast Evalue=1E-52; Info=Pancreatic triacylglycerol lipase n=1 Tax=Harpegnathos saltator RepID=E2B986_9HYME
ttaagggttttcaattatttattttttatttttttttattttttcctgttatacatttatatcaatgttgggcatatggtgattgactatttgtgttgaggtaatatccgcctttggcacttttgttgatattgtattctcccatattggatgttcctccattacattgattgttgttaaaatctttgtagcaattacattgttttgcagcaaatcctccactaattaaagactccgcatagtagtaatatgatctactgtgtctgcacattcctacaacatccaaagtgcaaccaggttgatcttttccgccattagggtaataatctgagtgtccaatatctacatcaaaaccgagtaaacctgcgcatgtgtgtattacttcgacgtattgtgcatcggaggggtccaatcttgtactgatatcgttgtatgagaagcatggtagagcagggtccagacctacaatgttactaatccgtccgttcagttcagctccggccaatccagcgacatgagctcccaaagaatggccaacgatagaagctttattcaaatccaatttattgttgttgaccaaatttctaatgagtgttcctagtaattgaccgacctctggaactgctttgtaagctactaagtagaggttgctggcgattttgttccaatcgattaggaaaacgtttatgtcgtcgttctggaggacagctttggatatctcatcgcagactggcgagtcgtgaccgttgtgccagccgtggacaacaaacattgtatctttatttggtgaaaatcccaacgcatcgacttccgaactatggttaatgtctattggtactgaactctcaggatgatctttgtttctaaaataaactttaatatcatcggaagatgcattaaaactggcgtctttcttgaagaatgggcatggaattgatccttgaggataatatttctgtaaatcttcctggtacactggagtgctcagtactaaggtaacaacccccagtaaacaaagaatcaccttcattttctctttgtatgtcactttagcaagtgaactatcgaatatgtattttattgatttttcttataggtatacacgtacgaagtaaaaaggattaattggttttgatgttgatcttttccgccattagggt

SEQ ID NO: 3938 - DNA, 1116 bp, Diabrotica virgifera
  SmartBlast Evalue=1E-52; Info=Pancreatic triacylglycerol lipase n=1 Tax=Harpegnathos saltator RepID=E2B986_9HYME
ttaagggttttcaattatttattttttatttttttttattttttcctgttatacatttatatcaatgttgggcatatggtgattgactatttgtgttgaggtaatatccgcctttggcacttttgttgatattgtattctcccatattggatgttcctccattacattgattgttgttaaaatctttgtagcaattacattgttttgcagcaaatcctccactaattaaagactccgcatagtagtaatatgatctactgtgtctgcacattcctacaacatccaaagtgcaaccaggttgatcttttccgccattagggtaataatctgagtgtccaatatctacatcaaaaccgagtaaacctgcgcatgtgtgtattacttcgacgtattgtgcatcggaggggtccaatcttgtactgatatcgttgtatgagaagcatggtagagcagggtccagacctacaatgttactaatccgtccgttcagttcagctccggccaatccagcgacatgagctcccaaagaatggccaacgatagaagctttattcaaatccaatttattgttgttgaccaaatttctaatgagtgttcctagtaattgaccgacctctggaactgctttgtaagctactaagtagaggttgctggcgattttgttccaatcgattaggaaaacgtttatgtcgtcgttctggaggacagctttggatatctcatcgcagactggcgagtcgtgaccgttgtgccagccgtggacaacaaacattgtatctttatttggtgaaaatcccaacgcatcgacttccgaactatggttaatgtctattggtactgaactctcaggatgatctttgtttctaaaataaactttaatatcatcggaagatgcattaaaactggcgtctttcttgaagaatgggcatggaattgatccttgaggataatatttctgtaatcttcctggtacactggagtgctcagtactaaggtaacaacccccagtaaacaaagaatcaccttcattttctctttgcctgtcacttcagcagcgaactatcgaatatgtattttattgatttttcttataggtatacacgtactaattaaaaa

SEQ ID NO: 3939 - DNA, 1057 bp, Diabrotica virgifera
  SmartBlast Evalue=3E-51; Info=Putative ferritin 2 n=1 Tax= Anoplophora glabripennis RepID=Q4PLJ6_ANOGL
aaaactacataagaatccatcgatacatctgctctaagtattgcaggggcggcaacgcaataacacacagacttttgcaaatttataaacgaaaagttttcgttgataaaacaatgaactgagtacataactttaagagtggatttattttgaaaattatgttacagacatgttgaataatatgcaaaaataaggaaatatattttagaaagtaaatctaatagttttaaactagctatttaaaatctattgtttttgtaaatagtcgtcaaacataaacagggctaacgaactgtctggtccatcaaggaggccagacaaatcagtgctgtaccctgccagttttctgataatttctctttgctcgtgtacaacttctttctctagataatcggtaagttcgggatcatagaattgtttgttgcttctagcagctccaagatggatagagaaggcatcatggacatacttcttttccaagtccaaagctttagaaactgcggtcaattcattcaaatcaaagctgactggctgggcctcttcttttttaacgccgtcagaaatctcgttaaagtcgacttcacctccacgagcagtaaggtacttgatgaattcaataccatcattccattttttatcagacaaaccacggaaaagtttttcaaatcctttgcgatttctttggtagttgtcgaagttggtagccagaagcaggtattcaaaggatctgatgaagttgtggtttacgaatttttgaagatccgattgagctgaatctatacctccgaattttgcattacaattattcaacttgtcaacactcctcgcagcagctggatcacatgcggtaactgcgtcattataacagctgtcttgggaggccaaagcggcgacgcaaaagatggatagtacgatgaaagccttcatgatccctggcatctcgtcagcgtaatcatgaataacaatcaataaacaaggttttagttttatattcgtaataacgcaccaaaaatcaaaatatgaaacgacgtgcgcaactgtgtcgggcgcattaacg

SEQ ID NO: 3940 - DNA, 937 bp, Diabrotica virgifera
  SmartBlast Evalue=2E-51; Info=Putative ferritin 2 n=1 Tax= Anoplophora glabripennis RepID=Q4PLJ6_ANOGL
gagtacataactttaagagtggatttattttgaaaattatgttacagacatgttgaataatatgcaaaaataaggaaatatattttagaaagtaaatctaatagttttaaactagctatttaaaatctattgtttttgtaaatagtcgtcaaacataaacagggctaacgaactgtctggtccatcaaggaggccagacaaatcagtgctgtaccctgccagttttctgataatttctctttgctcgtgtacaacttctttctctagataatcggtaagttcgggatcatagaattgtttgttgcttctagcagctccaagatggatagagaaggcatcatggacatacttcttttccaagtccaaagctttagaaactgcggtcaattcattcaaatcaaagctgactggctgggcctcttcttttttaacgccgtcagaaatctcgttaaagtcgacttcacctccacgagcagtaaggtacttgatgaattcaataccatcattccattttttatcagacaaaccacggaaaagtttttcaaatcctttgcgatttctttggtagttgtcgaagttggtagccagaagcaggtattcaaaggatctgatgaagttgtggtttacgaatttttgaagatccgattgagctgaatctatacctccgaattttgcattacaattattcaacttgtcaacactcctcgcagcagctggatcacatgcggtaactgcgtcattataacagctgtcttgggaggccaaagcggcgacgcaaaagatggatagtacgatgaaagccttcatgatccctggcatctcgtcagcgtaatcatgaataacaatcaataaacaaggttttagttttatattcgtaataacgcaccaaaaatcaaaatatgaaacgacgtgcgcaactgtgtcgggcgcattaacg

SEQ ID NO: 3941 - DNA, 944 bp, Diabrotica virgifera
  SmartBlast Evalue=4E-59; Info=Putative ferritin 2 n=1 Tax= Anoplophora glabripennis RepID=Q4PLJ6_ANOGL
gagtacataactttaagagtggatttattttgaaaattatgttacagacatgttgaataataataaaataataaaaataaggaaatatattttagaaagtaaatctaatagttttaaactagctatttaaaatctattgtttttgtaaatagccgtcaaacataaacagggctaacgaactgtctggtccatcaaggagggcagacaaatcagtgctgtaccctgccagttttctgataatttctctttgttcgtgtacaacttctttctctagataatcggtaagttcgggatcatagaattgtttgttgcttctagcagctccaagatggatagagaaggcgtcatggacatacttcttttcagagtccaaagctttagaaactgcggtcaattcattcaaatcaaagctgacaggctgctgctcttcttctttaacgccgtcagaaatctcgttaaagtttacttcacctccacgagcagtaaggtacttgatgaattcaataccatcattccattttttatcagacaaaccacggaaaagtttttcaaatcctttgcgatttctttggtagttgtcgaagttggtagccagaagcaggtattcaaaggatctgatgaagttgtggtttacgaatttttgaagatccgattgagctgaatctatacctccgaattttgcattacaattattcaacttgtcaacactcctcgcagcagctggatcacatgcggtaactgcgtcattataacagctgtcttgggaggccaaagcggcgacgcaaaagatggatagtacgatgaaagccttcatgatccctggcatctcgtcagcgtaatcatgaataacaatcaataaacaaggttttagttttatattcgtaataacgcaccaaaaatcaaaatatgaaacgacgtgcgcaactgtgtcgggcgcattaacg

SEQ ID NO: 3942 - DNA, 961 bp, Diabrotica virgifera
  SmartBlast Evalue=6E-66; Info=Luciferin-regenerating enzyme n=1 Tax=Luciola cruciata RepID=Q8TA67_LUCCR
acattagattttattttttatttttataataacatcgatacttcagcatatcctttagtattcagtccagttactttaaaaacggcaccgtcatctggtcctggggtgattccaacctgtccctggttacataaagttcgtctaagttagctccaccaaagcatacggaggatattatttttgctggcatcgtgatggtttctaacaaagtatccggctttctggggtcaattttaatgattcttgaaccccacacagctacgtagagatttccatcagtatcaatagtcatgccatcaaagaccataccgtccatatcgtttttcttggcggtgaagatgggttttccattggcaatttttccagtagccatatcccagtcatactggtcaacagtaccagtacgagaatctatatagtacatctttttcagatctgtgttgaaggcaataccattagctataccaatattagaacagtgtggactagcttttttattttgaatactgtacaaagtgcccatacccaaggggatgtctgcgattacaactggtggaccccccatggtacctatccacaattttcctgaaggatcacattttccatcattaaagacgtttttagtgttttgatctacttccagtattttttccatttttgatggcttttgacttagtccatcccaagtaactaacatcaactcccgttcgagacttataacaaattggtctttctttcctttgacgggaataataacggaaacattctttcctacaaatgcactattgtgtttcttcgtctttggatcgtatctattgatggtgtatccattgatatccacaaaatacaacatttgcgaactctcgtcccaatggggagcttctgcaagcttgaaatttccacataacttttcaattttcggtgccatttctaaaatactgttccactttatggaaagatc

SEQ ID NO: 3943 - DNA, 958 bp, Diabrotica virgifera
  SmartBlast Evalue=6E-66; Info=Luciferin-regenerating enzyme n=1 Tax=Luciola cruciata RepID=Q8TA67_LUCCR
acattagattttattttttatttttataataacatcgatacttcagcatatcctttagtattcagtccagttactttaaaaacggcaccgtcatctggtcctggggtgattccaacctgtccctggttacataaagttcgtctaagttagctccaccaaagcatacggaggatattatttttgctggcatcgtgatggtttctaacaaagtatccggctttctggggtcaattttaatgattcttgaaccccacacagctacgtagagatttccatcagtatcaatagtcatgccatcaaagaccataccgtccatatcgtttttcttggcggtgaagatgggttttccattggcaatttttccagtagccatatcccagtcatactggtcaacagtaccagtacgagaatctatatagtacatctttttcagatctgtgttgaaggcaataccattagctataccaatattagaacagtgtggactagcttttttattttgaatactgtacaaagtgcccatacccaaggggatgtctgcgattacaactggtggaccccccatggtacctatccacaattttcctgaaggatcacattttccatcattaaagacgtttttagtgttttgatctacttccagtattttttccatttttgatggcttttgacttagtccatcccaagtaactaacatcaactcccgttcgagacttataacaaattggtctttctttcctttgacgggaataataacggaaacattctttcctacaaatgcactattgtgtttcttcgtctttggatcgtatctattgatggtgtatccattgatatccacaaaatacaacatttgcgaactctcgtcccaatggggagcttctgcaagcttgaaatttccacataacttttcaattttcggtgccatttctaaaatactgttccactttatggaaag

SEQ ID NO: 3944 - DNA, 958 bp, Diabrotica virgifera
  SmartBlast Evalue=4E-66; Info=Luciferin-regenerating enzyme n=1 Tax=Luciola cruciata RepID=Q8TA67_LUCCR
acattagattttattttttatttttataataacatcgatacttcagcatatcctttagtattcagtccagttactttaaaaacggcaccgtcatctggtcctggggtgattccaacctgtccctggttacataaagttcgtctaagttagctccaccaaagcatacggaggatattatttttgctggcatcgtgatggtttctaacaaagtatccggctttctggggtcaattttaatgattcttgaaccccacacagctacgtagagatttccatcagtatcaatagtcatgccatcaaagaccataccgtccatatcgtttttcttggcggtgaagatgggttttccattggcaatttttccagtagccatatcccagtcatactggtcaacagtaccagtacgagaatctatatagtacatctttttcagatctgtgttgaaggcaataccattagctataccaatattagaacagtgtggactagcttttttattttgaatactgtacaaagtgcccatacccaaggggatgtctgcgattacaactggtggaccccccatggtacctatccacaattttcctgaaggatcacattttccatcattaaagacgtttttagtgttttgatctacttccaacattttttccatttttgatggcttttgacttagtccatcccaagtaactagcattaactccctttccagacttataacaaattggtctttctttcctttgacgggaataataacggaaacattctttcctacaaatgcactagtgtgtttcttcgtctttggatcgtatctattgatggtgtatccattgatatccacaaaatacaacatttgggaactctcgtcccaatggggagcttctgcaagcttgaaatttccacataacttttcaattttcggtgccatttttaaaatactgttccactttatggaaag

SEQ ID NO: 3945 - DNA, 1266 bp, Diabrotica virgifera
ttagactagtttcggaattttctaaaataaaaatgttattatggatttaatctattatttaagtatttaatttttatcttcaaagtaaagcaaagtattaagatcttcatcatcatttcctacgagagtacgtttcttccgttcaaacattttttcatttatgacatgacgataaatatataaaaatgtatttgcagaaggagtctgtcgatctggataaatcagcctatattctcttcttgccgcttgctttgtttttattattttttacataaattgagaatatatctactttttcatctgcagtatacgctctgagcttcgctggtggcgctcctagcggttactaattcaactttcaccggtaatttttaaatttattatttaattgttatcgcttaatatttacaacgcaaaaaagtaattaaattgtaatcgattttttaaagattttgctaatcattttgacgttcgattgacaaaatatgaatttcttacttcggatactttcacaattatcgtgtagatggcgctaagattaatagattaatagaacattaagaaaacttaaattcagtatttaaaacgtaagtatatttaaggtaaaaatatataccacagctttgatcaactaatattttttataattaatgtttttaatttaatttaaattaatcactttgacatttatgtcaaatttccggtaaacgtttacagacttgtcactactggcgctcacgaatttataaatatcccctctacgtacgagctcacagcgtagaggaccaacgtagttggatagttggcatgatatcagtcactggtaaatctcactcacttcgcgtaagtaattctttataaactcttgatttgggacacaaatatcttatgcgttttgtagttatacatttttctttgacacttttcttttttattcaccattttcataagtttttagaaaattatatttgattttgaattgattttgtagaattattaatgacaatttgtgcttaaagatacaatatttaatacatcgtatagaagataataatttggttgttattgttaaataatttttacagtttttacaaaaacatgtaatagtgtcgctaataatacagtttctctaaggacaggtcgtttttagtaaaattttttgccaaaccaactttcccctggtaaatgtcattatagcggttccgaatttttgttgccaacataaaaatggtaattttatttataatagacccatctacgtactaa

SEQ ID NO: 3946 - DNA, 909 bp, Diabrotica virgifera
ttagactagtttcggaattttctaaaataaaaatgttattatggatttaatctattatttaagtatttaatttttatcttcaaagtaaagcaaagtattaagatcttcatcatcatttcctacgagagtacgtttcttccgttcaaacattttttcatttatgacatgacgataaatatataaaaatgtatttgcagaaggagtctgtcgatctggataaatcagcctatattctcttcttgccgcttgctttgtttttattattttttacataaattgagaatatatctactttttcatctgcagtatacgctctgagcttcgctggtggcgctcctagcggttactaattcaactttcaccggtaatttttaaatttattatttaattgttatcgcttaatatttacaacgcaaaaaagtaattaaattgtaatcgatttttttaagattttgctaatcattttgacgttctattgataaaatataatttcttacttcggatactttacaattatcgtgtagatggcgctagattaatataattacatattacggaacattaaaaaaacttaaattcagtatttaaaacgtaagtatatttaaggtaaaaatatataccacagctttgaccaactaatattttttataattaatgtttttaattttaattttaaattaatcactttgacatttatgtcaaatttccggtaaacgtttacagacttgccactactggcgctcgagaatttgtaaatatcccctctacgtacgagctcacagcggataaccgcacaccgcattcttcgttcgcgagagaggaacatacacttgcttagcgaacttgaggcgtactgctcttgcccttaatttgggctagacgcatttttacgcatacttttaatgggcc

SEQ ID NO: 3947 - DNA, 697 bp, Diabrotica virgifera
aaattcagtatttaaaacgtaagtatatttaaggtaaaaatatataccacagctttgatcaactaatattttttataattaatgtttttaatttaatttaaattaatcactttgacatttatgtcaaatttccggtaaacgtttacagacttgtcactactggcgctcacgaatttataaatatcccctctacgtacgagctcacagcgtagaggaccaacgtagttggatagttggcatgatatcagtcactggtaaatctcactcacttcgcgtaagtaattctttataaactcttgatttgggacacaaatatcttatgcgttttgtagttatacatttttctttgacacttttcttttttattcaccattttcataagtttttagaaaattatatttgattttgaattgattttgtagaattattaatgacaatttgtgcttaaagatacaatatttaatacatcgtatagaagataataatttggttgttattgttaaataatttttacagtttttacaaaaacatgtaatagtgtcgctaataatacagtttctctaaggacaggtcgtttttagtaaaattttttgccaaaccaactttcccctggtaaatgtcattatagcggttccgaatttttgttgccaacataaaaatggtaattttatttataatagacccatctacgtactaa

SEQ ID NO: 3948 - DNA, 1086 bp, Diabrotica virgifera
attttgcatatttctcggacatgagttaaatcggttctattttgaaaagatcaactatcaaatctaatatcatctaaacatggcataattatatttatgaatatattgtggaatgtaatggtactgtgatattttctcacagtataagatttgtgacattggggtgtagaagggtgacgtttctgtgcaggaaatttttctgcacagaaacgtcacttttctgcacattaatgtcatagatcttatactgtgagaaaatataaactttgctaacataaaactgtgcagaaaattgcactttgactagtggttgtagaaaaacaaaattttgagataaatgcaatctttgcattcgtattttcattatgtttatatgcatctagccaaatatagaggtaggttgtgtaggtccctgttaatccgtagatttaatgttgctacttttattgatatattaatttaaaaatgcttaagttgtggcttaggacactgttactctgaaggccaataggtacctcgcagatacttaggtaggtacccttaccaggccattaaaatggcgttttttttttatattttaaagtacttacctaaataaggaaaagaatattattcaaaaaataataattctagcagtcatttaaattctacattcttgtttatacaacaaaatattttgactttcagtaaagaccgcgtctcaccatcaaataatttgatcaaacagtttgagcaaactccggaagtacgtcaaagtgacgtcacaattgcagtttttttgaaattctaaaaatctgtgctctcactatcagtctagtttgatcaaattttttgtattgagttgtctaacttgtttgtactttatttaaaattaaaatttttcattattatccacaatgaacactcaggatgtgacgtcactaactgtcactttcagtttgctcaaaccagtttgatcaaattatttgatggtgggacgcggccttaagagtatgaagactaaaaagaaatgtcaaaaaataatttattcatagattaggaatccatttatgaataggatctacagggtgttagtaaataagtatg

SEQ ID NO: 3949 - DNA, 1059 bp, Diabrotica virgifera
ttaaatgttcaattgtactgtgtaaacattttttttaaactgacaaatgacaattttaaataacattaacccaaacttattcctaagttacttattcctggttgcaccaacacatattaagcttaagatgtaccttaagcttaaatataatgtaatccttatgctgggtccacagtagcgtctaatgccgttaactatcgcattatttggcatatctctaatgcaaataatgcgataattaacagcattagatgctagtgtagctccagcattaaagtataagctgaactgggctaagctggagcttaagatctgttggtcccaccagacattaaatcacatttatccacaaaatggatacatcacattgagtcctgagattttgcactgaactatcaaatgttcctttttctaatccactaagtaaaagagcgaacaccaagttcagttcaaaatacagtagggtatgggacatttagactagatatattaattggttggtactaacgttgtggaaggagaaatatagggaaaatggaacacatctagatcacaacatgaatcatactctaaatttcgggaggaccaaacattgtcaacaaataattttaaacaatttaagatatggttataatggacctttctaactattaggctctctaaaggccgcgtctcaccatcaaataatttgatcaaacagtttgagcaaactccggaagtacgtcaaagtgacgtcacaattgcagtttttttgaaattctaaaaatctgtgctctcactatcagtctagtttgatcaaattttttgtattgagttgtctaacttgtttgtactttatttaaaattaaaatttttcattattatccacaatgaacactcaggatgtgacgtcactaactgtcactttcagtttgctcaaaccagtttgatcaaattatttgatggtgggacgcggccttaagagtatgaagactaaaaagaaatgtcaaaaaataatttattcatagattaggaatccatttatgaataggatctacagggtgttagtaaataagtatg

SEQ ID NO: 3950 - DNA, 723 bp, Diabrotica virgifera
  SmartBlast Evalue=3E-11; Info=Endonuclease-reverse transcriptase n=1 Tax=Bombyx mori RepID=D5LB38_BOMMO
gctattttcccttgcataatattttgtaacaacctatatttgggacctctcattacatgccccaagtactccagctttctcttcttgatgctttttattatctcggtagtcttgctgagaagttctagtattgtgaagtttgggagtcttctccacccaagaaacttttaagattcttctatagcgccacaattcgaaagcttcaaggtgatttagataacttttattcacagtccatgatacgatagcatgacgtaagagcgagaacacatagcagcgaagtaggcggatgccaatttatccgaaatgccaattttaagtctgtgaagaccgcgtctcaccatcaaataatttgatcaaacagtttgagcaaactccggaagtacgtcaaagtgacgtcacaattgcagtttttttgaaattctaaaaatctgtgctctcactatcagtctagtttgatcaaattttttgtattgagttgtctaacttgtttgtactttatttaaaattaaaatttttcattattatccacaatgaacactcaggatgtgacgtcactaactgtcactttcagtttgctcaaaccagtttgatcaaattatttgatggtgggacgcggccttaagagtatgaagactaaaaagaaatgtcaaaaaataatttattcatagattaggaatccatttatgaataggatctacagggtgttagtaaataagtatg

SEQ ID NO: 3951 - DNA, 2281 bp, Diabrotica virgifera
  SmartBlast Evalue=2E-27; Info=Double-stranded RNA-specific editase Adar n=1 Tax=Camponotus floridanus RepID=E2AXA7_9HYME
ggttgaccgtttatttcacatctagaagcttaaaataatcaatgctctttgttaaaatcaaaaggatattcgaaaatacgtatctgttagtagtttggcaaaactgaataaatgtagatataaaaaaaattttcgggccaattcacaaccaaaataaatttgtaatttatttttacagttaactaaatttggctttactacacaacatgaaacacatttttctaaaatgcaaatgtaaaactttgccagaactacgtataaaaaaacagtaattgttttaaattacagatttacgtttttgtaccttctgcgccacataaaaacatggaagacaaaaagttttcagttttttattgcaatgattttatgatgttattaagttttgtttgccttcagttagtctcatatgccaaattaattattaaaaattaacattttgtactcctaatttcgacatcacttttatgtgcctatatcatatactcttaattcagattttttaaacagaggtttaaatttgtatagctgctacggaagttcttcttaggaacttgctattgtttgttcacaaatctggcagttatagcatggttttcagaatatatgcaatttctatccaattaaatttttttgttaaataaaccaaagatacattaaaaccacttgacttttgtaaaatattgaattgttgttcaacatttttgtactaatagaaaatgaaacaatctactttttaacttccacaaatattacaagccgaagttacaaaaaatgagaacaaacatgacttaacatctacctatcttatctatgacttaacagcattaactagtataatcataaaaaaatgtgtgtatgaataaaaacttaaaataaattcttaaaatactaggtctgaatgatactgcacattatacattaatacaataaatagttatgtaaaatccgaatacataatgtatatgtcattaatataaatgaattacttagttgatacataaacatctggtgggtattgtatacccaatactttgctgcaagctccgaatgcagccattttctttgcagctttcttgttggaacctgttccaataaatgattctccatcaacaatacatttgaatgaaaaaagaacatttggaggatttccagtttttccaatttcctcaaattgtgcttgtggtagcatctgattcacaagcattaatggattaatagtatctggattttcaggcattttcttagcaggcttgttttcatgcagtttttctccactaggtattgactgattttgattgacattgagatcttctccccatgaggaaaacagtttgtacagagcaaatgaagcaacatgttgccatggtaaaggtgcttgagttgcgtcatcttcagatacatccattttttcatttccttcatcatctttcttcacctcagtcaatttattagtctttacataatgttttaatgcagcttcggcagctgtgttctttgcatttattttactacgaccataaccaacatgttctattccttcatataacactgtagctttaaattggttgccatcatatttctgggataattcatcaactgtataactagtgtttctcactagttcgtttaatatcataacagcattcttgggttgtaatattttgcttaatctaacattgcgcctacgtactctttctcttttggtcaccttcgaaccagtcttattagcccaaaatggcttcttctttacttcagttgagtctgaaccattagttgcatccatagattgatccgcatcatgctttatttgttgtgcttgtgcctgctgttgtagtcttgcagcatttgctgctgcttgtgtggtcgcagcttgttgatttgcttgtggtgtctgttgctgagccctgaactgaattcctgcctgtggagttgtagcctgtggtcttgcagtagctggtgttgttggtttattttgttgtacctgctgctgctgctgctgctgtggtggtttttgttgtccttggacaaaattatttgtaaccaccggtctccgttggccgacatttcccacgttctgggtttgtggggtattatatccagtacttcttcgcgtactataagacatatttatagtaaattagtattaataatgtaattattaacaatgtatgaacgaaaaaacactaccgcttagaattaatactacgcagtaatatgccagcagtacgcaagtgacgccaagccaaatcaaaagaacaagaaagccgagaagaaggcggat

SEQ ID NO: 3952 - DNA, 1187 bp, Diabrotica virgifera
atatttcttaatttttaaaattttcttaaacaatattttcctagttaagatcctgtatggacttgtttgtacatgcaattatcagtttgtaaacgttcatcatctgctcctatcttttgtgacatcaacactttggtagtccgttaagaatataaataagcaatcacttaaacgaccgatacaaattgctgcctctcgatatatttgtcgagcatggtcaatttgtaccggattttaattctaatgtagcaatacaaaaatactggttcacatgtagggataaataaaaaaagtataaaaacatggaaatatcacatctatatatggataaatctacggtagaagaaggagtcacaaatttcaagtcgaaatcaattcaagtccacagtttgtgaacgccaaaagaagacagtgacacctgacttaacccttaagtactaacatcttaaatcaatggcgtaaacactaactaaccgcctgacagacgggtttaacattttagtggtaatttttgtttttgttaaatattttaatgcaaaaaaatatctcgatgatttactgaaagtattgattatctaaaaacacagtaattaatctagtttttctgtatttattaaaataaaaaacattataacaagaatggaaggattgtttgtgtaactttttactcctgaaaaaaagtgtgataaaaattaaacaaattaaagaatcttaataaaaatttgcaatcgagttaaacaaagagtaagacaaatgaaaataaaaaggtttttaaaaaatgttaaaacaaaaaaaaaactgacaggtactataattagtacagtgtagcaatggtagtcagtggcaacattttcatcacaaattgattccacttcgcttatgtcgttttctacctcatcaaaccatttcaaaagagtttcctcagggtctttattcccttatttttatgttttttgacgaactggggcacattatgtgtaatgacaaactgggcacaaacactaacaccccgtctattagacggaaatcacactttggcgctaaatatctttcgaatatcaacctgcagcaaattgccgaattcaatactactaaagaacaacccaacttgaaaagtcataaacggatgaccttcaaaattttctaggaagggaaatatcccactttcgacaagcgatgccgtctga

SEQ ID NO: 3953 - DNA, 921 bp, Diabrotica virgifera
gtaggaactgaaattgttccaaataatagtacaactaataattagtacaattttttttaacaattttttcgtggggtcgatattgagttaattgtacttacagtaggctcctataattttgactctgatattatttcacgtaactttttttgtatttttaacccttaagtactaacatcttaaatcaatggcgtaaacactaactaaccgcctgacagacgggtttaacattttagtggtaatttttgtttttgttaaatattttaatgcaaaaaaatatctcgatgatttactgaaagtattgattatctaaaaacacagtaattaatctagtttttctgtatttattaaaataaaaaacattataacaagaatggaaggattgtttgtgtaactttttactcctgaaaaaaagtgtgataaaaattaaacaaattaaagaatcttaataaaaatttgcaatcgagttaaacaaagagtaagacaaatgaaaataaaaaggtttttaaaaaatgttaaaacaaaaaaaaaactgacaggtactataattagtacagtgtagcaatggtagtcagtggcaacattttcatcacaaattgattccacttcgcttatgtcgttttctacctcatcaaaccatttcaaaagagtttcctcagggtctttattcccttatttttatgttttttgacgaactggggcacattatgtgtaatgacaaactgggcacaaacactaacaccccgtctattagacggaaatcacactttggcgctaaatatctttcgaatatcaacctgcagcaaattgccgaattcaatactactaaagaacaacccaacttgaaaagtcataaacggatgaccttcaaaattttctaggaagggaaatatcccactttcgacaagcgatgccgtctga

SEQ ID NO: 3954 - DNA, 389 bp, Diabrotica virgifera
ctgacaggtactataattagtacagtgtagcaatggtagtcagtggcaacattttcatcacaaattgattccacttcgcttatgtcgttttctacctcatcaaaccatttcaaaagagtttcctcagggtctttattcccttatttttatgttttttgacgaactggggcacattatgtgtaatgacaaactgggcacaaacactaacaccccgtctattagacggaaatcacactttggcgctaaatatctttcgaatatcaacctgcagcaaattgccgaattcaatactactaaagaacaacccaacttgaaaagtcataaacggatgaccttcaaaattttctaggaagggaaatatcccactttcgacaagcgatgccgtctga

SEQ ID NO: 3955 - DNA, 1623 bp, Diabrotica virgifera
  SmartBlast Evalue=2E-53; Info=Peptidoglycan recognition protein- lc isoform n=1 Tax=Aedes aegypti RepID=Q16K58_AEDAE
cagattgcgtcaaattatgaatatgaatacaccgcgaacatggagacaacgacaacaataaacaatagaacgtcgagcgattctatgaaaacaaaagatatgatagagaatagtgaaatcgggcggtatgaaactaaaaatagtgaaatcggacggtacgaaaatactgaaaagtgtcaacaatggttggaaaagtgttcaattagtgatgattgttccgtttattctgattcagatggctcaattctcacagacactacctcaaacagtgccatggattcaggttttacttttcaggatagcggggtagttgtagccaataggatatttagtgataataatgatcttggaaccgcgatcgtgataaaagatagcacacccaaatacgacaatacttctattaacgtttacaaatcgaagaaagtgcatgtaggtgatgtcacatacataaaagggccagtgattattagtaatagcaattcagcgtataacgacaagttactctctattccatactccgagccttacgtggacactttcatagtagatagaatcaattggttggcccagccccccttaggagaacgagagaagctagaagagcctgttaaatacgttataataggtcacactgccacagaggaaggttttactcaagccgataacactcttctagttagactgatccaaactttccatatagaaagtcgtaagtggaaagatatagcttacaattttgtcattggctctgatggtctggcttacgaaggacgaggatggggggtaataggatcacacacaagaaattataatagcaaatcaattggaatttcattcatcggatgctttatagaccacctacccccagagtcagctctgaaaaaagctcaagatcttatcgaaaccggcattaaaagaggatccatagaccctgactacaaactactaggccattgccaatgttcagctgtggaaagtcccggaaggcggttgtttgaagaaatacaaacttggaaaaactgggatgagtcagttgtggccccaccatcaaactttaccttggtaattgacgaacccccagatgatcctgacccaagccagtaactgtgttcctcatatcgattcaaacaattgtgttcatttagggggtaggcgcaaaatcttagcccggtgctattttgcatgcattcatttttttcgaatcctgagagactaacgggtatttttgaaaggtttgaacgcggaatgaaggatcacattattactgagggccgtaagttccttagaataaacaaaaagttgcttttgaatgaaatatttgaaagtaaacatcatactaaattttctctttttttttcgcccctgtaacttattaaaataaacattatagaagttttcagggactttcgccctcggtaataacgtaatctttcattctgcgtttaaatttttcaaaaatacttattagttttctcaggattcgaaaaaaatgaatccccatttgaatagcattgcagccgaaaatacgtaccgatcctcttaagctcctacaataggtaggatgtacaactacatataataaataacttcatgaataattaaaactaagtttttacgggaaac

SEQ ID NO: 3956 - DNA, 558 bp, Diabrotica virgifera
cccgatgccatgtcaaatatttaaaattgtcaggctgactgacaatatgctgacaatattctattcgctgagtgcgttgtatgacaaagatagatttggaaaatattaccacggacattgtgttcatttttttcgaatcctgaaaaaaccaacaaatatttttgaaaaatccaaacgcagaatgaaagactaaattattaccgagggccgaaagtccttagaataaataaaaagtttattttgaatgagatatttgaaattaaaaatcacactaaattttctcttagtttttcacccctgtaacttattaaaataaacattatagaagttttcagggactttcgccctcggtaataacgtaatctttcattctgcgtttaaatttttcaaaaatacttattagttttctcaggattcgaaaaaaatgaatccccatttgaatagcattgcagccgaaaatacgtaccgatcctcttaagctcctacaataggtaggatgtacaactacatataataaataacttcatgaataattaaaactaagtttttacgggaaac

SEQ ID NO: 3957 - DNA, 264 bp, Diabrotica virgifera
cccctgtaacttattaaaataaacattatagaagttttcagggactttcgccctcggtaataacgtaatctttcattctgcgtttaaatttttcaaaaatacttattagttttctcaggattcgaaaaaaatgaatccccatttgaatagcattgcagccgaaaatacgtaccgatcctcttaagctcctacaataggtaggatgtacaactacatataataaataacttcatgaataattaaaactaagtttttacgggaaac

SEQ ID NO: 3958 - DNA, 1398 bp, Diabrotica virgifera
cctgcaatcaattacaatcgatatctttcgatttatgtcaacatcatttagatacctcactgtaatacatttatagtagatcaggcaaattatattatggattgagtggtctagctatctttgtctgccacatgcgcgggatcgcttggttaaaagagatagatagaccacctatcgactttttgcactgtattccctgtctacccttatgtctatgaatacatttccatttaagaaaaactgtcacttttgacaataattcataataaattgcaatcgtaacttcaaatttaaactaatcgatttattttggcagcaaattatttcttgccatgtgacatattaattacattattatttcatttgtagaaagttgagaaaaattacgttatacaattttagtaataatttatttaggtaccctttttcaatcaagcaaagcattatagcacgaagaatgatattcaatagaactttcacaattatctggcaactgaacctcattgaattgatgaccaagtattttactaactttgtaaaatgttcgaaaattactcaaaaatgttccgttgaatggtttcacttttgatttggcgacttaaaatttaaactgttgacactcaaaaatagacacaaaaacactccatagttaatataaattttaatttccaacacacgtggcaaacagaaactcagagaccatgtactttcaaatactactttgtatagcacaaagtgtcacactgacaaatgcagccttctaatacatacttctaagcataatgtgtcatatttacgtctattcttataagcacttattcttataagttttagactcttcacatttttcaatgtcgtttacagggttaagatttgagtatggaaaaaaatgtatacaacgttttttgtaggaaattttccgtactttctgatgcgcctaattagaaaaccctaagagattgctttcacatgttctttgacattttttattgtcattttgagaatatcttgaacaaactcctacccaaaaaaataattgtttggcaatatatacatgcattgatacttacctcaatgtttttggagtgtgcatgtatatatatgcacatgcaaatatgtgaatataaataataatatacaactaaaatagctttatcaatatgtgactaagtcattctgaaaaaatgtttttatttatttccttcgatttgcccaaactttttgtccgacatataactttttgcgttacaaaatataatttgtacataaacaaatcaaaattagcttgctatttatcaccaacatttttgtctgtatcttcatgtttagaatgtccgactaggaaaatttcccattcattttgtccgacaaaacttccaattgcttttttaacctttt

SEQ ID NO: 3959 - DNA, 1390 bp, Diabrotica virgifera
cctgcaatcaattacaatcgatatctttcgatttatgtcaacatcatttagatacctcactgtaatacatttatagtagatcaggcaaattatattatggattgagtggtctagctatctttgtctgccacatgcgcgggatcgcttggttaaaagagatagatagaccacctatcgactttttgcactgtattccctgtctacccttatgtctatgaatacatttccatttaagaaaaactgtcacttttgacaataattcataataaattgcaatcgtaacttcaaatttaaactaatcgatttattttggcagcaaattatttcttgccatgtgacatattaattacattattatttcatttgtagaaagttgagaaaaattacgttatacaattttagtaataatttatttaggtaccctttttcaatcaagcaaagcattatagcacgaagaatgatattcaatagaactttcacaattatctggcaactgaacctcattgaattgatgaccaagtattttactaactttgtaaaatgttcgaaaattactcaaaaatgttccgttgaatggtttcacttttgatttggcgacttaaaatttaaactgttgacactcaaaaatagacacaaaaacactccatagttaatataaattttaatttccaacacacgtggcaaacagaaactcagagaccatgtactttcaaatactactttgtatagcacaaagtgtcacactgacaaatgcagccttctaatacatacttctaagcataatgtgtcatatttacgtctattcttataagcaccaaagttttagactcttcacatttttcaatgtcgtttacagggttaagatttgagtatggaaaaaaatgtatacaacgttttttgtaggaaattttccgtactttctgatgcgcctaattagaaaaccctaagagattgctttcacatgttctttgacattttttattgtcattttgagaatatcttgaacaaactcctacccaaaaaaataattgtttggcaatatatacatgcattgatacttacctcaatgtttttggagtgtgcatgtatatatatgcacatgcaaatatgtgaatataaataataatatacaactaaaatagctttatcaatatgtgactaagtcattctgaaaaaatgtttttatttatttccttcgatttgcccaaactttttgtccgacatataactttttgcgttacaaaatataatttgtacataaacaaatcaaaattagcttgctatttatcaccaacatttttgtctgtatcttcatgtttagaatgtccgactaggaaaatttcccattcattttgtccgacaaaacttccaattgcttttttaacctttt

SEQ ID NO: 3960 - DNA, 929 bp, Diabrotica virgifera
  SmartBlast Evalue=4E-51; Info=Troponin I n=3 Tax=Obtectomera RepID=B0FMT1_9NEOP
gcagggaagggaactctcagcatccgagagaaaaatttgcaacagtcagcactgagtccttgttgactgctcacattttccatcgttgagaccagaacaactaaaacacttccaacatggcggacgatgagagaaagaaactggaggaggaaaagaagaggaaacaggccgaaattgaacgcaaaagggccgaggtcagggctcgtatggaagaggcctcaaaagccaagaaggccaagaaaggtttcatgacccctgagagaaagaagaaacttaggttactgttgagaaagaaagccgccgaagaattaaagaaagaacaagaacgcaaagcagccgaaaggaggcgtatcattgaagaaaggtgcggtaaacccaaacttgtcgatgacgcaaatgaaggctcattaaaacaagtatgtgagggatatcacagacgtattgtagacctagaaaataagaaatttgacctcgaaaaggaagtggaattcagagattttcagatctccgaattgaacagccaagtaaacgaccttagaggcaaattcgtcaaaccaaccttgaagaaggtatccaaatacgaaaacaaattcgccaaacttcaaaagaaggcagctgaatttaacttccgtaaccaactcaaagttgtcaagaagaaagaattcaccttagaagaagaagacaaagaagggccatcgtacctactcattttctaggggagaaaagtctaaaccccaacgacctaacttgtaagttagatgtagctaaaattaatagaaatctttaacactgtcgttgccactttattattaatattctcttaggattctcgagtagcctctctttagttatgagttgttaaccttgatgaacagaaaaaatatctacgactagagtttgctagaatatgagtttatttttcgcagact

SEQ ID NO: 3961 - DNA, 933 bp, Diabrotica virgifera
  SmartBlast Evalue=3E-60; Info=Troponin I n=1 Tax=Polyrhachis vicina RepID=E2IFW5_9HYME
gcagggaagggaactctcagcatccgagagaaaaatttgcaacagtcagcactgagtccttgttgactgctcacattttccatcgttgagaccagaacaactaaaacacttccaacatggcggacgatgagagaaagaaactggaggaggaaaagaagaggaaacaggccgaaattgaacgcaaaagggccgaggtcagggctcgtatggaagaggcctcaaaagccaagaaggccaagaaaggtttcatgacccctgagagaaagaagaaacttaggttactgttgagaaagaaagccgccgaagaattaaagaaagaacaagaacgcaaagcagccgaaaggaggcgtatcattgaagaaaggtgcggtaaacccaaacttgtcgatgacgcaaatgaaggctcattaaaacaagtatgtgagggatatcacagacgtattgtagacctagaaaataagaaatttgacctcgaaaaggaagtggaattcagagattttcagatctccgaattgaacagccaagtaaacgaccttagaggcaaattcgtcaaaccaaccttgaagaaggtatccaaatacgaaaacaaattcgccaaacttcaaaagaaggcagctgaatttaacttccgtaaccaactcaaagttgtcaagaagaaagaattcaccttagaagaagaagacaaagaaaagaaaccagactggtcaaagaagggagacgaaaagaaggtacaagaggctgaagcatgatttttctcctttgttaaagcccttttgtcaacatcaagggatatgtcgttatttcgatgatcccatcgtgatttcgatatcttaaatatatttattttattcattactttccagactaaaagagtgtctgtccgcatgtatattatttgtttatgtataacttattaaaaaatgtgaagtattg

SEQ ID NO: 3962 - DNA, 829 bp, Diabrotica virgifera
  SmartBlast Evalue=1E-43; Info=Troponin I isoform B n=1 Tax= Polyrhachis vicina RepID=E3VSK9_9HYME
gcagggaagggaactctcagcatccgagagaaaaatttgcaacagtcagcactgagtccttgttgactgctcacattttccatcgttgagaccagaacaactaaaacacttccaacatggcggacgatgagagaaagaaactggaggaggaaaagaagaggaaacaggccgaaattgaacgcaaaagggccgaggtcagggctcgtatggaagaggcctcaaaagccaagaaggccaagaaaggtttcatgacccctgagagaaagaagaaacttaggttactgttgagaaagaaagccgccgaagaattaaagaaagaacaagaacgcaaagcagccgaaaggaggcgtatcattgaagaaaggtgcggtaaacccaaacttgtcgatgacgcaaatgaaggctcattaaaacaagtatgtgagggatatcacagacgtattgtagacctagaaaataagaaatttgacctcgaaaaggaagtggaattcagagattttcagatctccgaattgaacagccaagtaaacgaccttagaggcaaattcgtcaaaccaaccttgaagaaggtatccaaatacgaaaacaaattcgccaaacttcaaaagaaggcagctgaatttaacttccgtaaccaactcaaagttgtcaagaagaaagaattcaccttagaagaagaagacaaagaaactaagaaagctgataaagctgagtggcagacgaagaaatgaactaactacatagttactcgccgttatttttttgaattttacatgtttcgacttttttggattatacacacactacactaataaaattttaaaactct

SEQ ID NO: 3963 - DNA, 531 bp, Diabrotica virgifera
gtatatttagtaaaaatatataggtttaataaaggaattcggcaacatttttttcacctgtttattaaaaacatgtctttttgtattaaatataaagtctcgcctgcccactgattaatttgaatggccgcggtattttgaccgtgctaaggtagcataatcattagtttttttattgaaagctggaatgaagggttggatgaaaaaactaatgattatgctaccttagcacggtcaaaataccgcggccactcaaaataatcattaaataacggattgcgagacttatttcaaaaatagacaatattaacggaaaattaattttgtagtaatgtatttctgaaaatcgccgagcaagtgatacaaaatataagttatatgtaagaatgttaaagtaaagtgtgttttttagaggtgtagaactttgagatgcaataaaacaaagatgatttttttaaattgacatgcaattgattttattcgaaagataatcaatctttaggcattataatttaaatatgatttctggca

SEQ ID NO: 3964 - DNA, 183 bp, Diabrotica virgifera
gctttcaataaaaaaactaatgattatgctaccttagcacggtcaaaataccgcggccattcaaattaatcagtgggcaggcgagactttatatttaatacaaaaagacatgtttttaataaacaggtgaaaaaaatgttgccgaattcctttattaaacctatatatttttactaaatatac

SEQ ID NO: 3965 - DNA, 844 bp, Diabrotica virgifera
cttggtattataattgaaaattatttattttctttcgttattattttggcagcgcaagttgtctaaagaatttctgaaactgttttcttgtgtcttaaaaaacaattaatgcagaagtcatttaaaaaaagtggtacagtaggcggtacaagcgcaaagcttcatactgttttctatatttttaaaattgaataaattttattatatattttatacttcctatatattttttaatgaattggaaacagtttacatgttgtatagcggactcccctcgtcgcgtaaatgacttatttttcgctcgtgacgctcgcctcagcattttactctagagaaatatgaaaacatcgccagtctagaagttttgcttcaaaaattttaaaccaagaaattatcagatctaatctgtaaatttacagtttaaatctaagttatgtagttttatgaaaatataacaaaagatattctacataaacgtcaagcaagcatacctttggaagagaaaacagtgtaaaacgattgtattgtccttttcatgatcatttttcagtgcgtaacaaatgataggaaaaagggtaagtccgtgataatacacatttatgacatttattctaacatgacattttagttaaatctgacagttgtcacattttattttcaatttggaataaaaacaaatcaaatgtgtttcttgcatttataaaatggtattttctttgatttgtatagtcttataaattatacagattatatttgtaatattattatctaattaaaaaaattattttttattatggcgccatctatcgacaactaaaataactagaagaaatgttataaaaat

SEQ ID NO: 3966 - DNA, 808 bp, Diabrotica virgifera
cttggtattataattgaaaattatttattttctttcgttattattttggcagcgcaagttgtctaaagaatttctgaaactgttttcttgtgtcttaaaaaacaattaatgcagaagtcatttaaaaaaagtggtacagtaggcggtacaagcgcaaagcttcatactgttttctatatttttaaaattgaataaattttattatatattttatacttcctatatattttttaatgaattggaaacagtttacatgttgtatagcggactcccctcgtcgcgtaaatgacttatttttcgctcgtgacgctcgcctcagcaagaagttttgcttcaaaaattttaaaccaagaaattatcagatctaatctgtaaatttacagtttaaatctaagttatgtagttttatgaaaatataacaaaagatattctacataaacgtcaagcaagcatacctttggaagagaaaacagtgtaaaacgattgtattgtccttttcatgatcatttttcagtgcgtaacaaatgataggaaaaagggtaagtccgtgataatacacatttatgacatttattctaacatgacattttagttaaatctgacagttgtcacattttattttcaatttggaataaaaacaaatcaaatgtgtttcttgcatttataaaatggtattttctttgatttgtatagtcttataaattatacagattatatttgtaatattattatctaattaaaaaaattattttttattatggcgccatctatcgacaactaaaataactagaagaaatgttataaaaat

SEQ ID NO: 3967 - DNA, 322 bp, Diabrotica virgifera
tattgtccttttcatgatcatttttcagtgcgtaacaaatgataggaaaaagggtaagtccgtgataatacacatttatgacatttattctaacatgacattttagttaaatctgacagttgtcacattttattttcaatttggaataaaaacaaatcaaatgtgtttcttgcatttataaaatggtattttctttgatttgtatagtcttataaattatacagattatatttgtaatattattatctaattaaaaaaattattttttattatggcgccatctatcgacaactaaaataactagaagaaatgttataaaaat

SEQ ID NO: 3968 - DNA, 933 bp, Diabrotica virgifera
acagtaacttaaaattcataaaacgttttgttgtcacaccttcgttttctcttgcatttaccatatatttgtatatttttgttgtttcaatatgaaaggatcaattctttagatattacaacttattaaggtatgtcaaaaattttaatatattttctttttattaattttctagtcatattttattttattacaatatatttacatttttaagacacttgaaagttataattatatcatacactggaaaaagatggaagtagtgttaagtttttttttacttatgtttaagacattttgtgtccgttacacgaatttttaggctcttcttgcttcacaattcgtaactagaaaacatattttatctactacatgcttgtagttctttgatctaacgcatttctacatgctttcagtgataatttttgccaaaagccgacctaaaaccaataaaacatacaactagaacatttcctttagtttataaaacgtccgtgtaagcttctggctaagctctagtgttaggcccggcgcaaattgaacctaagccagacacaacctgcgccggcgggacgggtgacccgtgcatttatttttctagcgtgccgcatattgaacacaacccaacccaaccgttggctatcgacgtggcgaatagagacgggcaaaatcagtgcggacatgtaacggttacttttgataccggttctcagtggtactgagtacaaatactgattacaaaatactgatgtatctgatccttgtactgaattgagtaggcaacttaaaatcggtattccgtacttgtaactagtaacgttttaaaaatatcttacacgttcctagtagtcgtagcggtatgactttcgaaaacatcgaatttgatcataagcgggtgcataattaacggaagatctattaacaacataagat

SEQ ID NO: 3969 - DNA, 780 bp, Diabrotica virgifera
acgttgggattgtcaggtagtcgtaaataaataacaaaaataataacatttttaagtaaacattcgaaattatatttttattctgtagtggtgccatattttggtaagtattctttttcttgtagtgcctgtccatttcggatggcggcgaccatcatggcaatctctactttgcacattgctgctctgaaaagatttgtggttgtcgtgttaaaccatgtatgtagatttctcagccaggcaatccttcgccttcctggtacacgctttccttctacttttccctgtaagattagttgcagtagtccatatctctcgctgtttttcatgctgtgacaggtattcattttggctgtttttattgtggtttaggcccggcgcaaattgaacctaagccagacacaacctgcgccggcgggacgggtgacccgtgcatttatttttctagcgtgccgcatattgaacacaacccaacccaaccgttggctatcgacgtggcgaatagagacgggcaaaatcagtgcggacatgtaacggttacttttgataccggttctcagtggtactgagtacaaatactgattacaaaatactgatgtatctgatccttgtactgaattgagtaggcaacttaaaatcggtattccgtacttgtaactagtaacgttttaaaaatatcttacacgttcctagtagtcgtagcggtatgactttcgaaaacatcgaatttgatcataagcgggtgcataattaacggaagatctattaacaacataagat

SEQ ID NO: 3970 - DNA, 780 bp, Diabrotica virgifera
attgtttagtgttagtgtatgtatagtcgtggatgtacatctttggggatcaaagctagttattcgttattctgtagtcttaagaatatattattatatttccaagcatctcaccaatttgatgcaggccctcaacatgcaccactagttattttttcttattttttccgttaagtgttgttaaacggaaaaccgtctatttaaaggaaaaactatcgtaatatgaaactgtcaaaaagaatacaaaggtgaaagcaaataaaaatgtggggagtacgaataatttaaagaaatttcaaattagattttaaaaataatacggtacttatgcctgattgtaccaacagatcttaggcttaaaacgtgctttaggcccggcgcaaattgaacctaagccagacacaacctgcgccggcgggacgggtgacccgtgcatttatttttctagcgtgccgcatattgaacacaacccaacccaaccgttggctatcgacgtggcgaatagagacgggcaaaatcagtgcggacatgtaacggttacttttgataccggttctcagtggtactgagtacaaatactgattacaaaatactgatgtatctgatccttgtactgaattgagtaggcaacttaaaatcggtattccgtacttgtaactagtaacgttttaaaaatatcttacacgttcctagtagtcgtagcggtatgactttcgaaaacatcgaatttgatcataagcgggtgcataattaacggaagatctattaacaacataagat

SEQ ID NO: 3971 - DNA, 825 bp, Diabrotica virgifera
  SmartBlast Evalue=1E-12; Info="Ninjurin-2, putative n=1 Tax= Pediculus humanus corporis RepID=E0W1I6_PEDHC"
gggttcaaaaaatgtgaagatcacttagtaaaaataaacttaaatcagtactttttgttccaatagcaaatacctcaatataataataaaataatgcctcaaggtctgaatacaattagtgtgaatgcacccatgacgagtacactagacgtcaataaatacgcaactaaaaagacaattgctcaaggacttttggacattgctctattgactgcaaatgcatctcaattgaagtttatcttacaagttggagaagaacatcaattttatcttttaatgttgatattgatatcaaccagcataatattacaagttattcaagctgccctgtgtgtaattttgggaggatcatacgatataaataaagaacatcatcaagacaatgcaaataaaacaaacaatatcataatggtggtaaatattgtcatcatggcagtaaatgtgataataaattcctttgaaatgaagagtgaatatctgataaatatgtttcacgcagcaaaaacttcaacaacaacaatagcttcaacaatcaaatcataatatagatagcaagaagaaaaaattagatataaaatttttttactaatgacattttcgtagacgtgtatattaaaaataaaaataatctaggatagaagattaatcgcatatatattttcctttttaatcacttttatgtattatttggcgctagctacatttctagcagatgtacctattatttatttttgtataaaaattgttttttaataatataaaataaactttttaataagtattatttttatgaaataaagatatattattatgtacttcaaaata

SEQ ID NO: 3972 - DNA, 819 bp, Diabrotica virgifera
  SmartBlast Evalue=1E-12; Info="Ninjurin-2, putative n=1 Tax= Pediculus humanus corporis RepID=E0W1I6_PEDHC"
gtggattattgttggtagtaatattttgtaaagcatatgggaaacatgtcgcaaaaagattctaaagtgaatgtggcagggcaaaatcaccatacccatagggatggtaatgttatttcagagattttaaggagtacactagacgtcaataaatacgcaactaaaaagacaattgctcaaggacttttggacattgctctattgactgcaaatgcatctcaattgaagtttatcttacaagttggagaagaacatcaattttatcttttaatgttgatattgatatcaaccagcataatattacaagttattcaagctgccctgtgtgtaattttgggaggatcatacgatataaataaagaacatcatcaagacaatgcaaataaaacaaacaatatcataatggtggtaaatattgtcatcatggcagtaaatgtgataataaattcctttgaaatgaagagtgaatatctgataaatatgtttcacgcagcaaaaacttcaacaacaacaatagcttcaacaatcaaatcataatatagatagcaagaagaaaaaattagatataaaatttttttactaatgacattttcgtagacgtgtatattaaaaataaaaataatctaggatagaagattaatcgcatatatattttcctttttaatcacttttatgtattatttggcgctagctacatttctagcagatgtacctattatttatttttgtataaaaattgttttttaataatataaaataaactttttaataagtattatttttatgaaataaagatatattattatgtacttcaaaata

SEQ ID NO: 3973 - DNA, 809 bp, Diabrotica virgifera
  SmartBlast Evalue=9E-13; Info="Ninjurin-2, putative n=1 Tax= Pediculus humanus corporis RepID=E0W1I6_PEDHC"
aatattttgtaaagcatatgggaaacatgtcgcaaaaagattctaaagtgaatgtggcagggcaaaatcaccaaactcaccatacccatagggatggtaatgttatttcggaaattttaaggagtacactagacgtcaataaatacgcaactaaaaagacaattgctcaaggacttttggacattgctctattgactgcaaatgcatctcaattgaagtttatcttacaagttggagaagaacatcaattttatcttttaatgttgatattgatatcaaccagcataatattacaagttattcaagctgccctgtgtgtaattttgggaggatcatacgatataaataaagaacatcatcaagacaatgcaaataaaacaaacaatatcataatggtggtaaatattgtcatcatggcagtaaatgtgataataaattcctttgaaatgaagagtgaatatctgataaatatgtttcacgcagcaaaaacttcaacaacaacaatagcttcaacaatcaaatcataatatagatagcaagaagaaaaaattagatataaaatttttttactaatgacattttcgtagacgtgtatattaaaaataaaaataatctaggatagaagattaatcgcatatatattttcctttttaatcacttttatgtattatttggcgctagctacatttctagcagatgtacctattatttatttttgtataaaaattgttttttaataatataaaataaactttttaataagtattatttttatgaaataaagatatattattatgtacttcaaaata

SEQ ID NO: 3974 - DNA, 913 bp, Diabrotica virgifera
ggtgtttgcctgaaatgattatggcctgataaaataatgcaaagatgttgaggttttgactgcggttgggaaggttatgggttgtactcgcgtgcaatgtgcgtgctagccaccgagatgttgtttgacagaaatatgtgggtcggggcccagtgggggttgtccgtcaaggaaacattggtttaaaatgttacatcaaactaggatgtttaaaatatttggctaatctgcaccaggtaacatctgagctttggatatgacttgttcacatgttaaaagtatgacggcaagtgacaatgaaatggatagagacctccgaacgatgacaaggacaagacagaaatgacagttccacaggaagttgaaaattaacctgtcatatttaaagactaaggtgtacagcttgttaaaattagaaatgatgtaacaacacactccattgtgaaaattatcatttaaaattcgttgttatagttaaaaattttattcacgtatactttagtggagttagttaggcaaaccacattacacaaaagtttagtattcaagaactgaattcagtaataaaatcttattatcaagagatctaagatttaaaaaagtaattttgtgttgatttaaagttatcgaatttatttaacttattggtagctgttggaatttgtgtaggtaagtgtgtaacagatcacaatgggggtgactgaggtgtaaaaatgtcttaaataatctagggggatgtatcattaagaaagcacaagctgcaacttaggcgactaattcctaaagacttcgcaagctgcccggatccctaagggtccaaaaaccaaaaccgtaataggatgatgataataggggctggggggtaagagatgtctgtgaggaaattagcgagaaaggaacatgaacgagaccc

SEQ ID NO: 3975 - DNA, 793 bp, Diabrotica virgifera
ttgtttgacagaaatatgtgggtcggggcccagtgggggttgtccgtcaaggaaacattggtttaaaatgttacatcaaactaggatgtttaaaatatttggctaatctgcaccaggtaacatctgagctttggatatgacttgttcacatgttaaaagtatgacggcaagtgacaatgaaatggatagagacctccgaacgatgacaaggacaagacagaaatgacagttccacaggaagttgaaaattaacctgtcatatttaaagactaaggtgtacagcttgttaaaattagaaatgatgtaacaacacactccattgtgaaaattatcatttaaaattcgttgttatagttaaaaattttattcacgtatactttagtggagttagttaggcaaaccacattacacaaaagtttagtattcaagaactgaattcagtaataaaatcttattatcaagagatctaagatttaaaaaagtaattttgtgttgatttaaagttatcgaatttatttaacttattggtagctgttggaatttgtgtaggtaagtgtgtaacagatcacaatgggggtgactgaggtgtaaaaatgtcttaaataatctagggggatgtatcattaagaaagcacaagctgcaacttaggcgactaattcctaaagacttcgcaagctgcccggatccctaagggtccaaaaaccaaaaccgtaataggatgatgataataggggctggggggtaagagatgtctgtgaggaaattagcgagaaaggaacatgaacgagaccc

SEQ ID NO: 3976 - DNA, 437 bp, Diabrotica virgifera
tagataccaaatcgctataaaattttcgtggacccccacttgcaacttgtgaacccccattttattcacgccaacgtaaacccccattgagtcctttgtggacccctggggtccacctggaccactttgggaatcactgatttaaagttatcgaatttatttaacttattggtagctgttggaatttgtgtaggtaagtgtgtaacagatcacaatgggggtgactgaggtgtaaaaatgtcttaaataatctagggggatgtatcattaagaaagcacaagctgcaacttaggcgactaattcctaaagacttcgcaagctgcccggatccctaagggtccaaaaaccaaaaccgtaataggatgatgataataggggctggggggtaagagatgtctgtgaggaaattagcgagaaaggaacatgaacgagaccc

SEQ ID NO: 3977 - DNA, 951 bp, Diabrotica virgifera
  SmartBlast Evalue=4E-53; Info=Polypeptide N- acetylgalactosaminyltransferase 1 n=1 Tax=Harpegnathos saltator RepID=E2BG61_9HYME
tgtcgttcaggatttggcagtgcggaggcagattggaaacggtcccatgctcgagggtaggtcatatcttccgcgatttccgcccctattcgtttcccgacaacaaagacacgcacggcattaacacggcccgactggcgcacgtttggatggacgaatacaagagatttttcttcatgcaccaacctgcattggagaacaacccgatcgttggagatcttacacaccggaagcagttaaggcaaaagttgcgatgtaaatcttcaaatggtatttggataatgtttatccagaaaagtacatcccagatgaaaacgcctacgcctatggacaagttcacacagaattcgacatgtgcttggacgatttgcaattgtctgaagataaagttgggcctttagggctgtaccagtgtcattccttcatggccttgtcccagttcttctctatgagtagcaagggtgaattgaggaaagaaaacgtctgcgcagaggaaattcatactttatttgtggatcccacaaaagcgtatgacacgattctggtgagaaagctgtgacagtctcttgaacgatcttctgtaaatagcacgatcatcgccgcagtcacacaattatgcaataaagcaacatcagcgagtcgtactacatcaggtagtcgtagtgaatgatgaggaagacatggactacatgtttagaaaactaaagaaagaatatgaaaaatggggcgtcaatatgaatatgaatataaaaaatgctggatttgttgcaaagggtatattttaaaataccttaataggggtcacaagacagaacgttttcggattgagcaattcatcatcagtgttctaaaagccaaaaaaaatagcatgcctgagccaccaaaatgttttggttttttggcttttggaacactgatgatggatttctggatccgaaaacgttttttctt

SEQ ID NO: 3978 - DNA, 758 bp, Diabrotica virgifera
  SmartBlast Evalue=3E-59; Info=Polypeptide N- acetylgalactosaminyltransferase 1 n=1 Tax=Harpegnathos saltator RepID=E2BG61_9HYME
tgtcgttcaggatttggcagtgcggaggcagattggaaacggtcccatgctcgagggtaggtcatatcttccgcgatttccgcccctattcgtttcccgacaacaaagacacgcacggcattaacacggcccgactggcgcacgtttggatggacgaatacaagagatttttcttcatgcaccaacctgcattggagaacaacccgatcgttggagatcttacacaccggaagcagttaaggcaaaagttgcgatgtaaatcttcaaatggtatttggataatgtttatccagaaaagtacatcccagatgaaaacgcctacgcctatggacaagttcacacagaattcgacatgtgcttggacgatttgcaattgtctgaagataaagttgggcctttagggctgtaccagtgtcattccttcatggccttgtcccagttcttctctatgagtagcaagggtgaattgaggaaagaaaacgtctgcgcagaggtatttaacgaacgtgacgtccatctaaccttgtgccacggccataaaagggaacaatactggcagctattcaaaaatggcaccatatatagtcccacggtgaacaaatgcttaagtagcgaaggcgtggacaatggcaggggcgtcaaagttgaagattgtaaagagagcgtctttcagaagtggacttttgataagatcaatacgactgcagttatctattaaactataaattataaaaattttctataagattggtttcatg

SEQ ID NO: 3979 - DNA, 594 bp, Diabrotica virgifera
gttccaaattgtgtattctctccatgccttggaggaacgcactattttccgggacaccctgtataggatgattcataagcaacgggtgttattttgcctgcaggttttttgacgaaagtattattattatttttaggaaattcatactttatttgtggatcccacaaaagcgtatgacacgattctggtgagaaagctgtgacagtctcttgaacgatcttctgtaaatagcacgatcatcgccgcagtcacacaattatgcaataaagcaacatcagcgagtcgtactacatcaggtagtcgtagtgaatgatgaggaagacatggactacatgtttagaaaactaaagaaagaatatgaaaaatggggcgtcaatatgaatatgaatataaaaaatgctggatttgttgcaaagggtatattttaaaataccttaataggggtcacaagacagaacgttttcggattgagcaattcatcatcagtgttctaaaagccaaaaaaaatagcatgcctgagccaccaaaatgttttggttttttggcttttggaacactgatgatggatttctggatccgaaaacgttttttctt

SEQ ID NO: 3980 - DNA, 739 bp, Diabrotica virgifera
  SmartBlast Evalue=2E-10; Info=Peritrophin 1 (Fragment) n=1 Tax= Chrysomela tremulae RepID=C3UTD2_9CUCU
ttgtcagatatttccatttattagttttatagagtctgtaaaccactggactactatagtcggttcgctaaactcagacacaactggccagtgattgtagtaagtcattttgccaatttggcaaaattggcaaaaaaaataatcactaaatacctagttagtaattttgccaaaattactaaccaattttggcaaaactggcaaaaaacaaaaaatgacctactaaaatcactagccagttgtgtctgagtttagagaaccaactatgtatactaatcttattcttaatacgaaattatgaacaataaaatattgtcgtacctataataataaaatgatgacgtttaattagctggtgttggtggttctgttgttgttggaggggttactgttgtagttgttctatctccacactccacgaggtcaggagtttcacaaagactcttttctatattaaagtatgttccaggagcacaggtcaacttaattggatctccgttatcacattcataaaatactgcacattccactgaatctgggagatatacgggggtttcatcggtggtatgtgggcatgttccttcaggtttgctaatagctaaagcaacacaacttaaaagaagcacaattttcaacatcattttgtttcttgttactatagtcagtagcttatctagaatactaattgcatgattgctctgctttatattattatacgcatctcctatcacgtacatac

SEQ ID NO: 3981 - DNA, 737 bp, Diabrotica virgifera
  SmartBlast Evalue=2E-10; Info=Peritrophin 1 (Fragment) n=1 Tax= Chrysomela tremulae RepID=C3UTD2_9CUCU
gtcagatatttccatttattagttttatagagtctgtaaaccactggactactatagtcggttcgctaaactcagacacaactggccagtgattgtagtaagtcattttgccaatttggcaaaattggcaaaaaaaataatcactaaatacctagttagtaattttgccaaaattactaaccaattttggcaaaactggcaaaaaacaaaaaatgacctactaaaatcactagccagttgtgtctgagtttagagaaccaactatgtatactaatcttattcttaatacgaaattatgaacaataaaatattgtcgtacctataataataaaatgatgacgtttaattagctggtgttggtggttctgttgttgttggaggggttactgttgtagttgttctatctccacactccacgaggtcaggagtttcacaaagactcttttctatattaaagtatgttccaggagcacaggtcaacttaattggatctccgttatcacattcataaaatactgcacattccactgaatctgggagatatacgggggtttcatcggtggtatgtgggcatgttccttcaggtttgctaatagctaaagcaacacaacttaaaagaagcacaattttcaacatcattttgtttcttgttactatagtcagtagcttatctagaatactaattgcatgattgctctgctttatattattatacgcatctcctatcacgtacatac

SEQ ID NO: 3982 - DNA, 599 bp, Diabrotica virgifera
  SmartBlast Evalue=1E-10; Info=Peritrophin 1 (Fragment) n=1 Tax= Chrysomela tremulae RepID=C3UTD2_9CUCU
caaaaaaaaaaataatcactaaatacctagttagtaattttgccaaaattactaaccaattttggcaaaactggcaaaaaacaaaaaatggcctactaaaatcactagccagctgtgtctgagttcagcgaaccgactatcttcttaatacgaaattatgaacaataaaatattatcgtacctataataataaaatgatgacgtttaattagctggtgttggtggttctgttgttgttggagggggtactgttgtagttgttctatctccacactccacgaggtcaggagtttcacaaagactcttttctatattaaagtatgttccaggagcacaagtcaacttaattggatctccgttatcacattcataaaatactgcacattccactgaatctgggagatatacgggggtttcatcggtggtatgtgggcatgttccttcaggtttgctaatagctaaagcaacacaacttaaaagaagcacaattttcaacatcattttgtttcttgttactatagtcagtagcttatctagaatactaattgcatgattgctctgctttatattattatacgcatctcctatcacgtacatac

SEQ ID NO: 3983 - DNA, 847 bp, Diabrotica virgifera
agaagttgcaaatgaggaaccagtggtggaacaacaagctgaggctagtatagaagaacaacctgaaccagttattaatgaaccagaaaatcaaaattcaccagaagaatgccaagaaaaagatcaagaagactcggaaactattgaaaattcaaacgataaaataattacatctactgtagaagaatctgctgagaaagtagtacaaagtaaaagtttaccacaagtagacaaaagtattttggatgactgggaagatgatactgattcccaacagagtgaaaaaaatgttacggaatccgaatcccaagactcacagatgtccaatgagaaagataatccagctccttctgctgtagaaaaagttaacaaattaatggatgactgggacgatgatgatgaagaagagaaaaaagagtaatgttcagtgaaaagacactagcgaagataacgttgatggtactatgaatgttaatagtgaagaaccaatggatattgatgaaattgaaaataagactgccgaaggagaagtgcaagatgaaagttttgttcaggaaccttctgacgagccgccatctcaggtgacgtctgatattcaactttcagttgacaccaattcgggtcttgaaaatcaaacagttgaaaatactgcagaactcgcacttcaaactgaagaaggccttgatattattccaccagaaaaggttccgcccgaattagaagctgcaatcaacaatgaaatcagtaatagtatacagaaaggaccattcgaattacaattatcacctaaacaaactacagatgaacagcaaccaccagatcaaacggaaaaagtggatgaaccaat

SEQ ID NO: 3984 - DNA, 686 bp, Diabrotica virgifera
agaagttgcaaatgaggaaccagtggtggaacaacaagctgaggctagtatagaagaacaacctgaaccagttattaatgaaccagaaaatcaaaattcaccagaagaatgccaagaaaaagatcaagaagactcggaaactattgaaaattcaaacgataaaataattacatctactgtagaagaatctgctgagaaagtagtacaaagtaaaagtttaccacaagtagacaaaagtattttggatgactgggaagatgatactgattcccaacagagtgaaaaaaatgttacggaatccgaatcccaagactcacagatgtccaatgagaaagataatccagctccttctgctgtagaaaaagttaacaaattaatggatgactgggacgatgatgatgaagaagagaaaaaagagtaatgttcagtgaaaaagttcgggattaaatctaaaggttcagtaataaaccatttaagggatttcatttgatgttggttcgttaataagaagaaagaaagcacttagaaagacgctgtttaatgaagataatcttaatgtatacactatatttcttttgtgtatctctacctttattatttacaatgtacaacataggcaggcaaaataactacggtagaggcacacattaagaatactgttttaaaatgcttgtacatacaactaa

SEQ ID NO: 3985 - DNA, 685 bp, Diabrotica virgifera
gggagatcgagaatcacgaaggactgaaacaagagccatatttcgaggaagatagaaaacctgaaatacaccaagttgctgagacagtagttaccaagctacacaatatgccagacattcatgccgaatccgaggaatctcaaatagaagtacaccaaacggaagagtcacttaccacaatacaacctgaggaacaacacgtagaaccatccgttgaagaacttccaagtagccaaacagaagaaattcaaaatgattttcatgaagagaaagacactagcgaagataacgttgatggtactatgaatgttaatagtgaagaaccaatggatattgatgaaattgaaaataagactgccgaaggagaagtgcaagatgaaagttttgttcaggaaccttctgacgagccgccatctcaggtgacgtctgatattcaactttcagttgacaccaattcgggtcttgaaaatcaaacagttgaaaatactgcagaactcgcacttcaaactgaagaaggccttgatattattccaccagaaaaggttccgcccgaattagaagctgcaatcaacaatgaaatcagtaatagtatacagaaaggaccattcgaattacaattatcacctaaacaaactacagatgaacagcaaccaccagatcaaacggaaaaagtggatgaaccaat

SEQ ID NO: 3986 - DNA, 654 bp, Diabrotica virgifera
  SmartBlast Evalue=2E-60; Info=Phosphatidylethanolamine-binding protein n=3 Tax=Culicini RepID=Q16LF6_AEDAE
tataaatataatattctaccttgattcgaatatttttagaagctctgaaagcaaagatggagaaagaacaagttgtcccagatgttatagatcaagtgcctgagcatgtagttgaggtgcaatatcctggaggcgaaaaagtagattttggaaatgaattgacaccaacacaagtaaagcctcaacccactataacatggccagccgattcagattcctattacacagttctgatggttgacccagatgcaccaagtagaaaagaaccaaagtatagagaaatactccactggtccgtaggcaatgtactgggaaatgatgtagccaaaggtgaaacctttactgattatgtaggctctggagctccaaaaggatctggattacacagatatatctttttaatttataaacaaaatggaaaaattgagttcaatgaaccaaggatagacaatcggaccaaaaccggcagacttaatttttcgacaaggaaatatgcagagaagtacaaccttggtcaaccaatcgctggaaacttcttccaggcccagtttgacgaatgggtacttgaaatggaaagaacaattaagggttaaaaattgtatgccgttataaaattataaaaatataaaaaataatagatcatttttattgcca

SEQ ID NO: 3987 - DNA, 610 bp, Diabrotica virgifera
  SmartBlast Evalue=1E-58; Info=Phosphatidylethanolamine-binding protein n=3 Tax=Culicini RepID=Q16LF6_AEDAE
ctgaaagcaaagatggagaaagaacaagttgtcccagatgttatagatcaagtgcctgagcatgtagttgaggtgcaatatcctggaggcgaaaaagtagattttggaaatgaattgacaccaacacaagtaaagcctcaacccactataacatggccagccgattcagattcctattacacagttctgatggttgacccagatgcaccaagtagaaaagaaccaaagtatagagaaatactccactggtccgtaggcaatgtactgggaaatgatgtagccaaaggtgaaacctttactgattatgtaggctctggagctccaaaaggatctggattacacagatatatctttttaatttataaacaaaatggaaaaattgagttcaatgaaccaaggatagacaatcggaccaaaaccggcagacttaatttttcgacaaggaaatatgcagagaagtacaaccttggtcaaccaatcgctggaaacttcttccaggcccagtttgacgaatgggtacttgaaatggaaagaacaattaagggttaaaaattgtatgccgttataaaattataaaaatataaaaaataatagatcatttttattgcca

SEQ ID NO: 3988 - DNA, 711 bp, Diabrotica virgifera
  SmartBlast Evalue=6E-57; Info=Phosphatidylethanolamine-binding protein n=3 Tax=Culicini RepID=Q16LF6_AEDAE
gtggtgtggtagtaagtagttgcctgataatatgtatattaaattacctttttgcttatctgtttgaatgtttattttgtaaattctacagataaagaagctctgaaagcaaagatggagaaagaacaagtcgtgccaaacgtcatcgaccaagtgcctgagcatgtagttgaggtacaataccctggtggtgaaaaagtagatcttggaaatgaactgacaccaacacaagtaaaggatcaacctactctaacatggccagctgattcggataccttctacacagttctgatggttgatccagatgcaccaaccagaaaagaaccaaaggtcagtgaagtgctccactggtccgtaggcaatgtaccgggaaatgatgtggcaaaaggtgaaacctttgctggatatagaggctctggacctccacaaggaactggattacacagatatatatttttaatttataaacaaaatggaaaaattgagttcaatgaaccaaggatagacaggttgaccagaaccggcagatttaatttttcgacaaggaagtatgcagagaagtacaaccttggtcaaccaatcgctggaaacttcttccaggcccagtttgacgaatgggtacttgaaatggaaagaacaattaagggttaaaaattgtatgccgttataaaattataaaaatataaaaataatagatcatttttattgcca

SEQ ID NO: 3989 - DNA, 673 bp, Diabrotica virgifera
tatattagcatttaaaaattaaatcgatatgaatcgatcctggcagcatcgccatatggtggttggggttgtttacccccgacgagggggttgatttgtaaaacactatttacaaacatgtatttatttgccaacctaaatataccagtaacgagttggtgggcaaagtctatattctaactacttgatgtctaaataatgaatgatgaataaataatgatatgtgcaatactttctccgtatctataaataaactcgtaattgttttgttatgattttgacgacacgattgtgaccgtgaaatactcataatatcaaaatcgctgactgaggtgttctcgaaccgattggcctacattgtgaaataaatgtcacccagttattttactataaacaataatgtttgtttaagacctttaaaaattaaatcgatatgaattgctcttatttttgaatgctaatataaatcctgtacaacatgaaagtccgtcaaaagaacacctgacaataaaaatattatcgcaataaacaactctatacctaccattgaacatgtggatgccttcacatatccgtgcacagaaatcaatcagaagaattccttaagtatttagaagaatatttccagcaggaattgtacatactatgataatagaagattgctgacaatgga

SEQ ID NO: 3990 - DNA, 600 bp, Diabrotica virgifera
tatattagcatttaaaaattaaatcgatatgaatcgatcctggcagcatcgccatatggtggttggggttgtttacccccgacgagggggttgatttgtaaaacactatttacaaacatgtatttatttgccaacctaaatataccagtaacgagttggtgggcaaagtctatattctaactacttgatgtctaaataatgaatgatgaataaataatgatatgtgcaatactttctccgtatctataaataaactcgtaattgttttgttatgattttgacgacacgattgtgaccgtgaaatactcataatatcaaaatcgctgactgaggtgttctcgaaccgattggcctacattgtgaaataaatgtcacccagttattttactataaacaataatgtttgttttcttcttcttctttctcgaaactccttatgcctatcaggggcgtcggagtaaagtttgtttaatactatgctaatataaatcctgtacactggtttgtctttagtttcatgcgtcgaagacaatgatggtagataaaaggtatgtgttttatctcgctaggtattaatgacgcacgggtaaaggaccatgg

SEQ ID NO: 3991 - DNA, 476 bp, Diabrotica virgifera
tatattagcatttaaaaattaaatcgatatgaatcgatcctggcagcatcgccatatggtggttggggttgtttacccccgacgagggggttgatttgtaaaacactatttacaaacatgtatttatttgccaacctaaatataccagtaacgagttggtgggcaaagtctatattctaactacttgatgtctaaataatgaatgatgaataaataatgatatgtgcaatactttctccgtatctataaataaactcgtaattgttttgttatgattttgacgacacgattgtgaccgtgaaatactcataatatcaaaatcgctgactgaggtgttctcgaaccgattggcctacattgtgaaataaatgtcacccagttattttactataaacaataatgtttgtttaagacctttaaaaattaaatcgatatgaattgctcttatttttgaatgctaatataaatcctgtaca

SEQ ID NO: 3992 - DNA, 681 bp, Diabrotica virgifera
tgttagataaaatgaacttccatcaagtaacggtcgaatccatcaattacatacaacagtagttgtgacactttatagtcttgtttcacttttgataaagttaggttaggtgttcacaatttgtatctagtttagaatcatgaagtttgttccaactcgatacaaaaccgttcttgaatcgttacgtgcatgcgcaataacgaataattatgcgtagtaacatattttcgttactgcgcatgctcgtaagccgttcagaaacggttttgtatcgagttggaacaaacctataattattagaaagttgttatatttctagaaaagaaaataaaggatgttggctacattcaatgatattcgtgatactttatatagttgtgtttcgtaattgacaaagttcgtaatcttgttttagatacgtaattaacgaaaaattgatactattatagactcctcgacagaaataatatgtgccttatacgtaaaagggagtgataagaaaattaggcgtaacatgttttttattacctaatcataaatttgtactcgtatgaaatagcttggtaaaaatattctcaaatattctaggtctaaatatacgagtactcttctttgatagttttgtacgttttatagttgttttgattacagtttaagttacgcctgataagtcttatacct

SEQ ID NO: 3993 - DNA, 669 bp, Diabrotica virgifera
tgttagataaaatgaacttccatcaagtaacggtcgaatccatcaattacatacaacagtagttgtgacactttatagtcttgtttcacttttgataaagttaggttaggtgttcacaatttgtatctagtttagaatcatgaagtttgttccaactcgatacaaaaccgttcttgaatcgttacgtgcatgcgcaataacgaataattatgcgtagtaacatattttcgttactgcgcatgctcgtaagccgttcagaaacggttttgtatcgagttggaacaaaagaaagttgttatatttctagaaaagaaaataaaggatgttggctacattcaatgatattcgtgatactttatatagttgtgtttcgtaattgacaaagttcgtaatcttgttttagatacgtaattaacgaaaaattgatactattatagactcctcgacagaaataatatgtgccttatacgtaaaagggagtgataagaaaattaggcgtaacatgttttttattacctaatcataaatttgtactcgtatgaaatagcttggtaaaaatattctcaaatattctaggtctaaatatacgagtactcttctttgatagttttgtacgttttatagttgttttgattacagtttaagttacgcctgataagtcttatacct

SEQ ID NO: 3994 - DNA, 566 bp, Diabrotica virgifera
accttggaagtaacgaatatttaatgtaattgttctgtattttttgtagtattgttaaattttgtgaaaacaaatagttttggtcacatacaacagtagttgtgacactttatagtcttgtttcacttttgataaagttaggttaggtgttcacaatttgtatctagtttagaatcaattattagaaagttgttatatttctagaaaagaaaataaaggatgttggctacattcaatgatattcgtgatactttatatagttgtgtttcgtaattgacaaagttcgtaatcttgttttagatacgtaattaacgaaaaattgatactattatagactcctcgacagaaataatatgtgccttatacgtaaaagggagtgataagaaaattaggcgtaacatgttttttattacctaatcataaatttgtactcgtatgaaatagcttggtaaaaatattctcaaatattctaggtctaaatatacgagtactcttctttgatagttttgtacgttttatagttgttttgattacagtttaagttacgcctgataagtcttatacct

SEQ ID NO: 3995 - DNA, 710 bp, Diabrotica virgifera
aaatggcgacaatacaaacatatgtgactaatagcacgataacatttgaacgaaaagtccgatttcaaccaaatttggtatatagcttttttatgtataagatcaaggtcttgaaccggaagaatcggtttaccaaaagttgtgtttttcctggtttttatgtaaaatatgttgttctttttcaattctttcaccctgtatatattaatttttttaaaagagagtaaaaatatttttaaggaaatattttgaactttttagttatgttaattaccatttaataaatgcataacgtatcttcacatgtacctatgtgcagcagattcatttgaatgcccgccatttttgtaaaagacaaaatctgagatggcctcatatctaaatttgaacctttggatgtgtagtatgtgtggtctaaattatatgcttctaccattaaatgcacaataattcttatactatttgcacgaatctgccgcataggttcataggtacatgtgaagacacgttatgcatccattaattagtaattaacacaactaaagagttcaaaacatttcccaaaaaatacccttacgctcctttcaacgccggtattacccttttaaaaattaatatatacaaggtgaaagaactgaaaaaataaacaacatacttttacatcaaaaatcaggaaaaacacaatctccggcaaaccgactcctccggtt

SEQ ID NO: 3996 - DNA, 599 bp, Diabrotica virgifera
aaatggcgacaatacaaacatatgtgactaatagcacgataacatttgaacgaaaagtccgatttcaaccaaatttggtatatagcttttttatgtataagatcaaggtcttgaaccggaagaatcggtttaccaaaagttgtgtttttcctggtttttatgtaaaatatgttgttctttttcaattctttcaccctgtatatattaatttttttaaaagagagtaaaaatatttttaaggaaatattttgaactttttagttatgttaattaccatttaataaatgcataacgtatcttcacatgtacctatgtgcagcagattcatttgaatgcccgccatttttgtaaaagacaaaatctgagatggcctcatatctaaatttgaatctgtgtatgtgtagtatgtgtggtccaaattatatgcacataccattaaatgcacaataattcttatattacatattatttgcacgaatctgccgcacgtaggtatctacatgtgaagatacgtcatgcatgcatcaaatggtaattaacacaactaaagcgttcaaaatatttcctaaaaaatacctttatgctccttcaacgccggt

SEQ ID NO: 3997 - DNA, 535 bp, Diabrotica virgifera
aaatggcgacaatacaaacatatgtgactaatagcacgataacatttgaacgaaaagtccgatttcaaccaaatttggtatatagcttttttatgtataagatcaaggtcttgaaccggaagaatcggtttaccaaaagttgtgtttttcctggtttttatgtaaaatatgttgttctttttcaattctttcaccctgtatatattaatttttttaaaagagagtaaaaatatttttaaggaaatattttgaactttttagttatgttaattaccatttaataaatgcataacgtatcttcacatgtacctatgtgcagcagattcatttgaatgcccgccatttttgtaaaagacaaaatctgagatggcctcatatatgggcctcaatttgaatctttgtatgtgtaggtgacttaatgatttgatttagaatgttacagggtgttctataacatagtggcaggccaaacttatgttttttaaaatggaacaccctatattttatttatattctaaatgtaacttcccattac

SEQ ID NO: 3998 - DNA, 622 bp, Diabrotica virgifera
aatacttcatagtttactaatttatttattttttcatgtacacaaagtagctcgacaaataagcccattggtgcctacatttcataaattaataaattgaaaatggttattcatttttaataaatttaaattgataaatttgaaaatggtaaatgaaatgtgataatttgttattaaaatatttttttgtagtgtaatttaagcagatgtaagatctgcatgtgaagtataaatttgtattttacaggttgatggttcccatgattcaaaaaccaattcatctactgtaacctgaaatccaattcctgcagttatcttcgctgtgacattatcatcgcaatctatcaataaacacgaaatttctaattcagtaccactcgaaggaaagtgtacaggaatagtggtaggaaaagatgatgttatttgttcctcaaactgcaggtatcctggatttgcaggatctggacaatagataattgattcacattggacatgtactacaatacagcacactaaagctaaaacaacaattgttttagacattgtattaacttcaaaaaatatgtcggactataataaaaactcaaaattttgtagttcgctttccgatttttatatagag

SEQ ID NO: 3999 - DNA, 607 bp, Diabrotica virgifera
aatacttcatagtttactaatttatttattttttcatgtacacaaagtagctcgacaaataagcccattggtgcctacatttcataaattaataaattgaaaatggttattcatttttaataaatttaaattgataaatttgaaaatggtaaatgaaatgtgataatttgttattaaaatatttttttgtagtgtaatttaagcagatgtaagatctgcatgtgaagtataaatttgtattttacaggttgatggttcccatgattcaaaaaccaattcatctactgtaacctgaaatccaattcctgcagttatcttcgctgtgacattatcatcgcaatctatcaccaaacacgaaatgcctgtattcaatgtaccactcgaaggaatatgttcacttatatggtcccgaaatatcgttgagacctgttggctaaacaacagtaatcccggatttgcaggatccggacaattgacatcaggttcacattggacatgtgcaacaaaatagcacactaaagctaaaataacgatcgttttagacattgcactaatttaaaaaattgtggtaatctatagacaaactaaaatcttttgtagttctctt

SEQ ID NO: 4000 - DNA, 568 bp, Diabrotica virgifera
aatatttcatagataatttatttatttacataaagtacctcgacaactacatccataggtatgtttcatagatttaagtctattaatttgataaatttgaaaatattaaatgaaatgctaccaattttttattaaaatattttaggttgttatttaaggcaatttaacatctggctgtaaaacataaatttcaattccatagtttgatctttgcaaccaatttaatgagaaaacttcaattttgacatacttgaatccaactcctcccgcaactacctctattgaggtattattatcgctggtaagcaccaaacacgaaatgcctgtattcaatgtaccactcgaaggaatatgttcacttatatggtcccgaaatatcgttgagacctgttggctaaacaacagtaatcccggatttgcaggatccggacaattgacatcaggttcacattggacatgtgcaacaaaatagcacactaaagctaaaataacgatcgttttagacattgcactaatttaaaaaattgtggtaatctatagacaaactaaaatcttttgtagttctctt

SEQ ID NO: 4001 - DNA, 544 bp, Diabrotica virgifera
  SmartBlast Evalue=1E-66; Info=Ribosomal protein L32e n=2 Tax= Polyphaga RepID=Q4GXA8_TIMBA
cttgacattgacaaaccgaaccaaaccttcctttttaacgaaaaatcgtgtgtaaaggtagcacacgaataatcatcttttaattttccctataatcctttcaggatggcaatcagaccagtttaccgtcctcaaatcatcaaaaagaggacaaagaagttcatcaggcatcagtccgatagatatggtaaacttaagagaaactggcgtaaaccaaagggtattgacaacagagtcagaaggcgtttcaagggacaatatttgatgccaaatattggttatggttccaattctaagactaggcatatgctaccaacaggtttcagaaaagttttggtacacaatgtaaaagaacttgaagttctccttatgcaaaaccgcaaatattgtgcagaaattgcgcacggcgtttcatcaaagaaacgcaaggatattgtagaacgtgctcagcaattgagtattagggttacaaatggaaacgctaggttacgtagccaagaaaatgaataagctataattttgtttaataaaaaatagaaaaagt

SEQ ID NO: 4002 - DNA, 537 bp, Diabrotica virgifera
  SmartBlast Evalue=1E-66; Info=Ribosomal protein L32e n=2 Tax= Polyphaga RepID=Q4GXA8_TIMBA
cttgacattgacaaaccgaaccaaaccttcctttttaacgaaaaatcgtgtgtaaaggtagcacacgaataatcatcttttaattttccctataatcctttcaggatggcaatcagaccagtttaccgtcctcaaatcatcaaaaagaggacaaagaagttcatcaggcatcagtccgatagatatggtaaacttaagagaaactggcgtaaaccaaagggtattgacaacagagtcagaaggcgtttcaagggacaatatttgatgccaaatattggttatggttccaattctaagactaggcatatgctaccaacaggtttcagaaaagttttggtacacaatgtaaaagaacttgaagttctccttatgcaaaaccgtaaatattgtgcagaaattgcacatggagtttcgtcaaagaaacgcaaggatattgtagaacgtgctcagcaattgagtattagggtcacaaatggaaatgctaggttacgtagccaagaaaatgaataagctattattttgtttaataaaaaatag

SEQ ID NO: 4003 - DNA, 517 bp, Diabrotica virgifera
  SmartBlast Evalue=1E-66; Info=Ribosomal protein L32e n=2 Tax= Polyphaga RepID=Q4GXA8_TIMBA
cttgacattgacaaaccgaaccaaaccttcctttttaacgaaaaatcgtgtgtaaaggtagcacacgaataatcatcttttaattttccctataatcctttcaggatggcaatcagaccagtttaccgtcctcaaatcatcaaaaagaggacaaagaagttcatcaggcatcagtccgatagatatggtaaacttaagagaaactggcgtaaaccaaagggtattgacaacagagtcagaaggcgtttcaagggacaatatttgatgccaaatattggttatggttccaattctaagactaggcatatgctaccaacaggtttcagaaaagttttggtacacaatgtaaaagaacttgaagttctccttatgcaaaaccgcaaatattgtgcagaaattgcgcacggcgtttcatcaaagaaacgcaaggatattgtagaacgtgctcagcaattgagtattagggttacaaatggaaacgctaggttacgtagccaagaaaatgaataagctataa

SEQ ID NO: 4004 - DNA, 687 bp, Diabrotica virgifera
ggggtgactgaccattttgtactttaatcctataaaaatcatattttaaattttgctacatttttgtatgcaaatatgttatgggtttaggcgtctactttcagtaccttagattataattacaagaaaataatcatgacttagaaaaaaaaataaaaatgcctttggtcagaaaaaaataaaaaatgcctttggtcagaaaaggttcaccccatctgggggggtatatgctttttgcctgttaaacttatttttcttttaggtggggttaatttgaccgttttttaaaccattttttcttaattcgttatatcggtggatttaacaacccttggaatattaattcttttttttttaatttaaaaatgaattcttagatatttataaatttgaatcgttagatatttacaatagatatttttctatgttttcggtcaaagtaaccccattttacggtatcatcgaattgtctggtatggttacgcctacatattctaacatgttttttaattacatatcaaatcatcaaaaaattaataggtaacactaagcacgccttcttaactagatgacaaaaatagaagaagaccaaatttgcaactagaataattctctttgaggaaaatagtgctttcactaacaaaatcactttgtggactgtaaaaattgttggaatgtactccctct

SEQ ID NO: 4005 - DNA, 579 bp, Diabrotica virgifera
tgtttagtaaaataccgtaatgacgtcgactttgcaaagtaacaagacacttaccgtaaaatggggcgacttttgaccgattttgtactttaatcctttaaaaataatattttaaattttgctacatttttgtatatgcaaatatgttatgggtttaggcgtgtactttcagtagatttaattataattacaagaaaatatcatgacttagaaaaaaaaataaaaaatgcctttggtcaagttcaccccatctggggggaagttgaccgtatatgctttttgcctgttaaacttattttcttttaggtggggttaatttgaccgtttttaaaccattttttcttaattcgttatatcggtggatttaacaacccttggaatattattcttattttttatttaaaaatgaattcttagatatttataaatttgaatcgttaaaaataattttaaaaattatacagggtggctgaagtatatcacaatagatttttttctatgtttttggttaaattcaccccagcggtcaaagtaaccccattttacggtactactataaacttgtactactatacctat

SEQ ID NO: 4006 - DNA, 511 bp, Diabrotica virgifera
ggggtgactgaccattttgtactttaatcctataaaaatcatattttaaattttgctacatttttgtatgcaaatatgttatgggtttaggcgtctactttcagtaccttagattataattacaagaaaatatcatgacttagaaaaaaaaataaaaaatgcctttggtcaagttcaccccatctggggggaagttgaccgtatatgctttttgcctgttaaacttattttcttttaggtggggttaatttgaccgtttttaaaccattttttcttaattcgttatatcggtggatttaacaacccttggaatattattcttattttttatttaaaaatgaattcttagatatttataaatttgaatcgttaaaaataattttaaaaattatacagggtggctgaagtatatcacaatagatttttttctatgtttttggttaaattcaccccagcggtcaaagtaaccccattttacggtactactataaacttgtactactatacctat

SEQ ID NO: 4007 - DNA, 1776 bp, Diabrotica virgifera
  SmartBlast Evalue=0; Info=cathepsin L precursor n=1 Tax= Tribolium castaneum RepID=UPI0001C0B393
atggttctcttggtttttgagtagttgtttttattgtgagatgatttcgaagttcaccctggttttcttggtttgcattgtcgcaccagcgataggtgatccaccagttccagaatggagtgacacttatagcgtagaaggaactatccatttgccttatgcagaaatagtagagcctttccatgcttggtatgatggaaaatctaaaaattcgcgcattgattactacaatgggacggctaagacataccaacttggaggaaatggaaatggtgtccaactgaaagtagttccattcactacagaggaggtcctaaaccaaataacgtgcttccagatcaatggaactgaagacgatccagtgactcctcaatcgattttgccagatttagaaggatttgaatatcaaggcatacaggagtatggagatagagaactagaggtatggtttctaaaaactgtccagttagaaaaagaaaacgaatacactctatgggttgtccgagatgagcatggtaaagctattccagttaaatatgatatgagaggatacaattcgttattgggaagccactacgatcattactatttgctatacacatcgaagtcttacaggactcacaagattgatccctccgtttttgaagtagaaactaatagtgaatgcagaagttttcctggacccggaaatcaacatgttcacatcatgaaccccatggccgaatacattcgtcccgaaaaaagtgagcacgtggactcaagctttggcgattttataaataaccacaacaaaaattacgcagacacaaaagaacacgtttttagaaaagaggttttccgtcaaaacgtcaggttcatcgaatctgtcaaccgacaaaataaaggatatagtctagcaattaatcatcttgctgataagactgacaaggaaattaaatacctgaatggaagactttcaagtggaggcaacaatggaggacaacctttcccttacacagatgctgataccgatgatttacctgatcaatatgactggagactgtttggagctgtttcaccagtaaaagatcaagccatatgcggatcttgctggtcttttggaaccgtcggcacccttgaaggatcactttttttgaaaaatggtggtcggttggtacaattatcccagcaagctttggtggattgttcttggggctttggtaacaatggttgtgatggtggggaggattggagggcttaccaatggatccaaaaacacggtggaataccaatcgatagtcattatggaggctacaagggagaggatggattttgcgcagctgatgaggtggagaagacagctaaaattactggttgggtaaacgtaaccgaaaacgatgaaaatgctcttcgtttggcactcgtgaagcaaggaccaattagtgttagcatcgacgctagccaaaaatctttcagtttttattcacatggagtctattacgaagaaaattgcggaaacagagaagaagatttggaccattcggttttagctgttggatacggttcaatcaacggcgaaaactattggttaatcaaaaacagttggtctacttattggggaaatgacggctacatcttgatgtcttccagaaacaacaactgtggagtcatgacggcggctacctatgtaactatgtagatatttaacataacatccatatttaaataaaaaaataagaaatccaatttatttatattgtaaatatttatcaaataaattttcttcataataaaaaa

SEQ ID NO: 4008 - DNA, 801 bp, Diabrotica virgifera
  SmartBlast Evalue=4E-32; Info=Endonuclease-reverse transcriptase n=1 Tax=Bombyx mori RepID=D7F173_BOMMO
ccgacacgatcggacttcgaataaacacagaaaaactaaacttctaaaaaataataaccgtccaaataataaaataatgataaacggtaaagaagtagaagaggtagacaagttcacatatctgggatctgtcatggaaaggagcgggggtgtaaaaaggatatacagacgagaataacaaaggcgcaacacgcattcaacgctttaaatagaatttggcaaacaaacgaaatatcggaaactaacaaaaattaaaatctttaatagttgtattaaaagtatactgctctatggagcagaaacatggaaacaggacgaaaatacaactaaaaaactacaaacatttgtaaacaaatctctaagaaaaatcctgaaaatatactggccaaacaaaataactaatacagaactatgggaaaggacaaagcaaactaacgtatctactacagtcaaggaaaaaaatggaaatggatcggccacactttaaggaaagaccaaagcagcatagcaagacaagcacttgaataccaaccagaggggaaaagaaagaggggcagaccagacaacagctggaaaagaacaacaacgagagaacacgaaaaaattggactaagatggggcgaagtcaaaaagagagcaaaagatagaagagagtggagggaattagttcacaatttatccagagaataaaaacaaaagaagatgcgctgtcccggccagacagcaatcttacacttttggccaagaaacgcataagcgcccaatactccacaaggagggatgtaacgagagagagagaga

SEQ ID NO: 4009 - DNA, 573 bp, Diabrotica virgifera
  SmartBlast Evalue=4E-15; Info=Endonuclease-reverse transcriptase n=1 Tax=Schistosoma mansoni RepID=Q4QQE8_SCHMA
ccgacacgatcggacttcgaataaacacagaaaaactaaacttctaaaaaataataaccgtccaaataataaaataatgataaacggtaaagaagtagaagaggtagacaagttcacatatctgggatctgtcatggaaaggagcgggggtgtaaaaaggatatacagacgagaataacaaaggcgcaacacgcattcaacgctttaaatagaatttggcaaacaaacgaaatatcggaaactaacaaaaattaaaatctttaatagttgtattaaaagtatactgctctatggagcagaaacatggaaacaggacgaaaatacaactaaaaaactacaaacatttgtaaacaaatctctaagaaaaatcctgaaaatatactggccaaacaaaataactaatacagaactatttctttagcaaaatccactaggaagtagccattttcgtttgtctatgtatggaagctgtgttttcctattgtggggaacaataattcctccctgcctattttagcattagcgtctcctatgacaatcttcatatcatacttgggaatagcctcatatact

SEQ ID NO: 4010 - DNA, 311 bp, Diabrotica virgifera
  SmartBlast Evalue=4E-11; Info=Endonuclease-reverse transcriptase n=1 Tax=Bombyx mori RepID=D7F170_BOMMO
catgtaaataataagtatttatccttcaaaatacactgcgcaattttctacaaaatacgctttaagagttgtatcagttttttttggaaccagctgtacttttgtaaaaaatttttcattgtaagtatgtgctctttattattagtcccttttctttagcaaaatccactaggaagtagccattttcgtttgtctatgtatggaagctgtgttttcctattgtggggaacaataattcctccctgcctattttagcattagcgtctcctatgacaatcttcatatcatacttgggaatagcctcatatact

SEQ ID NO: 4011 - DNA, 745 bp, Diabrotica virgifera
  SmartBlast Evalue=2E-40; Info=Acaloleptin A n=1 Tax=Acalolepta luxuriosa RepID=Q76K70_ACALU
tacatgccatgttggtttagctctattgggtccatggacaactttgctccatccagcctggaagtcatgatctttgccgttatttcttacttctattccagcattagtgttaccatttccatcaccgttagctccaggatttacttcccattctggctttggtgatcgtgggaatctgaagctaccacctacatgccatgttggtttagctctattgggtccatgaacaactttgctccatccagcctggaagttatgatctttgccgttatttctaacttctacaccagcatttgtgttaccatttccatcaccgttagctccagggtttacttcccaatctggctttggtgatcgtgggaatctaaagctaccacctacatgccatgttggtttagctctattgggaccatggacaactttgctccatccagcctgaaagtcgtgatctttgccgttatttcttacttctataccagcattggtgttaccatttccatcaccgttagctccaggatttacttcccaatctggctttggtgatcttttgaatcgtatcgtatttggaggagctttccaagattgtgtcttctgtttgttatctttggcgttggttatagcaaatattgtcaccagcaacaaacacagcgaagaagaaattatcttcattttgagttagaatctgtattttcttctaatcgtagtttttttttcaattcgacgtctctttgagattggaaacgct

SEQ ID NO: 4012 - DNA, 552 bp, Diabrotica virgifera
  SmartBlast Evalue=3E-23; Info=Acaloleptin A n=1 Tax=Acalolepta luxuriosa RepID=Q76K70_ACALU
tacatgccatgttggtttagctctattgggtccatggacaactttgctccatccagcctggaagtcatgatctttgccgttatttcttacttctattccagcattagtgttaccatttccatcaccgttagctccaggatttacttcccattctggctttggtgatcgtgggaatctgaagctaccacctacatgccatgttggtttagctctattgggtccatgaacaactttgctccatccagcctggaagttatgatctttgcccttatttattacttctataccggcattggtgttaccatttccatcaccgttagctcctggatttacttcccaatctggtcttggcgatcttctaaaccttatcgcatcttgagaaactttccaaggtcctgccttctgtttgtcatctttggcgttggttatagcaaatattgtcaccagcaacaaacacagtgaaaaagcagtaacgttcattttgaataattagaatctgtattttcttctaatcgtagtttttttttcaatttgacgtctctttgggattgg

SEQ ID NO: 4013 - DNA, 332 bp, Diabrotica virgifera
ggacaactttgctccatccagcctgaaagtcgtgatctttgccgttatttcttacttctataccagcattggtgttaccatttccatcaccgttagctccaggatttacttcccaatctggctttggtgatcttttgaatcgtatcgtatttggaggagctttccaagattgtgtcttctgtttgttatctttggcgttggttatagcaaatattgtcaccagcaacaaacacagcgaagaagaaattatcttcattttgagttagaatctgtattttcttctaatcgtagtttttttttcaattcgacgtctctttgagattggaaacgct

SEQ ID NO: 4014 - DNA, 808 bp, Diabrotica virgifera
ccccgctactagtcacacagttctggacccttaacttgttgcttgtttatttttaaaatatttttgtgatgtatttgtgtgtgtggagagatatggcattagacaaagcatatttttgccacagaattttgttataaagatgtttaaatgtttataaacttaattaagatatatatagatttgtcttaagattgctgatattaagtggtaggctaatgttgggatcaaataaacctaaataggggagtgcatatagattttcacttcggaaaaaatcaaacaagatagaactttttgtaatttcattaagaaatgtttaataaacaacatatcaaaaagttctactcgagaagtgggtgcttcattttttattaaacaaatgaactacgaaattagatgtttttttaaataactccgaaaatataaattttagaaaaaaactgacttgaccattgaaaaattcagaaaattttacaaaaaaaccttatataaagatttttctaaaattaaatctctagcttctgtaattttttatttataacgctaaagtcacccttctcacacacattggcgcactgtaaactagcgttggaagaagtgcacggttgagtttttttaatgtaattctttaactaatggatcaaaagaaattttacaaattggacatgaaagaagatgaaataagctatcttatggttgtaataaaagaaataaaatatatggacatatgtacggtgtgggcggaaagtgagacttacatgaattttgttaaaaatgatttaaaaatgtgtaactaatacaattttac

SEQ ID NO: 4015 - DNA, 599 bp, Diabrotica virgifera
ccccgctactagtcacacagttctggacccttaacttgttgcttgtttatttttaaaatatttttgtgatgtatttgtgtgtgtggagagatatggcattagacaaagcatatttttgccacagaattttgttataaagatgtttaaatgtttataaacttaattaagatatatatagatttgtcttaagattgctgatattaagtggtaggctaatgttgggatcaaataaacctaaataggggagtgcatatagattttcacttcggaaaaaatcaaacaagatagaactttttgtaatttcattaagaaatgtttaataaacaacatatcaaaaagttctactcgagaagtgggtgcttcattttttattaaacaaatgaactacgaaattagatgtttttttaaataactccgaaaatataaattttagaaaaaaactgacttgaccattgaaaaattcaaaaaacgttacaaaaaaaccttatataaagaattttctgaaattaaatttgtatcttctataattttttatttataacgccaaagtcacccttctcacaaacattggcgcactgtaaactaacgtacggcgaagt

SEQ ID NO: 4016 - DNA, 1000 bp, Diabrotica virgifera
  SmartBlast Evalue=4E-10; Info=Endonuclease-reverse transcriptase n=1 Tax=Bombyx mori RepID=D5LB38_BOMMO
cttatagacagagttgagcaatttaaatatcttggagctacgttaaatagtaagtaggactgcgaatagaagtgaagatagtgaaggtagcaacagctaaaaatagttttactagatttaataaactacctttgtcagcgcgaaactccttgagatcttcgtattcgcgtcttaaaattcctcttcttcgcgtgcctcatcctttaaggacattagcaatcattacggtccattttactctgcagcagccctgaagagttatattgttgtttttccactccactgctttaaattttcaaccaggatatgcgtcgtcttcccggtcctcttttttcttgcactttttcttatataaccaatcacatcacgttttttatatttcttagtatgtgaccaaagcagctcatttttctttccttcattgtgttgagtatttcttttgcctttttcatctttcttaatgtttccgtgtttgttacgtgttgtgcccatgatattttttacattattcgataacaccacatctcaacaaggcaagtcttcttcagatgcgcccgtgattgtccaggcttcgactcagtatacaaggacagagaatacgtaacaactcagctagctaatcactaattaatttttatttaattccaaatacatattacaactatttacagaccatgtagaagaggaatctgagtctcgaggggagtctgacgtggaagaagagaatgaatatttaagctcagctgaggagtttgaagaagaagtacaagattcggaaacagaattaatttagtttatagttttatacttttctacctatatatttataataattaatttgtctttttctatcatatttgcaaaatctattgtatagtacgtattattttctttaattaagaaaaagttacttaaaaaactataatatattataataaacactctaacgtttcgaggaacaacaacatggatatctccaggtcacgtgacttttctcgag

SEQ ID NO: 4017 - DNA, 538 bp, Diabrotica virgifera
cttatagacagagttgagcaatttaaatatcttggagctacgttaaatagtaagtaggactgcgaatagaagtgaagatagtgaaggtagcaacagctaaaaatagttttactagatttaataaactacctttgtcagcgcgaaactccttgagatcttcgtattcgcgtcttaaaattcctcttcttcgcgtgcctcatcctttaaggacattagcaatcattacggtccattttactctgcagcagccctgaagagttatattgttgtttttccactccactgctttaaattttcaaccaggatatgcgtcgtcttcccggtcctcttttccttccattttccactgtataacctaaaatgctacacatggcaataatcatgtactgcatccacacctggtcactttaagtgttgaagcgttcgaaatgtggtgtttcagaaggttgcttaaaattccgtgggtcaataatgagcaaaactgaaggcaggaggggaccaggtcgcaaacgacactcatggttcagacacaaaagca

SEQ ID NO: 4018 - DNA, 746 bp, Diabrotica virgifera
ttctccttcttgcttagtgtaattccattgtgcaaaaaatgcaatatcccttaataaagccaatactcttaaatatagttggctcttgtcttcttggatcaaactgcgtactaatcctcgcatctcatccaagaaataaggcgtcaaatattcagcggtagggtcgggactcacactagcgaagtttctatagacataatgcgtgaagtgatgtagatcaatccaatttttggagttactgggggccatatctttgactttatataaaaattcaaaagtgcttttctttctggagcagtgaagtctttgttgttcagccaatttaagcctacaggaacttccacactatttgggtcatttggatccttagtccttattagtttgtaaagactgtctctggtgttatcatgaagagccttaaggaattcgagggaatagataccgacatcatcttggactgctctgacaacttggggagccgactgttgttttgattccaattcaaattcgtgcgaggctcgccgacacgtttgtttaactaaaagttcgataaacgacgaaaatttactcatgattatttcgtggtggcaactacccagataataataaaggttacattagcaaaccgcagaaatgaatggaaacactcatttcacaggcgaaattgtacttcctccttcaaatctgtgaaattaacatttttactcattttaggctatttggcgttgaattcagcttgagtgagg

SEQ ID NO: 4019 - DNA, 519 bp, Diabrotica virgifera
ttctccttcttgcttagtgtaattccattgtgcaaaaaatgcaatatcccttaataaagccaatactcttaaatatagttggctcttgtcttcttggatcaaactgcgtactaatcctcgcatctcatccaagaaataaggcgtcaaatattcagcggtagggtcgggactcacactagcgaagtttctatagacataatgcgtgaagtgatgtagatcaatccaatttttggagttactgggggccatatctttgactttatataaaaattcaaaagtgcttttctttctggagcagtgaagtctttgttgttcagccaatttaagcctacaggaacttccacactatttgggtcatttggatccttagtagattctggctgttgttttatacactaattcactgcactttatattttgttctatattaaatttcattaatttactgttcgtttaaaccactgaattttaatttttaacaggagctacttctaactgcgtgttaactgtccatttacc

SEQ ID NO: 4020 - DNA, 278 bp, Diabrotica virgifera
atctctattattactaatcaccttatctttttatgaataaattggaatttaatgacatgtaatttgtattaatttctattttctactgtttacgaattttaaaattgagaaaaagcatgcaataacttacagattctggctgttgttttatacactaattcactgcactttatattttgttctatattaaatttcattaatttactgttcgtttaaaccactgaattttaatttttaacaggagctacttctaactgcgtgttaactgtccatttacc

SEQ ID NO: 4021 - DNA, 634 bp, Diabrotica virgifera
taacattttgaaagacaaagacaaaatttataaatcgtggagggaagacggccgcaatgcaaattcgaaaaggaaagtaaaaaaagaagttgctgacattgattcgggagtgtatgagtggttttgtgctgttagtaatcaaaacattcctgtgacgggtcccatgatgcaagcaaaggcgatggaagtggctaaaactttggagtgcagtaaagataccttcaaagcgtcgaacgggtggttgtataactttaaacttcggaataacatccaaagtttgggtaaaccgacaacagagggagcatgttttctcaaggctagctctacacataacaatgatgaacaggaacaaccagaagcgatgtatttgcgaaccagataagaaagatcacatacaagcattgtgtctttatactacaggaaatcattttttatctatggaaaaacataaacctgttgctgataatgaatcttatatacgcagcaaaacatcaaacgaaaatacagttggtgtattgaacgaagaaaaaaacaactcagaagaaaatagagaaagcccaaaagattatataaaggcagaagaagaaaatgattccgaagaaaataaagaacgtccaaacaataatacagaggc

SEQ ID NO: 4022 - DNA, 483 bp, Diabrotica virgifera
taacattttgaaagacaaagacaaaatttataaatcgtggagggaagacggccgcaatgcaaattcgaaaaggaaagtaaaaaaagaagttgctgacattgattcgggagtgtatgagtggttttgtgctgttagtaatcaaaacattcctgtgacgggtcccatgatgcaagcaaaggcgatggaagtggctaaaactttggagtgcagtaaagataccttcaaagcgtcgaacgggtggttgtataactttaaacttcggaataacatccaaagtttgggtaaaccgacaacagagggagcatgttttctcaaggctagctctacacataacaatgatgaacaggaacaaccagaagcgatgatttgcgaaccagatgaggaaggccacttacaagcgttaggtcctgatattacgggacaacatcttttatctacggaaagacataacgaggttgcagatgatggatccattatacgcag

SEQ ID NO: 4023 - DNA, 409 bp, Diabrotica virgifera
acagtaacgatgatttcaaagcatcgaacggttggttgtatgaatttaaacttcaaaataatattcaaagtttgagtaatccgaaaacagagggcctcaacactagcaatgatgaacaagaacaatcagatgttgaactaatttgcgaaccagataagaaagatcacatacaagcattgtgtctttatactacaggaaatcattttttatctatggaaaaacataaacctgttgctgataatgaatcttatatacgcagcaaaacatcaaacgaaaatacagttggtgtattgaacgaagaaaaaaacaactcagaagaaaatagagaaagcccaaaagattatataaaggcagaagaagaaaatgattccgaagaaaataaagaacgtccaaacaataatacagaggc

SEQ ID NO: 4024 - DNA, 531 bp, Diabrotica virgifera
aatatttatctaaatataaaaattattttatatatttggtcctttcgtactaaaatatattaataaattaaagatagaaaccaacctggctcacaccggtttaaactcagatcatgtaaaattttaaaagtcgaacagacttaataatatagctgctacaccaattataaactttaatccaacatcgaggtcgcaatctttattatcgatttgaactctccaataaaattacgctgttatccctaaggtaatttattcttataatcaaaaaaattggatcaaaaaattattaattaatataataatataaaaaaagttaaatttattttttaatcaccccaattaaataaatttattatataaataaatttaatactaaaaaaacttattaataattttataaaactctatagggtcttctcgtcttttaaaaaaatttaagctttttaacttaaaaataaaattctttataaattaaataaagacagtttttttttcatccaacccttcattccagctttcaataaaaaa

SEQ ID NO: 4025 - DNA, 398 bp, Diabrotica virgifera
aatatttatctaaatataaaaattattttatatatttggtcctttcgtactaaaatatattaataaattaaagatagaaaccaacctggctcacaccggtttaaactcagatcatgtaaaattttaaaagtcgaacagacttaataatatagctgctacaccaattataaactttaatccaacatcgaggtcgcaatctttattatcgatttgaactctccaataaaattacgctgttatccctaaggtaatttattcttataatcaaaaaaattggatcaaaaaattattaattaatataataatataaaaaaagttaaatttattttttaatcaccccaattaaataaatttattatataaataaatttaatactaaaaaaacttattaataattt

SEQ ID NO: 4026 - DNA, 504 bp, Diabrotica virgifera
  SmartBlast Evalue=3E-67; Info=Ribosomal protein 4 n=6 Tax= Obtectomera RepID=Q5MGJ8_LONON
ttcattttataagatttttattttaaaaatgtttcatcactcaaaacttcctgaagctcttctttgaactgctacctttagttactttcaatacgttgaatctaactgtttttgaaagtggtctgcattcaccaattgtaactacatctccaatttccacatccctgaagcagggtgataaatgtacagacatattcctatgcctcttttcaaaacgattgtatttcctgatataatgcaaataatctctacggatgacaatagtcctttgcatcttcattttttggacaactccagtgagaatacggccacggattgatacatttccagtgaagggacatttcttgtcaatgtaagaaccttcaattgcctctctgggagttttaaaaccgagccctacactgcgagaatgtcttaaatttttctttcctccacttttgcggttgagaaaaacggttggttgtttttgaaatgccttttcggtctgatccgccattttcacta

SEQ ID NO: 4027 - DNA, 496 bp, Diabrotica virgifera
  SmartBlast Evalue=3E-67; Info=Ribosomal protein 4 n=6 Tax= Obtectomera RepID=Q5MGJ8_LONON
ataagatttttattttaaaaatgtttcatcactcaaaacttcctgaagctcttctttgaactgctacctttagttactttcaatacgttgaatctaactgtttttgaaagtggtctgcattcaccaattgtaactacatctccaatttccacatccctgaagcagggtgataaatgtacagacatattcctatgcctcttttcaaaacgattgtatttcctgatataatgcaaataatctctacggatgacaatagtcctttgcatcttcattttttggacaactccagtgagaatacggccacggattgatacatttccagtgaagggacatttcttgtcaatgtaagaaccttcaattgcctctctgggagttttaaaaccgagccctacactgcgagaatgtcttaaatttttctttcctccacttttgcggttgagaaaaacggttggttgtttttgaaatgccttttcggtctgatccgccattttcacta

SEQ ID NO: 4028 - DNA, 8020 bp, Diabrotica virgifera
  SmartBlast Evalue=0; Info=Vigilin n=3 Tax=Aculeata RepID=E2B937_ 9HYME
cttcattttctacttggcagtagcaagaccaagtaaaactggagattctacgaagatccaggattttctaggacggattttctgtttttacagtacatgttgctgtaacgacttggcacgaatcaggacaatcccaataaaatgcagcaaccagtgatggaaggcggagcggcctacgagccctctgtaagaagctacgacgatctttttccagctctaccggaatcgaccccacaacagcaaacgaactccagcataggacaatggaccaacaacaagatgagagttggatcgacaacaattacccaagtattcagagttccatacgaagaacgcaaactcgatgttcaaaaattcggcgaaggcgaatcaaatcatatctgcggtaacataatgaaggaaacaggagcccacattgaaatatctcacgctaaagatcagtcactgacattccttgtgactggcaaacaaaatgaagtacttgaagcaagacgaaagattttgacacatttccaaacgcaggcaaatagacaaatatcaatcccaaaagaacaccacagatggattttgggcaagaaaggtgacagattgaaagaattagaaaagactacagctacaaaaatttcagtacctgccatgaacgatccatcagacatccttacgataacaggtaccaaagaaggcattgaaaaggccgaacacgaaattcgcgtgacctccgatcaacaatccaaaaaggcctcagaacgcttgaacatccccagacatttccatcccttcataactggtcccttcaaccaaaacctcaacaacatgatgacagaaaccggtgccaaaatcaacgtacccccaccatccgccaacaaagatgaaatcttcattgctggtgagaaggaaggtgtcatggcggctaaaaacaaaatcgaggatttgtacaaatcgatcgagaagaaattgaagaccgttgcggtggaggtgcccaagagccaacacagatacgtgattggaccaagaggatctacgattcaggagattttgcagactaccggtgtcagcgttgagattccacagactgattcaccaactggtactatcacgttgcgaggcccccacgataaactaggcctagccttgagcgtagtatacgaaaaagccaattccgttcgctccagcgacgtggacgccccctcgtggatccacaagtacatcatcggtcgcaagggtgccaatatcaaggagatcacacaaaacttgccaaaggtccacgtcgagttcaccggtaaggacgacaagatcaagatcgaaggaccgccagaagaagtggaaaaagcacaagaacaactcgaaagcatcgcgaaggaccttatcagtaagatgacctttttggagatgcacgtggatcctagactttttaagcatatcattggaaaaagtggtgccaatattaataaacttaaggaagattttaacgtactaatcaacatagacgagagcggtctggtcagaattgaaggcaacagagacgacgtcgctagtaccagaacagaactagaacaaagaatcttcaagctagaaaacgaaaaagaaaaggacgtaatcatagaacaaagacattacaggaatatcataggtactaaaggtgaaaatatcaaagatataagagatagatttaatcaagtacaaatttacttccccggtccaggagaccgcaatgacatcgtcaaagtgcgaggaccaaaggaggatgtcgataaatgtgccaggcacttggagaagctagtcaaagaacttaacgaatcatggtataaaattgaccttcccatctacaaacaattccacaagttcatcatcggaaaaggtggtgctaacatccgcaaaatccgtgaagaaacccaaaccaagatcgacctgccggacgaaggcgacaaaaacgacaccataacgatcaccggcaaaaaagaaaacgtcgaggaagcctgcgaaaagatccgcaagatccaagacgaattagagaatatcgtaaccgaagaaatcacaatcccgcccaaattctacaattccctcatcggtgccaaaggaaagctcatccactccatcatggaagactgtggtggtgttactattaagttccccacggctgacagtaaaagcgataaggttactatcagagggcctaaagaagatgttgaaagagccaagcagcagctattggatctagccaatgaaaggcaacttgccagttttagtgccgaggtacgtgccaaacctcaacatcacaaattcctcatcggtaaaaatggtgccaacataaagaaaatcagagactcaaccggtgctcgtatcattttccctgccgacgatgacgaagaccgagaagtgatagctattattggcaagaaagaggctgtcgaagaagccaaggccgctttggaagccaaaatcaaggatattgacaatataatagaaagcgtaatgcaagtcgaaccgcgccaccacaaacacttcgtggcccgcagaggtgaagttctgaaccgaatctccgaagaatgcggagaagtgatgatctccttcccccgttcgggcgtcgacagcgacagagtcgtgctcaaaggacctaaggagtgcatagaagcagctaaaaccagaatcaacgaaatcatagcagatttagaatcgatggttactatcgaatgcatcatccctcagaagcaccataggaccgtaatgggttccaagggacgtaaagtacaaatgattacttcagatttcgacgtgcaaatcaaattccccgaaagagacaaccaggaattgtacaatcacgaacaagttaatggagatgtcgatacggagcctattaggcagtgtgatgtgatcaaaataacaggaaaagaaacaaattgtcaacaagccaaacaagctctattggacttagttccaatcacgattgcagtagacgttccattcgacttccaccgttccatcatcggccaaaaaggccgcgacgtgaaagacctaatggacaggtacgacgtccacatcgttctttccgctcaagacatcagggaagatatcatcaagatcaccggtacggccaataatgtcgaagatgccaagcaagcgcttctagacagagttaaagatcttgaagccgacaggaaagacagggaattgaggtcgttcggtttgcaagtcgaagtacctccagagtaccaccccaagattatcggcaagaagggagctgttatcaccaagatcaggaaagatcatgatgtacagatcacattccccaagaagggtgacccagaagagtccatcatcataatcaccggatacgaaaccaatgccaacaatgccaaagatgatattatgaagatcgtcaacgaactcaacgagctagtcaaagaagaaatctccatcgactccaatgtccattccagactgatcggcgccagagggcgcaacatcaggaagatcatggaagacttcaacgtcgacatcaaattccctagggacggggacgccgacgagaacctcgtgatcatcactggccaagaggaaagtgtcctcgaagccaaagatcatttgctcaatctagccgaagaatatttgcaagactacactgaactacaaacccgagaaagactccacacgttgagctcccacttcgaaccacctgcagctcaaaaccacaacgcccatcgcaacagggacgaacccaacaatggcttcgtcgtccaaggcggtccatgggaacagcagagagccgccgctcccaacaccgccagcgtaacggagtttccgtccttcagacgcaacacagaagaaccccaatcttctcctgccccggtagctggggcctggggatcccgccgataaaaacgtaactgacgcatcgctctttccctcctacttttcgtcgaaagatatttttattaattactattgaatgtattcgtttttagtttgatatgttttgatttggttccttggtttactttttactaggtcggttcgataagtactcgtctcctttttgctcgatatatttcacatagcgatgctccatcttcattaatccgtctgaaaaatatgtttttcgatgtctgcaaagtaggctttgaaaacaaaaagaagtcatacagcgctaaatctggagaatacgatggatgaggcactagtttgtagcttaatttgaccaattaggccatgatgacgttgaaggtgtgagccggtgcgttgtcatggtgaaagagcacttttttcgtcaattgcagccgttttttttttcaattcggcgtcgaatcggactaataattcgagccctgtgaccgtttgccccgtttccagtaagtcgatgtagatcacaccttgtgaaaccctggatttcacctttccgaccgataggactgacttcaccttcttcggaaaacgttcaccggttaaagtccactgtttcgactgtttcttggtcgctgttgtgtaccagtagatccatgttcggccgatggttatgaaacaacgtagaaattcctttggattacgcttaaacactgctctgtgcgtcgatagctttttcatgccctatattttatgcaggatatgacccacgcgatcttttgagatgcctactgtatcagctatctcgtgcaccttcagtcggagtcggacttatcgaaaaccgactacggccacgttgaaactcattaaaccaatttttgacggtcaccatcgaaaaaaaagtcacccttcacagcattcatgtgctctttgatttcccttccaatgaaaaacaagaatcgaatcaccgaccaatattgctcttttcatttttctaaaatcctcaaacacacccgcttccacaaatagttgaaacaaaactacaagtctacaagaatgtattactcaatagtagctttctcttgcgatagttgcgccatctggcgctgaggttaagtacttatcggaccgcctacgtactagtttctgttgtggttgatagtttcactttagtttcttcatctctgcggcgtaagatgcgcccaaagcatttaagaattcaagtgtgttgctttaatgtttgagtttctcggttaaatattcacaatttttttctcttttcaacaaaattaaatctgaaagtacacaatgatcactgccaaaaaatatagaataactaagaagcaaatttcgcgatatgagaccgttcctgtaagaaaaatgctagatttcgtatatcttggtctatgaataacattaacataagtatttaataatagatatttcataaaaataaacatcccctgctagatttagagacttttctcgcgaaattgcgaaagagaactaaaaccgaatcaaatgcaacactggcggttaaatttatactcttaacgaagttaaagaacaatcagcaactataatataatctaatgtttactctaatctatataattttgaatatatgattgttaagtcgttgattttcattgtgggttgctgttttcgccgttgacttgatttggccgagctttcgacgcattatgtggagtcatcagtactttcaggacttcaatttaaaaatttttatcttttgttcttctcatttttcatctaaatacaaatatatggtaaaaataaagttatatagatataaagcggtattgtttgagtaaaaacggcaactgtaggtaaaaatctgttaatgattttgaaattgtaattgcattagccgccagatgtcgccatcggtgacagttctcccgactttcgacgaaaggtaggagcgtatcgagcgccgtcaaaagttgaggttatgtttaaaatactaaccttagttgttaagttagttgcgaaccgttgcaactctcttccctcactgtttgctgcattaaaatagataaaatggcctggcgacgtacctggactcgcgaataaaggttcaccgacattgaaactgaataaaaagagagaaaactttgctggtttcttttttctacgatattaatcgatgtcttccgaaacggaggcattgcggcctattaccggcactaaataagtagagatgttatgatgtttataagtttttatgttttttaatttttttgctatgtatgttgtcgctccgagctataatacggttaggtacgtactgtaagcctattttgggcaacagcctgtggacataccaaacaaaagattgctcatgtactatatctctatcactgatatgtatttaattcgaatttatcgtgagtaatctctaaagaacaatactacgacaataaacgatggagtgattctattaaacaaaacaatactttcaggatgatccacgggctggcctacatatcgggacatacactttagatggcaaaaattagaataaatgggcggggggtaagaaattctgtgatattaaaaaatgatttcatgtctacattgaaagtgatacgaaggaaacgttagtaaagacgacgaaatcgactaatgcttttggaagtatactgcgggacactcacaatgcggactagatttaacttcgaaacacgtcgcattccgtcaagtcacatgatctactttgtccgtccccgattttgaaataacacgaaacaacagtgaccgattttcattagtgtgtttggcgacgtgaccctctagtgattgaaatataaactacgttgtgaaaagtgacaatgacagttacatcacttgtcaaaagtgactgacaatggacatttatgtcacttgtcagaagtaattgacaattcaacaaaattcaggcgaaagtttacagtaatattactttatagtccaaataattaaaatatttttgcgtttgcttgatttgagtctgctcggtatggtaaacaaaggcattagaagctgttacaacaataatgggcaacatttttcttttattataactgtctataaaaatgtttattatttacttgttgtggaactgtagtttcctggaatcagtcggagtatgatattatattttgaaaggttggcaacgttatggaaacgtatccaacatcgatgttgccaaatttccaatgtgatctgggattgccgcgcaatctgcacattcttgtcgagtttttgtactaaggggaaacgaaaaatgaaaacgaaaaaaacgatctaaagtgtctggaccgtgtctccatatatgcatacttgtcgcatatcattgtgttatcaatatattttatatttatattttttgaacttttatatatttttatttgtgtcataacttctctgcccctttttttcgaaaaaaaaacaaggcagtgtgatcgtgccttccttacaaatttcatttttttatacgatcgtactaaaattggtgctactatagtatgcggtctacctgtgcatgtgtatagagcctacaaacagttttctgcctttcattattgtatacaaacccttctgagaagagattatggtgttgttctgtagaccgcaagctatagcagaaacgcgacggtagaccgcataccatagtggtaccctaaaattatctcgcccgtaccacctcgatgcggaaaaggaatctcggttgtcttggcctctcgtccgttcctgtgtccagattatattttcatacattgggaaagcgggtctaggatggctcctcggggtacacagattgttaacggaagtttttggaacggaggcgaggcgaacggtactaccgcaggttcttttttcctttgttactggatcatctgtcctgagaggtaacagaatttgtattttataattttttttatttaattatattttaggtatgttaaaactgaacgtatatgatgaaaataatgactgattgtgtattgttgaatccgattcggcagtacttaatacatttgtttgtaaaattttgagttttgctgttaatcattgtatatatgataaatatattattttacagagtccttgaggtcaattttgttagcccaggactaacctgagggagagaatatattaaaaacaaataaaaaatttt

SEQ ID NO: 4029 - DNA, 8020 bp, Diabrotica virgifera
  SmartBlast Evalue=0; Info=Vigilin n=3 Tax=Aculeata RepID=E2B937_ 9HYME
cttcattttctacttggcagtagcaagaccaagtaaaactggagattctacgaagatccaggattttctaggacggattttctgtttttacagtacatgttgctgtaacgacttggcacgaatcaggacaatcccaataaaatgcagcaaccagtgatggaaggcggagcggcctacgagccctctgtaagaagctacgacgatctttttccagctctaccggaatcgaccccacaacagcaaacgaactccagcataggacaatggaccaacaacaagatgagagttggatcgacaacaattacccaagtattcagagttccatacgaagaacgcaaactcgatgttcaaaaattcggcgaaggcgaatcaaatcatatctgcggtaacataatgaaggaaacaggagcccacattgaaatatctcacgctaaagatcagtcactgacattccttgtgactggcaaacaaaatgaagtacttgaagcaagacgaaagattttgacacatttccaaacgcaggcaaatagacaaatatcaatcccaaaagaacaccacagatggattttgggcaagaaaggtgacagattgaaagaattagaaaagactacagctacaaaaatttcagtacctgccatgaacgatccatcagacatccttacgataacaggtaccaaagaaggcattgaaaaggccgaacacgaaattcgcgtgacctccgatcaacaatccaaaaaggcctcagaacgcttgaacatccccagacatttccatcccttcataactggtcccttcaaccaaaacctcaacaacatgatgacagaaaccggtgccaaaatcaacgtacccccaccatccgccaacaaagatgaaatcttcattgctggtgagaaggaaggtgtcatggcggctaaaaacaaaatcgaggatttgtacaaatcgatcgagaagaaattgaagaccgttgcggtggaggtgcccaagagccaacacagatacgtgattggaccaagaggatctacgattcaggagattttgcagactaccggtgtcagcgttgagattccacagactgattcaccaactggtactatcaccttgcgaggcccccacgataaactaggcctagcattgagcgtagtatacgaaaaagccaattccgttcgctccagcgacgtggacgccccctcgtggatccacaagtacatcatcggtcgcaagggtgccaatatcaaggagatcacacaaaacttgccaaaggtccatgtcgaattcaccggtaaggacgacaagatcaagatcgaaggaccgccagaagaagtggaaaaagcacaagaacaactcgaaagcatcgcgaaggaccttatcagtaagatgacctttttggagatgcacgtggatcctagactttttaagcatatcattggaaaaagtggtgccaatattaataaacttaaggaagattttaacgtactaatcaacatagacgagagcggtctggtcagaattgaaggcaacagagacgacgtcgctagtaccagaacagaactagaacaaagaatcttcaagctagaaaacgaaaaagaaaaggacgtaatcatagaacaaagacattacaggaatatcataggtactaaaggtgaaaatatcaaagatataagagatagatttaatcaagtacaaatttacttccccggtccaggagaccgcaatgacatcgtcaaagtgcgaggaccaaaggaggatgtcgataaatgtgccaggcacttggagaagctagtcaaagaacttaacgaatcatggtataaaattgaccttcccatctacaaacaattccacaagttcatcatcggaaaaggtggtgctaacatccgcaaaatccgtgaagaaacccaaaccaagatcgacctgccggacgaaggcgacaaaaacgacaccataacgatcaccggcaaaaaagaaaacgtcgaggaagcctgcgaaaagatccgcaagatccaagacgaattagagaatatcgtaaccgaagaaatcacaatcccgcccaaattctacaattccctcatcggtgccaaaggaaagctcatccactccatcatggaagactgtggtggtgttactattaagttccccacggctgacagtaaaagcgataaggttactatcagagggcctaaagaagatgttgaaagagccaagcagcagctattggatctagccaatgaaaggcaacttgccagttttagtgccgaggtacgtgccaaacctcaacatcacaaattcctcatcggtaaaaatggtgccaacataaagaaaatcagagactcaaccggtgctcgtatcattttccctgccgacgatgacgaagaccgagaagtgatagctattattggcaagaaagaggctgtcgaagaagccaaggccgctttggaagccaaaatcaaggatattgacaatataatagaaagcgtaatgcaagtcgaaccgcgccaccacaaacacttcgtggcccgcagaggtgaagttctgaaccgaatctccgaagaatgcggagaagtgatgatctccttcccccgttcgggcgtcgacagcgacagagtcgtgctcaaaggacctaaggagtgcatagaagcagctaaaaccagaatcaacgaaatcatagcagatttagaatcgatggttactatcgaatgcatcatccctcagaagcaccataggaccgtaatgggttccaagggacgtaaagtacaaatgattacttcagatttcgacgtgcaaatcaaattccccgaaagagacaaccaggaattgtacaatcacgaacaagttaatggagatgtcgatacggagcctattaggcagtgtgatgtgatcaaaataacaggaaaagaaacaaattgtcaacaagccaaacaagctctattggacttagttccaatcacgattgcagtagacgttccattcgacttccaccgttccatcatcggccaaaaaggccgcgacgtgaaagacctaatggacaggtacgacgtccacatcgttctttccgctcaagacatcagggaagatatcatcaagatcaccggtacggccaataatgtcgaagatgccaagcaagcgcttctagacagagttaaagatcttgaagccgacaggaaagacagggaattgaggtcgttcggtttgcaagtcgaagtacctccagagtaccaccccaagattatcggcaagaagggagctgttatcaccaagatcaggaaagatcatgatgtacagatcacattccccaagaagggtgacccagaagagtccatcatcataatcaccggatacgaaaccaatgccaacaatgccaaagatgatattatgaagatcgtcaacgaactcaacgagctagtcaaagaagaaatctccatcgactccaatgtccattccagactgatcggcgccagagggcgcaacatcaggaagatcatggaagacttcaacgtcgacatcaaattccctagggacggggacgccgacgagaacctcgtgatcatcactggccaagaggaaagtgtcctcgaagccaaagatcatttgctcaatctagccgaagaatatttgcaagactacactgaactacaaacccgagaaagactccacacgttgagctcccacttcgaaccacctgcagctcaaaaccacaacgcccatcgcaacagggacgaacccaacaatggcttcgtcgtccaaggcggtccatgggaacagcagagagccgccgctcccaacaccgccagcgtaacggagtttccgtccttcagacgcaacacagaagaaccccaatcttctcctgccccggtagctggggcctggggatcccgccgataaaaacgtaactgacgcatcgctctttccctcctacttttcgtcgaaagatatttttattaattactattgaatgtattcgtttttagtttgatatgttttgatttggttccttggtttactttttactaggtcggttcgataagtactcgtctcctttttgctcgatatatttcacatagcgatgctccatcttcattaatccgtctgaaaaatatgtttttcgatgtctgcaaagtaggctttgaaaacaaaaagaagtcatacagcgctaaatctggagaatacgatggatgaggcactagtttgtagcttaatttgaccaattaggccatgatgacgttgaaggtgtgagccggtgcgttgtcatggtgaaagagcacttttttcgtcaattgcagccgttttttttttcaattcggcgtcgaatcggactaataattcgagccctgtgaccgtttgccccgtttccagtaagtcgatgtagatcacaccttgtgaaaccctggatttcacctttccgaccgataggactgacttcaccttcttcggaaaacgttcaccggttaaagtccactgtttcgactgtttcttggtcgctgttgtgtaccagtagatccatgttcggccgatggttatgaaacaacgtagaaattcctttggattacgcttaaacactgctctgtgcgtcgatagctttttcatgccctatattttatgcaggatatgacccacgcgatcttttgagatgcctactgtatcagctatctcgtgcaccttcagtcggagtcggacttatcgaaaaccgactacggccacgttgaaactcattaaaccaatttttgacggtcaccatcgaaaaaaaagtcacccttcacagcattcatgtgctctttgatttcccttccaatgaaaaacaagaatcgaatcaccgaccaatattgctcttttcatttttctaaaatcctcaaacacacccgcttccacaaatagttgaaacaaaactacaagtctacaagaatgtattactcaatagtagctttctcttgcgatagttgcgccatctggcgctgaggttaagtacttatcggaccgcctacgtactagtttctgttgtggttgatagtttcactttagtttcttcatctctgcggcgtaagatgcgcccaaagcatttaagaattcaagtgtgttgctttaatgtttgagtttctcggttaaatattcacaatttttttctcttttcaacaaaattaaatctgaaagtacacaatgatcactgccaaaaaatatagaataactaagaagcaaatttcgcgatatgagaccgttcctgtaagaaaaatgctagatttcgtatatcttggtctatgaataacattaacataagtatttaataatagatatttcataaaaataaacatcccctgctagatttagagacttttctcgcgaaattgcgaaagagaactaaaaccgaatcaaatgcaacactggcggttaaatttatactcttaacgaagttaaagaacaatcagcaactataatataatctaatgtttactctaatctatataattttgaatatatgattgttaagtcgttgattttcattgtgggttgctgttttcgccgttgacttgatttggccgagctttcgacgcattatgtggagtcatcagtactttcaggacttcaatttaaaaatttttatcttttgttcttctcatttttcatctaaatacaaatatatggtaaaaataaagttatatagatataaagcggtattgtttgagtaaaaacggcaactgtaggtaaaaatctgttaatgattttgaaattgtaattgcattagccgccagatgtcgccatcggtgacagttctcccgactttcgacgaaaggtaggagcgtatcgagcgccgtcaaaagttgaggttatgtttaaaatactaaccttagttgttaagttagttgcgaaccgttgcaactctcttccctcactgtttgctgcattaaaatagataaaatggcctggcgacgtacctggactcgcgaataaaggttcaccgacattgaaactgaataaaaagagagaaaactttgctggtttcttttttctacgatattaatcgatgtcttccgaaacggaggcattgcggcctattaccggcactaaataagtagagatgttatgatgtttataagtttttatgttttttaatttttttgctatgtatgttgtcgctccgagctataatacggttaggtacgtactgtaagcctattttgggcaacagcctgtggacataccaaacaaaagattgctcatgtactatatctctatcactgatatgtatttaattcgaatttatcgtgagtaatctctaaagaacaatactacgacaataaacgatggagtgattctattaaacaaaacaatactttcaggatgatccacgggctggcctacatatcgggacatacactttagatggcaaaaattagaataaatgggcggggggtaagaaattctgtgatattaaaaaatgatttcatgtctacattgaaagtgatacgaaggaaacgttagtaaagacgacgaaatcgactaatgcttttggaagtatactgcgggacactcacaatgcggactagatttaacttcgaaacacgtcgcattccgtcaagtcacatgatctactttgtccgtccccgattttgaaataacacgaaacaacagtgaccgattttcattagtgtgtttggcgacgtgaccctctagtgattgaaatataaactacgttgtgaaaagtgacaatgacagttacatcacttgtcaaaagtgactgacaatggacatttatgtcacttgtcagaagtaattgacaattcaacaaaattcaggcgaaagtttacagtaatattactttatagtccaaataattaaaatatttttgcgtttgcttgatttgagtctgctcggtatggtaaacaaaggcattagaagctgttacaacaataatgggcaacatttttcttttattataactgtctataaaaatgtttattatttacttgttgtggaactgtagtttcctggaatcagtcggagtatgatattatattttgaaaggttggcaacgttatggaaacgtatccaacatcgatgttgccaaatttccaatgtgatctgggattgccgcgcaatctgcacattcttgtcgagtttttgtactaaggggaaacgaaaaatgaaaacgaaaaaaacgatctaaagtgtctggaccgtgtctccatatatgcatacttgtcgcatatcattgtgttatcaatatattttatatttatattttttgaacttttatatatttttatttgtgtcataacttctctgcccctttttttcgaaaaaaaaacaaggcagtgtgatcgtgccttccttacaaatttcatttttttatacgatcgtactaaaattggtgctactatagtatgcggtctacctgtgcatgtgtatagagcctacaaacagttttctgcctttcattattgtatacaaacccttctgagaagagattatggtgttgttctgtagaccgcaagctatagcagaaacgcgacggtagaccgcataccatagtggtaccctaaaattatctcgcccgtaccacctcgatgcggaaaaggaatctcggttgtcttggcctctcgtccgttcctgtgtccagattatattttcatacattgggaaagcgggtctaggatggctcctcggggtacacagattgttaacggaagtttttggaacggaggcgaggcgaacggtactaccgcaggttcttttttcctttgttactggatcatctgtcctgagaggtaacagaatttgtattttataattttttttatttaattatattttaggtatgttaaaactgaacgtatatgatgaaaataatgactgattgtgtattgttgaatccgattcggcagtacttaatacatttgtttgtaaaattttgagttttgctgttaatcattgtatatatgataaatatattattttacagagtccttgaggtcaattttgttagcccaggactaacctgagggagagaatatattaaaaacaaataaaaaatttt

SEQ ID NO: 4030 - DNA, 7767 bp, Diabrotica virgifera
  SmartBlast Evalue=0; Info=Armadillo-1 n=1 Tax=Tribolium castaneum RepID=D6X202_TRICA
aattaaatctattaaattacatgcagtattaaacgaaggcagtgcctttatttgatgtaattaacattctaccctgtatacggaaaaacgtttagaataattcatacagaaaagaaattaaaattgtgcgaaagacgaaagagtagggagacattttcgttcccaaaaacaaaacatatttgttactgataacttatcactatcaaaaaaagctatttcctattgatacatatttttattctataaatactgtctttcttacttaataattaagtttctacgacacaaaattattaatgataaataatttagaacaacgtttcacctttatccaagttgtttcatcaacaacaaccgacttagtgaaatatgttggataagataaaaaagtcaagttgctaaaattaaatgcatcgcgccactaaggggaagaaattataaatatgcagataaaaattatctggagaaaatttcagtcaatacttagtgtcatttctatgatccagatatttttatcggctatgtcaaaaagaatccaacattacgatatataatagataaatataatcctatagattgccacaataaaatggtagataccttccttaaaaactaatataaaacaattaagaacagtgtaaatagctgcatcttttaatgtcatcataaagaactgatccatttgtacgtagaggtttttatccaaaacaattattggtaacatattcttacaattatttaaacttaataagctctttcaactgtgacgtaacatgagaaatgtcgctatcgaatcacgcgaaacgtcgaatgacaagaatttatttgttgacaaacaatgagaacgaagacaatgaaatcttatatcctctttctcaacaaagaatgtctgtacgtagcttgatgtgtgacaaattcgcttctaaaattttactgtattaagcaaaaaacccataccaagtttttgttctgttccagttgtttttgtttctgttccatattttagaacaattgcgcactcgtttgaatgattagtaaaatgcttattgtttctgtgcatataaaatttaaaaggtatttgaaatgttttaaatgggaatattaaaaatttctttagcggatccttcaatggacaaaattaaacccaaaattttaagaaaacagttttattcttgtaatctgaaaattggtatggtgcttctcacgagacagaaaaaaaaggtacctccgtgagtatacacatttattctagttgttgatagatgacgctataatcgaaaaaaaaaattacctaactacaataagttctcctcagagccttctttcaatgttgtcattaattttcagcgcaagtactgtttactgattacaaggctgcttacgatacaatagacagaagtaaagtaatagaaacactaaaagagttccaagtgccaacaaaaatcataagattagtaaaaatgacacttagaaaacccatttgtgctgtaaaatgcaatggtacagtttcagaagaatttgaagtgaaaaggggggttcgtcaaggagacccattgtccactttgcccttcaatatggccctggaaaaagttgcgggggatagtgggataaatagggaatgatagtgggaacccttttctacaaggaacaccaatgcctggcgtatgctgatggtgtggttcttattgcacgacgtggagaagaactggtaagtgcggcaaaaaggctttctggctagcgctaagatcggactgagagtggatatcaataaatccaagtacatggaaattccttcattcattaagcattacaatccctggggattatagctaacgccatggattatcgcgaccctcttggattatcgcgacaacgaatattttactgtgcaaaatatgaagaacgaaagtaaattgcaaattatattgttgtttattggagtaattattagagcaaaatactttcgcacttcttatgtagcacactaaattattcgttgtcgcgataatccgaaacagtcgtatattaatggaatacaccataaaatccaattcttgggttaggtggattactcctgtcttttagaacttgctgtgtgcctttgctgttctcgtaactcttttccatttcttagtgtccttgcactgaactttccagtctttcacattaattgctcttatgtcttcttctacatcatccagccatcttctactgggtcttcaactacacctgggccatagtggtgtccagtgagttatccttctcaacatatttgattgtgggcgtctgtttttataatataatccgtgattggagcagtagccactttctgtcactagctgttgcgttgagtaaatttaagacttatttagtatgcttttaattatgacgcacgggtaaagaaccatggactcaaatgtagatatatacctgaaacattccaatcttgtctgggaatgaatttaatctcgtatgtctttaacgaccttatacaaacataaaaatgccgtattaaaggtttcacaatattatccaaaagataaaggttgtattctagaaggtgggacatttaaattttctcctttttggaaattttctggagccagtatatacattctaagtcatatcgttctatcaagctggatttaaagacgcattctcctcaactttaacttgttatcttattcactataaaataaaaccttttccgattctgtgtacttccaaaatatatctgtggtataatctaaaattattacataataatatattgtcaagagtctcatatgctgcgatatattgtcaagagtctcatctatttgggtacacttagtgatcagacatgtaaggaagaaacagaaatccagttaaggctgaccaacgagtaatagatgcgctgctgggggctatgaacaaaataattaaggctaaagaaatatcacgcaatacaaaaatacgagtatacaaaacgataatgagacccacaatgctatacggggcagagacgtggattatgaataaaaccatacagaacagattggaagcctggcaaagaaaaatacttcacagaatatttggcagaaaagtagttgagggagaatggagaagacgaacgaactaagaagtgtacaaactgtatggtaatctgccgatatcaaaaatagtgagaaaacgcagactagaatggctcggtcatctagaaagaatgaaggaatttctatgcctcgaaattcttccggtaacttatttaaaatgggcggacatttttttacattcatctgtcagatgcaaataaattacacgttttttagttaaaccatcaattaaagacataaaaacgattattctttttaaaacgaccaaaaagctttaatggcgatcatacgcagtaaccgaaaagtaacccacttatccttggatatctacaaacttttcttgcatggcctgtgagagtatttttaattatgcataataaatatggcatctcatttgatgattgttttaatttagaaactgctgttacagccaggtcgaacttgtaggccacataaaccatacctttaaaatattctattaaaatattctataaatcatatttaatctgtaatatgaaaggtttaaaataatgattagttagtcgaaaatttacatcagtttccataatttgcttacgctccttaaatgtttttagactcccaaaatttgaattgatgtgtcaaacatttattttgactaaaacatttgcgcatttctttcgtttcaaagtttaaaatttggccaaaatgtagaatttcgcaactatcttcctctaatgctctttgtattttaagactcattcactggaaaatgttttttaaacgtgagttcaaataattcagctgtttcgcgggtcggagaacaaaataaataatcaccagcaatgcgatgtattctaaaaccatttgtcataaattattgtaaatgtttttgctctaaaatgctaaggtaaagactacacagagcggcagaaaaatgatccccttgaaggagaccgtgaatccactgaaatttattctttagaataaataacgttctgattttccacgtgatgaatcaaaaatcatttttttgagtctagaaagttgctcgctctgattacttgacacaagtgtttggtatcggcgttaccgtaagcatcttccaagtccattttaattccatacaagtatttgttatggtacgtatttgcagtggattcccaaaacgaaaacacgttgcaagatgaagttgtactaaatgttggctaaatcccttttttttgtgataggagtttgaatttccgtacggtttctttggtaattgcattggcgtacatgattggtttatagttgagactggtaaactggttaaaaacacttgaaaggatttaaaaaagaaccactgcttcgatgaagagtgcaaaaaagctaaaaaaagatgggagtggagatttggagaagagcctaggagaataccagggaggatttcggaaagatcaacaaccgaccaaatttttatgctgaaacaaatcctgatcaatggctatgaatacaacattccagtaattttaacgtcatatacgattttaagaatgaagagaatcattgaatgacattttagttaaatctgacagttgtcacaaatcaatcgtgtttattgcatttataaaaagttctgttctttgacgtaaatcatttttttattatagcgccatctatcatcaactagaataaatgttataaatgtgtataattgcggacgtaccttttttctgtcatttccaacttaatgcattagaaagaaatggaaaaattgtatatagaaaaagtatatatgaaatatctaagaaaatggatttaaagtgacaaaacagttaaaccataatacaaaaacgttgttttgtaatgtcgatatgtaacttccgcagagggcagttacctctgaagtattttaccctttgataatataaaaaaaaacagaggcaatataacttctcatctttgtctattaaatttattatgacagtatctcaattctctgatgagtataattcggaaaagcctcatcttcaactgcttcaattctttataatgaacatctagcaccactaatttataaaacaatgaaaaactacatgtactaatattactaaaaatgaaaaaatatcgaattatctcgtaacaaaatataaacgaatattagaaatgaatgatttacaggtctgtatcgtaccaagctgcggcgtggttattatcttgaggaggggtgggaagttgatcaatagtatcgaagttaagatccggatccccgctggtaacatccatggcgtcgattgcgctataggtcgacccatttccgcctccatgggagccaatatctagaccttgcatatctatgggtatctggtcatacccttgttgctggtaaggcctaccgccgtggctgctatgaacactggggggaccttgtgcatacatattgtcgtaagcttgatctggactcaatatatcctgtaaatcagggcccatccctaggtctggattccagaggttctcttctctaaacaaggagttcgttaactccatagacagtcgtttcttatagtcctgcggtttatcttcactcattctgaataaaacagctgctgcatatgtagcaacaccttcatttcttgaatgtaaaagctcagtcaagggtgcagtggctccttcttgttctatcatctcagctccttctttatcagctgctaattcacaaagcactcctgctgcaacacgttggatgttttcaatatcattaaagagcagctgcacaaatatcggtacaaccatctgctgtcttattatggcacgattatgggactctcttgacagaatgtgaagagctcccactgtaccctccacaatttcttccattctcacaccatctgcgtatgtgccaggaggttggctgccgccactcgcaacacttgctctttgtctctgtgtatcttggaaagctctcatcaacagttgtacaagatgatgtatggcaccatgttctctcaatggggcatgattggcaggacataaagccaaatttctgatcaaaccaatcactgctttcaccaatggccaacgggaaggtgggttcaacagttttactataatctgcatgccgtagttgagtctaacagcattctgtgccatttctgattccacatgtctggatgtcaaatgacgcagtgcacaaacagctggttccgtgatttcttctctatctcctgcactgactatagtgcgcacaagtgcatcaactcctcccacttggcacacagttactttattgcgctgattgttacaagtcagattggaaaggataccagcagcacatgtcactacattgacatcagaagatgctaatacttgtaccaaagattgcaataagctttctagaccatcaacttttgtagcagcatctgatagatttcgcaatgtccatagacaattttgaaccaatcttgtgcttggatttcccaagtgcattgccaaagcttgcattcctcctgcttcaactatagcaggtttgttactggcacaaactgaaagaactttcagaactctagaagtagtccacaacaacttctcataatcgtaagatctcatgattctgaccaattcaataggtccttgacttgccaaaatgatcaacttgctctcctggttaccataagccaaaatttgtaagcaatcagttacaattgacaaaaatttgacatggtttctttggagtagtgcaaccatcttttgcaaaccacctgcaagtctaacagccatctttgatccatcttgatgtaataaaaggttgtgaagggtggttatagcatagacaagaacactttctacaggagaactgagcaactttacaagtgctggaatacctccgcttttaaaaatagcaagtaaaccttgtctgtggtgtgataacttgtgtagggtaccaacagctcctttggtagtctctaagtcattagagtttgatatagctctcactaaggcagctaccatttgaggactgttcataatagcatgtctagatgcttccttcttagatagttggtggaccatcatagctgcctgggatactactacttggtcttcatcattaaggagcttgatcaattctggtatggccctggttgcaaggtcagcatcatcttgatagttaataagattaactacagcatgcttgagcatttgactaggttctgccagacgttgaactgctgtttgatgattaggatcaaactgtgtggaagggatttcaataccttcatccaaagtttcaggaaacatggcagctctaactctttgggacctagtatgattcagttgattattcatgtcatcaacttgctcttgtgtaaaaccctggtagggttgatccaaatcaaacagatccatttcttcctcctctttacctgtcagtgatggaacctgtgtagcagccccagactgaatgccagagtctcccatgtatgaattctgctgccatagtaaagtctgttctttagaagactgcatgggcaggtcattaggaccctgatggtagctttgagacattggtctattttggttagactgcatgtaactcatggtgatctggtgagattgtcacaccttacaccaaaaacacaatagtttatactatttttcactttaacttttactcacaatttacaaaacacaccgcaccccaatttacagagct

SEQ ID NO: 4031 - DNA, 5148 bp, Diabrotica virgifera
  SmartBlast Evalue=0; Info=Armadillo-1 n=1 Tax=Tribolium castaneum RepID=D6X202_TRICA
aattaaatctattaaattacatgcagtattaaacgaaggcagtgcctttatttgatgtaattaacattctaccctgtatacggaaaaacgtttagaataattcatacagaaaagaaattaaaattgtgcgaaagacgaaagagtagggagacattttcgttcccaaaaacaaaacatatttgttactgataacttatcactatcaaaaaaagctatttcctattgatacatatttttattctataaatactgtctttcttacttaataattaagtttctacgacacaaaattattaatgataaataatttagaacaacgtttcacctttatccaagttgtttcatcaacaacaaccgacttagtgaaatatgttggataagataaaaaagtcaagttgctaaaattaaatgcatcgcgccactaaggggaagaaattataaatatgcagataaaaattatctggagaaaatttcagtcaatacttagtgtcatttctatgatccagatatttttatcggctatgtcaaaaagaatccaacattacgatatataatagataaatataatcctatagattgccacaataaaatggtagataccttccttaaaaactaatataaaacaattaagaacagtgtaaatagctgcatcttttaatgtcatcataaagaactgataaatttgtatgtggaggtttttatccaaaacaattattcccacttattctttgtatatctacaaacttttcttgcatggactatgagagtatttttgaatatgcgtaataaatatggcatctcatttgatgattgttttaatgtagaaactgctgttacagccaggtcgaacttgtaggccacataaaccatacctttaaaatattctataaatcatatttaatctgtaatatgaaaggtttaacataatgattagttagtcgaaaatttacatcagtttccataatttgcttacgctccttaaatgtttttagactcccaaaatttgaattgtgtgtcgaacatttattttgactaaaacatttgcgcatttatttcgtttcaaagtttaaaatttgtccaaaatgtagaatttcgcaactgttttcctctaatgctctttgtattttagactcattcactgaaaaatgttttttaaacgtgagttcaaataattcagctgtttcgcgggtcggagaacaaaataaataatcatcagcaatgcgatgtattctaaaaccatttgtcatacattattgtaaatgtttttgctctaaaatgctaaggtaaagacaacacagatcggcagaaagatgacccccttgaaggagaccgtgaatccactgaaatttattctttagaataaaataaagttctgattttccacgtgatgaatcaaaaatcatttttctgagtctagaaagttgctcgctctgattacttgacacaagtgtttggtatcgacgttaccgtaagcactttccaagtccattttaattccatacgagtatttgttatggtacgtatttgcagtggattcccaaaacgaaaacacgttgcaagatgaagttgtactaaatgttttggctaaatcgcttttttttttgtcgtgataggagtttgaatttccgtacggtttctttggtaattgcattggcgtacatgattggtctatagttgagactggtaaactggttaaaaacaactgaaatatttaaaaaaaataaccactgcttcgataaagagtgtaaaaaaagctgaaaaaaaaagatgagagtgaagatttggagaagagcctaggagaataccagggaggagttcgtaaggaaagatcaacaacctaccaaacttttatgctgaaacaaatcctgatcaatggctatgaatacaacattccagtaattttgacgtcatatatgattttaagaatgaagagaatcattgaatgacattttaattaaatctgacagttgtcaggtcagaatcgtaatcagccaaatatgaaaaccattttatttgcaatttggtataaacagaaatcaatcgtgtttattgcatttataaaaagttctgttctttgacgtaaatgatttttttattatagcgccatctatcattaactagaataaatgtgtataattgcgggcgtaccttttttctgtcacttccaacttaatgcgttagaaagaaatggaaaaattgttacgcactgaaagaaggctctgaaaaaaagtatatatgaaatatctaagaaaatggatttaaagtgacaaaacagttaaaccagaatacaaaaacgttgttttgtaatgtcgatatgtaacttccgcagagagcagctacctctgaagtattttacctttgataattaaaaaaaacagaggaaatataacttctcatctttgcctattaaatttattatgacagtatctcaattctcttatgagtataattcagaaaaacctcatcttcaactgcttcaattctttataatgaacatctagcaccactaatttataaaacaatgaaaaactacatgtactaatattactaaaaatgaaaaaatatcgaattatctcgtaacaaaatataaacgaatattagaaatgaatgatttacaggtctgtatcgtaccaagctgcggcgtggttattatcttgaggaggggtgggaagttgatcaatagtatcgaagttaagatccggatccccgctggtaacatccatggcgtcgattgcgctataggtcgacccatttccgcctccatgggagccaatatctagaccttgcatatctatgggtatctggtcatacccttgttgctggtaaggcctaccgccgtggctgctatgaacactggggggaccttgtgcatacatattgtcgtaagcttgatctggactcaatatatcctgtaaatcagggcccatccctaggtctggattccagaggttctcttctctaaacaaggagttcgttaactccatagacagtcgtttcttatagtcctgcggtttatcttcactcattctgaataaaacagctgctgcatatgtagcaacaccttcatttcttgaatgtaaaagctcagtcaagggtgcagtggctccttcttgttctatcatctcagctccttctttatcagctgctaattcacaaagcactcctgctgcaacacgttggatgttttcaatatcattaaagagcagctgcacaaatatcggtacaaccatctgctgtcttattatggcacgattatgggactctcttgacagaatgtgaagagctcccactgtaccctccacaatttcttccattctcacaccatctgcgtatgtgccaggaggttggctgccgccactcgcaacacttgctctttgtctctgtgtatcttggaaagctctcatcaacagttgtacaagatgatgtatggcaccatgttctctcaatggggcatgattggcaggacataaagccaaatttctgatcaaaccaatcactgctttcaccaatggccaacgggaaggtgggttcaacagttttactataatctgcatgccgtagttgagtctaacagcattctgtgccatttctgattccacatgtctggatgtcaaatgacgcagtgcacaaacagctggttccgtgatttcttctctatctcctgcactgactatagtgcgcacaagtgcatcaactcctcccacttggcacacagttactttattgcgctgattgttacaagtcagattggaaaggataccagcagcacatgtcactacattgacatcagaagatgctaatacttgtaccaaagattgcaataagctttctagaccatcaacttttgtagcagcatctgatagatttcgcaatgtccatagacaattttgaaccaatcttgtgcttggatttcccaagtgcattgccaaagcttgcattcctcctgcttcaactatagcaggtttgttactggcacaaactgaaagaactttcagaactctagaagtagtccacaacaacttctcataatcgtaagatctcatgattctgaccaattcaataggtccttgacttgccaaaatgatcaacttgctctcctggttaccataagccaaaatttgtaagcaatcagttacaattgacaaaaatttgacatggtttctttggagtagtgcaaccatcttttgcaaaccacctgcaagtctaacagccatctttgatccatcttgatgtaataaaaggttgtgaagggtggttatagcatagacaagaacactttctacaggagaactgagcaactttacaagtgctggaatacctccgcttttaaaaatagcaagtaaaccttgtctgtggtgtgataacttgtgtagggtaccaacagctcctttggtagtctctaagtcattagagtttgatatagctctcactaaggcagctaccatttgaggactgttcataatagcatgtctagatgcttccttcttagatagttggtggaccatcatagctgcctgggatactactacttggtcttcatcattaaggagcttgatcaattctggtatggccctggttgcaaggtcagcatcatcttgatagttaataagattaactacagcatgcttgagcatttgactaggttctgccagacgttgaactgctgtttgatgattaggatcaaactgtgtggaagggatttcaataccttcatccaaagtttcaggaaacatggcagctctaactctttgggacctagtatgattcagttgattattcatgtcatcaacttgctcttgtgtaaaaccctggtagggttgatccaaatcaaacagatccatttcttcctcctctttacctgtcagtgatggaacctgtgtagcagccccagactgaatgccagagtctcccatgtatgaattctgctgccatagtaaagtctgttctttagaagactgcatgggcaggtcattaggaccctgatggtagctttgagacattggtctattttggttagactgcatgtaactcatggtgatctggtgagattgtcacaccttacaccaaaaacacaatagtttatactatttttcactttaacttttactcacaatttacaaaacacaccgcaccccaatttacagagct

SEQ ID NO: 4032 - DNA, 6450 bp, Diabrotica virgifera
  SmartBlast Evalue=0; Info="Myosin VII, putative n=1 Tax= Pediculus humanus corporis RepID=E0VVF2_PEDHC"
ttgtctatcccatccgttcttgtcgaagaaaatctgtgtacgacgtaatgaggtcgtccattttgtatccctgcgacgtttcgcataatattttcgtccttctcatgatatttcccacggtcatatggaagtatgcgtttccggatgaccagttgctcagttcggagtattcgtgtgtagccaagatatccttagtttgtggatgtataatgttaactcctctcctgttgatggcgatgataataacatctggataagtgggttcagtggtttgcttgacttcaaagaaggccgatccaaaagtaggccacttgtaggtgatattcaagaactcagtctttgcttgttcagacgtcaacttgagcaacttatactcggataatatactctttctccaatccgaagaactagctgccttgatgatgtctgctggtaggaggtccttaatgttatgctgcagtgtggagttagcctcagacgcattgttttcaaatcttgcccttaaaatcaaactggccaattttatggcatcctgcttgctacatttgtggtagcctttaagatacttcggaagttcttgatggtagtggaagatctggtctgcgtagtggtctttctccgggtaagtgcctacccaaactttcttcatgaagaagacttggtattgggcctgtatttgagtggcacttccccagctaggtttggtttgcttataccaactgatcagctcgctcaaaaaatcgtagaagaactgatcttgtggaactgagaacactctatctgcaatagctacgaataagctaaaaccatcggtagacttcagttccaatctagttccaatatgtttacacaagtccactgcacgtgtggaggaatcaatcttgaaggcttcgtcagtgtcgtcggggaagtacactttgtggaatatctccatgctcttgtgttggattgcttctacttctattgtgtgtggtgggtatttcctggatcccaccttttgtgtcttctgcaacctgtctaaacagtgttccacaaatggatgagttctggatttcaggaatttctgcaattctccgtagagtttgtcgctgggcaaatacaacccagttatgaggtacatcaattcccaacctctttcttcacttagtgagagtctattgaatgtcagttgtttcataatttgacagtagacttcatctttcaacagctcgttcttaagaggaccttcaaatatttgatttgtatattcattgatatattttgcttttggcgctggcaagtctcccatgtatttcaaaattgcagtaaagatattgcaggcttctttgctagcttcatcgtctgccagcagcctcttcagaagcggctggtaaatgggctcgttggaatatttccacacttcctccctagaggttcttctagctgccatcaatatagtcgatttattctgcgacactgatttgccagctctgaagttttcttcggcgtagtgagacagcgtgtagagtttcatcctttgtgctgtcgtgactatagtttctggttttctctctgtcacaacgccgtctttcttgaagcaggcgaggatatctgcaggaggtggctgtagtgttgggagaatgtagacgttttctgtggggaaatcgccggattttccgttgcattctccgtatccccaggaggctgtcattaatgtttcgccggtttggccgtttcctagtactattaaatctcctttgcgaagagataggaatgattctgcacctactgaatgagaatagtcggcagtacatacacaatacactgatctcttctttaatccgtccaaaatgtattgtagcaaattgctaagggattgtgcgtctaaagtatggaaagcgtattcttctctagctacggtatttaggataaatttcagctgatcagtcttctcgtaagtgacgaaggaaacgtcagcaaaggtgagctccatatggatctgttcttcgtcatcgatcatgaatataccggcgctgttgaccgctatgatcattttgttcttgggtaacgaaggtccggaagtctgaaccgcttcaaagaatttggagaacaatatgggccacgtcatttgagcgtatttaaccatagtctccttagctttgatcgaaggttgtttttgcttaacacatgctaaattaataaacgcagaaacgattttgttctcccaattggtcaagtcgttttggcttctcttcaccaaatatgtaggcaagtactctcctatcctcgaatgcagagctttctggttgattggagctccgttctctacgtaatactgaatggctatcaagacagctatgtcaccttctttgggacaccgatattcgccgaatttgactccacggacgatttggtggtagatcaaattcgtggccatggaatcttcaactggattatgccagggtgtaaatatttctttgcggagtagtaaacgccatgaggcgtttctttcctgttgtccttgcactttgacgtattgttcacattgtgatatggcgtccataacgtggtctttttcactacccaatgacattaccatcttgtcaagagatacatatatggagaatccaaaagtgtccttcagttttagagctgttgcaatttgggacagaatctcctcggaagtagaagctgaatcagcctcaactttatgactagttccatccataagatccacttccaaatttatgggttccttgtttttggtggccataagctccaaccagctgggaggatgcgacctgcagccattttggatggttctgtttagtcttccttcacagtaaggcgcatatcccggaggacctgacctgataaagactcgtagatatttggtgaacctttctgaaggcacgaagcaaccgatacaaagggacaagagtatccaacctctggcgtaagaggatttgatgtagttgttagtaagttgtttgcagatcatcgcgaaaatttcatcccttagttcggaacgcaaaataccatgcgcaataatgaaatgcaacttttcaaggttattcgtccgacgtttgttcaaccactcatcgtaccgatcagtggcaaaactgtcctcaaccaaacctttccgcacgtcatcaagaagcttagattttttcttcaaagtcaagtgaagtagtttctgtcgttctgattttttcatcgacgcatatttcctttcgtcgacaaggatttcctgatattcttttctgttcgtgaaactcctacttaaagtctctgagacaatgttcattatcgattcattacctttaatggaatcatatttgggctcaggataatctcccataaacctgagaatggtcaaccatatggcttgagcagcaataacatcatcgggagtgggaaggtaatgcaaagattccttgagtggtttcttggagaattggtagttgactgagctcgaaaaatacgttgcagcgtatttgctaaagctgtactcgttgaaatcgatgtttttatctatgattatcgttttttcaatagtaggtgtcaccatctctttcttgtcaagaacctgttccaaaaatctaaacgtgtcatcaatggtatcaccatctttcttctcctgtaactctttttctcttttgagtttttgttgcaactcatcttcagccataagtttagcagcgtaatcactgtctagttgagcaagctgcattttcatcttagcttcagcttcgtatttatattctttcactccttgtttctgcagtatcttttcatctatccttctctgcttcacaatagcgtatatcttacttattttgctcttgtctctagacaagaagcctctacatctagcttgaatggtagtgatattcttcttgaccctaacaaaagcaaacgtcagttgtctagaagctatacaagcttgcagtctcttgtatccgtttcgcatgatcaagaatttctttcggtaacctctagctctaaagtacttttgaatgactaacgcagctttcttcattttgaggaatcttcgtctgtggacccatccacgaattgctcgttgaaggatctttactgaattatccaaaacaagagtgcgttgatgctccaaatggtcatgctcgtgttgtttgaggaaaactttggtattacctagttggtagtgtttctcgtctttgaaaacttccgacagaatcttctctgccgaatttttgcagtcgcctttggtagacggttttatatttttgcctaagtatcgaaaccggtcgacgaactctatgtagctgtagcggatagggtatccagcttggcggattttcgcggtgtccatcatgccagagtaacggagttgcctcgtacaaagtactttatcgaaatcttgaggttttttgtgatgattcggtttaatgcaccttacgaaaaacggatggcaggttcctaaagttttcatcaacgagtctagagagcttctaaattgagaagaaagtgtcttcttgagtttgttatcttgttcgtttttaaacagatctttgaacatcggattctgtgaactgaggataaggtttctcaagtcttggctgaaagagtccctgtttttctccaaaaatccttctacatcgtaaaaaacttctcccgcaaaatgttttataccaaacgccggagtcatctcactttttggtttgcagtagctgtcattaccgccatgttgtttatgcagcttggccaacagcgagaaatccgtacctttgggaaatttggcttcctcgtctatgagagaaaagatactcatcggtttcatggccatcatatccaaaatacactggttatcagtaaacgtgatgttatcccacctaattccctctttcttgtagtattcctgctcaagtttgaagatgtgttgaacgaagaattgctgcaggttttcgttggcgtaattgatacacgtttgctcgaagctgttgatggtaaaattctcaaaaccgaagatatctagcacaccgatactggatttattttgccctttattattggaaatcacactgttaattttctctacgatgaaaatgaacatctggccgtatatgcctttaacaaaggcatgccgagaatctgaagcttgttgtttggttagtgttgaagctatttgctctccttgtgcgtagatagtccttttagttaacgcttcgcccagatcaaatttattaacactcagtagcctagctattcgttccccggcactggcatcagctagctctgaactttctgaatgagccgcctggccgcttttgaatttcaggttgcccagatgtaatatagctgctagtagttgtaaaacgtcctcaacctccttttcggtaaaattaagtactttgaaagcagccgttatatcggaccattccttttcttcgtttctaccttcgcaagtaaatgtttttcctaatctcaaatattcatatgattcggcgctacccaattctagacgtttcttcttctccttcgccattcccgccaacatactataaaatatatgatagtttctttccccttcggcttgggatatcagccgactcttctccaaaagatactgatcgatgacagcgccttcaatgccccccgttttgttgaattttatgtcgatgtatttcccgaaacgtgaggaattatcgttcctgacagttttggcgtttccaaaggcttctagaatgggatgcgcctccaagatctgctgttctatccagttatgttgagcgcttgttgaagctaagtattgaaggatcagttttgtactctctgtttttcctgcaccactttctccactgattacgatacactggtctcttttggtgcttatcatattgctatagctgttgtctcctactgcaaaaatgtggggaggcatatcttccattcgtttgtctcgataactgttgatgactgcgtttgtgtatatcggtaaaatttcgtaaggatttattgctaccaacatagcgcctgtgtaggtatatatcaacttctccctgtatctcttgtgtaaattccttaaaattgcatactcctgtagatctcccaaattgatcatgtcttcaacccccttaatggatgacacatgcatggactggatgacctgctgattggaaatgtagctttctttcccatcgtcgtccaaaattctaaccctgctggcttcaacacccacgattttacctccaatggggatatcgaattctccatttgttactggcttcgcccatatgtactcacccaccgctaagcggggtttgttcgccattttgaccaaccccttccaacagcctgccacacaaaatatttacaaaaaactaattttttgtttcacttgataccatcagtcgaatcaactatcaacccacatagcacatagttatcgaacaacttatctccccaagaggattattgataataattaat

SEQ ID NO: 4033 - DNA, 6450 bp, Diabrotica virgifera
  SmartBlast Evalue=0; Info="Myosin VII, putative n=1 Tax= Pediculus humanus corporis RepID=E0VVF2_PEDHC"
ttgtctatcccatccgttcttgtcgaagaaaatctgtgtacgacgtaatgaggtcgtccattttgtatccctgcgacgtttcgcataatattttcgtccttctcatgatatttcccacggtcatatggaagtatgcgtttccggatgaccagttgctcagttcggagtattcgtgtgtagccaagatatccttagtttgtggatgtataatgttaactcctctcctgttgatggcgatgataataacatctggataagtgggttcagtggtttgcttgacttcaaagaaggccgatccaaaagtaggccacttgtaggtgatattcaagaactcagtctttgcttgttcagacgtcaacttgagcaacttatactcggataatatactctttctccaatccgaagaactagctgccttgatgatgtctgctggtaggaggtccttaatgttatgctgcagtgtggagttagcctcagacgcattgttttcaaatcttgcccttaaaatcaaactggccaattttatggcatcctgcttgctacatttgtggtagcctttaagatacttcggaagttcttgatggtagtggaagatctggtctgcgtagtggtctttctccgggtaagtgcctacccaaactttcttcatgaagaagacttggtattgggcctgtatttgagtggcacttccccagctaggtttggtttgcttataccaactgatcagctcgctcaaaaaatcgtagaagaactgatcttgtggaactgagaacactctatctgcaatagctacgaataagctaaaaccatcggtagacttcagttccaatctagttccaatatgtttacacaagtccactgcacgtgtggaggaatcaatcttgaaggcttcgtcagtgtcgtcggggaagtacactttgtggaatatctccatgctcttgtgttggattgcttctacttctattgtatgtggtgggtatttcctggatcccaccttttgtgtcttctgcaacctgtctaaacaatgttccacaaatggatgagttctggatttcaggaatttctgcaattccccgtagagtttgtcgctgggcaaatacaacccagttatgaggtacatcaattcccaacctctttcttcacttaaagagagtctattgaatgtcagttgtttcataatttgacagtagacttcatctttcaacagctcgttcttaagaggaccttcaaatatttgatttgtatattcattgatatattttgcttttggcgctggcaagtctcccatgtatttcaaaattgcagtaaagatattgcaggcttctttgctagcttcatcgtctgccagcagcctcttcagaagcggctggtaaatgggctcgttggaatatttccacacttcctccctagaggttcttctagctgccatcaatatagtcgatttattctgcgacactgatttgccagctctgaagttttcttcggcgtagtgagacagcgtgtagagtttcatcctttgtgctgtcgtgactatagtttctggttttctctctgtcacaacgccgtctttcttgaagcaggcgaggatatctgcaggaggtggctgtagtgttgggagaatgtagacgttttctgtggggaaatcgccggattttccgttgcattctccgtatccccaggaggctgtcattaatgtttcgccggtttggccgtttcctagtactattaaatctcctttgcgaagagataggaatgattctgcacctactgaatgagaatagtcggcagtacatacacaatacactgatctcttctttaatccgtccaaaatgtattgtagcaaattgctaagggattgtgcgtctaaagtatggaaagcgtattcttctctagctacggtatttaggataaatttcagctgatcagtcttctcgtaagtgacgaaggaaacgtcagcaaaggtgagctccatatggatctgttcttcgtcatcgatcatgaatataccggcgctgttgaccgctatgatcattttgttcttgggtaacgaaggtccggaagtctgaaccgcttcaaagaatttggagaacaatatgggccacgtcatttgagcgtatttaaccatagtctccttagctttgatcgaaggttgtttttgcttaacacatgctaaattaataaacgcagaaacgattttgttctcccaattggtcaagtcgttttggcttctcttcaccaaatatgtaggcaagtactctcctatcctcgaatgcagagctttctggttgattggagctccgttctctacgtaatactgaatggctatcaagacagctatgtcaccttctttgggacaccgatattcgccgaatttgactccacggacgatttggtggtagatcaaattcgtggccatggaatcttcaactggattatgccagggtgtaaatatttctttgcggagtagtaaacgccatgaggcgtttctttcctgttgtccttgcactttgacgtattgttcacattgtgatatggcgtccataacgtggtctttttcactacccaatgacattaccatcttgtcaagagatacatatatggagaatccaaaagtgtccttcagttttagagctgttgcaatttgggacagaatctcctcggaagtagaagctgaatcagcctcaactttatgactagttccatccataagatccacttccaaatttatgggttccttgtttttggtggccataagctccaaccagctgggaggatgcgacctgcagccattttggatggttctgtttagtcttccttcacagtaaggcgcatatcccggaggacctgacctgataaagactcgtagatatttggtgaacctttctgaaggcacgaagcaaccgatacaaagggacaagagtatccaacctctggcgtaagaggatttgatgtagttgttagtaagttgtttgcagatcatcgcgaaaatttcatcccttagttcggaacgcaaaataccatgcgcaataatgaaatgcaacttttcaaggttattcgtccgacgtttgttcaaccactcatcgtaccgatcagtggcaaaactgtcctcaaccaaacctttccgcacgtcatcaagaagcttagattttttcttcaaagtcaagtgaagtagtttctgtcgttctgattttttcatcgacgcatatttcctttcgtcgacaaggatttcctgatattcttttctgttcgtgaaactcctacttaaagtctctgagacaatgttcattatcgattcattacctttaatggaatcatatttgggctcaggataatctcccataaacctgagaatggtcaaccatatggcttgagcagcaataacatcatcgggagtgggaaggtaatgcaaagattccttgagtggtttcttggagaattggtagttgactgagctcgaaaaatacgttgcagcgtatttgctaaagctgtactcgttgaaatcgatgtttttatctatgattatcgttttttcaatagtaggtgtcaccatctctttcttgtcaagaacctgttccaaaaatctaaacgtgtcatcaatggtatcaccatctttcttctcctgtaactctttttctcttttgagtttttgttgcaactcatcttcagccataagtttagcagcgtaatcactgtctagttgagcaagctgcattttcatcttagcttcagcttcgtatttatattctttcactccttgtttctgcagtatcttttcatctatccttctctgcttcacaatagcgtatatcttacttattttgctcttgtctctagacaagaagcctctacatctagcttgaatggtagtgatattcttcttgaccctaacaaaagcaaacgtcagttgtctagaagctatacaagcttgcagtctcttgtatccgtttcgcatgatcaagaatttctttcggtaacctctagctctaaagtacttttgaatgactaacgcagctttcttcattttgaggaatcttcgtctgtggacccatccacgaattgctcgttgaaggatctttactgaattatccaaaacaagagtgcgttgatgctccaaatggtcatgctcgtgttgtttgaggaaaactttggtattacctagttggtagtgtttctcgtctttgaaaacttccgacagaatcttctctgccgaatttttgcagtcgcctttggtagacggttttatatttttgcctaagtatcgaaaccggtcgacgaactctatgtagctgtagcggatagggtatccagcttggcggattttcgcggtgtccatcatgccagagtaacggagttgcctcgtacaaagtactttatcgaaatcttgaggttttttgtgatgattcggtttaatgcaccttacgaaaaacggatggcaggttcctaaagttttcatcaacgagtctagagagcttctaaattgagaagaaagtgtcttcttgagtttgttatcttgttcgtttttaaacagatctttgaacatcggattctgtgaactgaggataaggtttctcaagtcttggctgaaagagtccctgtttttctccaaaaatccttctacatcgtaaaaaacttctcccgcaaaatgttttataccaaacgccggagtcatctcactttttggtttgcagtagctgtcattaccgccatgttgtttatgcagcttggccaacagcgagaaatccgtacctttgggaaatttggcttcctcgtctatgagagaaaagatactcatcggtttcatggccatcatatccaaaatacactggttatcagtaaacgtgatgttatcccacctaattccctctttcttgtagtattcctgctcaagtttgaagatgtgttgaacgaagaattgctgcaggttttcgttggcgtaattgatacacgtttgctcgaagctgttgatggtaaaattctcaaaaccgaagatatctagcacaccgatactggatttattttgccctttattattggaaatcacactgttaattttctctacgatgaaaatgaacatctggccgtatatgcctttaacaaaggcatgccgagaatctgaagcttgttgtttggttagtgttgaagctatttgctctccttgtgcgtagatagtccttttagttaacgcttcgcccagatcaaatttattaacactcagtagcctagctattcgttccccggcactggcatcagctagctctgaactttctgaatgagccgcctggccgcttttgaatttcaggttgcccagatgtaatatagctgctagtagttgtaaaacgtcctcaacctccttttcggtaaaattaagtactttgaaagcagccgttatatcggaccattccttttcttcgtttctaccttcgcaagtaaatgtttttcctaatctcaaatattcatatgattcggcgctacccaattctagacgtttcttcttctccttcgccattcccgccaacatactataaaatatatgatagtttctttccccttcggcttgggatatcagccgactcttctccaaaagatactgatcgatgacagcgccttcaatgccccccgttttgttgaattttatgtcgatgtatttcccgaaacgtgaggaattatcgttcctgacagttttggcgtttccaaaggcttctagaatgggatgcgcctccaagatctgctgttctatccagttatgttgagcgcttgttgaagctaagtattgaaggatcagttttgtactctctgtttttcctgcaccactttctccactgattacgatacactggtctcttttggtgcttatcatattgctatagctgttgtctcctactgcaaaaatgtggggaggcatatcttccattcgtttgtctcgataactgttgatgactgcgtttgtgtatatcggtaaaatttcgtaaggatttattgctaccaacatagcgcctgtgtaggtatatatcaacttctccctgtatctcttgtgtaaattccttaaaattgcatactcctgtagatctcccaaattgatcatgtcttcaacccccttaatggatgacacatgcatggactggatgacctgctgattggaaatgtagctttctttcccatcgtcgtccaaaattctaaccctgctggcttcaacacccacgattttacctccaatggggatatcgaattctccatttgttactggcttcgcccatatgtactcacccaccgctaagcggggtttgttcgccattttgaccaaccccttccaacagcctgccacacaaaatatttacaaaaaactaattttttgtttcacttgataccatcagtcgaatcaactatcaacccacatagcacatagttatcgaacaacttatctccccaagaggattattgataataattaat

SEQ ID NO: 4034 - DNA, 5937 bp, Diabrotica virgifera
  SmartBlast Evalue=2E-78; Info=TRAS3 protein n=1 Tax=Bombyx mori RepID=Q9BLI5_BOMMO
atgttaacaagtagagtgttaacatagtagatagcggcctacgggcatcaagtgaccaaaactagcatcaataaacaaagactttcttttcattcccctagtgggaattacattattttatttttggtatacggtatacggtgaaaatatggggtaacttgcatcaagtttgcaacacccaggattcataacccaatacctacaattccctatagtagggaatcatattgatttatggtagtggtcaataataaagctatttagtgccaagtgtgacacctccacgcggttaggggcgggcaaccactccgtggctattagtcgggtccgtcccgcaataagctccacggtagggctaagcgcacacttaaaacaattttgtggtgaaggacagttggtttagttaatttattgatttcgttcaggcgacttattgatttatttactatacttattaatttagttttattatacatttattaatttagtttttattatacatttattaatttagtttttattatacacttataaatatgagtactaaaggtagtacccaacatatgcatgaaagggaggaagatgagagcttcagcactcatctgaatctccgattaagttcgaactcggctgaagagccaactttcgaggaaaatatgaaagaactaatggaattcataaacaatgagatggatccgagcaatagactaaacaaagctgggagagaaggtctgaaagataggatcactgcgatagcaatgaacatggccaatttggctggacaaaataagatcttgagggaagaagtcgaaagactaagaaaagagtgtaagaatacagagcgaatgtcgtatgcaagggtaacggcacaacctgcaatggctataaaaaccgataaaaaaagtgaacaagaacgtaagatagagatgaggaaggaggagaataccttgttcatcacatgtgacaaagcaacgacaggtcgaaaggtacaagaggaactcactaaggtgttgaatccgcgaacagagaaaataagaattaaccgaatgaagaccattggtaaggctctcataatcgaggccgcaaccaaagaggatcttgaaaagatcaaaaacaatgctaacgtaacaagaaacttcaaatgtgaactgcccaaaaagaggaaaccgctagtcattttatatgacgtgagcagttctgctaaagaagacgatataaaggaagacataagagctcaaaattttgaaaacatgagcaaagaggagtttgaagattcatttaaaatacgttttaaaacgggcccaagaggaaagtcaactgtccactatgtggcagaggtgtcccctgggctgcggaaagcattaatcagagataagatatatataggattcagtgcgatcaacgccaaggactacatagtagtccccaagtgcctcaagtgccaagacctgggacacgttgcaaaacactgcacaaaggaaaccgcatgtagccattgcggaggtgcacacgaaaagaaagagtgtaacaagactgagcagcgaaggacttgcataccgtgcaaggcacgaggaaaacctgaatgcaataaagatctaaaagattgtccaacacacaagatgttaatagacaggcaaattctcaaaacagactggggtaataaattcgatcgtgaagattgtgttaatcaatcaacacgtgagaatgacaaccctgtggatggacaatcttctaagacaccgtcaaaacgattccgagatcgactgcgattactttcctttagaaggaaaagaaaaatataccgattgttaatagcgaaaaagaaaaaccaaagacaagcgatgatggagtgttggctctgtatgaaaatatggaggtcaacatgaggctatcgcgtctcgaggaggctaccatactggttgctgccttgaggcacatagtcagaaagctccatcaaagaggcgataaaatcacgtttcctgtacctgatgcggtggatagaattcagctcaaatgcttgaacatacccacgaacgcagacgaactgttgccgctgctgaaacaagtcttcagtaggagaggggaagtcttcgatcttgaggaactttacagtgacttcgtgaaaacctatgggagaatcgcaacggactatactcaaaaatggccaatgagtcagatacacacacgacatccgtgagaattaaggtggggcaaataaactgtatgagaagtaccaccgtacttcatgaagtacggaaatttgcagaagaccagaaattggacattgtgtgcatgcaagaagcatacacaaaacagggtaaaatacagtttatgccccttaaagcacaaaaagcgagtataggcgataatcccatggcagtcacagtactgttcaacaacgagatgaaacttttcctgctgaggcagttcagtgacgagcactgcgtatgcgttgaagtactaactaaggttggtaaagtaataattgcaaacctgtattgtcaattcaacgatgacatagaaccttacatagaaaaaatgagagcgatatttctagcatatagaaatgagaaagttgtggttgtggcggacgccaacgcgaaatcagtattgtggaactcaccacaaacggatgagagaggcgcattagttgaggacattattaatgaactgcaactgattgtgcataatagacccgggaatccgccaaccttccagaacagagcaggcgcagccagcaacatagatatctctatatcaaatgtgaaggcagctaacctggtcaaaaactggaaggttgtagaacatgcgaccaccagcgaccacaactttatcgtttttgaacttgcaaatacggcaaatagcacgtacttgtcatcgaagaagaagtacaatctaggtaaggcaaattgggagcaattgaagctgagttcttgccaccgcgtcctatactgagaggatgcaacgtacatgaggaagccaagcacttaacagcagcaataagagcagctatggatatagcaataccgaaagtagcttccgccaaatcggtaacaaacacagcttggaaggaaagcctgacgagattgagaagcagagttagattagcgcgtaagcgttaccagcgatgtggaatctatctcgaaaggcagagacttctgcaagaatacagagacataaaaagtgaatataaaagggaaatagtgcaaaccaaggcgaagagctgggagatgttcgtatcgagaaatctggaactggacatgtggggtgtcccatacaaaatcgtatctaacaaaataaaaagcccaataatgctttcaactttattgaaggaagacggctcgttgacagagagttgggaggaatcagctgacatattgttagatgtgttgctgccacccgatgacctagaaaacgagaccgaaatacaaactcagatcagagaggcaatgatacagaggtatgagacgcctggcgtgccagtgacagaggaattcacagaaaacgaaatcagagaaaacttaagaacgatgaagaaaagaaaggcccctgggcctgacaatattcacgttgaaatattacaagctctacatgagcaagtagtacccactctcgtggccttatacaatgaatgtgtaaggcaaagaaaatttcccaacaatttcaaacaagctgatgttataataataagcaaaggtgaagacaaagatcctacacagccaaaatcctacagacccatttgtttacttaacactatgggaaaactgttcgaaaaactgctgtgtgcaagactaaatcatgtacggagcataaacgggttacaccctgaccagtatggatacaggagcgggaaatccacggaagatgctattaacaaggtatacgaaatcgtcgacagtagtgaaggaaaatatgttatgacagtgttcatagacatttctggagccttcgacaatctctggtggcctgcgttctttgaaagacttcggaggatgcggtgcccgggggacttgtacggaagcttcagaaattattgccaagataggtatgcgagtctgagctgtccaaatgccaaaaagaccaggcacatcacaaagggatgccctcaaggttcagtatgtggtcccattttttgggatctcatgctggaagagttgcttggcgaaatgactgtgtgtcctgacgtgctagggtgcattgcttatgcggacgatctcctgctaataatagacgctgattcgagaaggcaattagaaggcaaagcaaacgatgtactacagataattagtaattggacatcgaaagttaagctttcgatatcccaaaccaaaaccgtttacagtttgataaaaggtaggctggaaagagatcctataataaggatcgatggaaggcctattagaagaactagtacagcgaaatacttaggaatcgttattgatgagcctaggctcttcagtaagcacattaccagcgtctgtgaaaaggcaacgaggttgatgcatggcatagcgagcctggcgcagagggactacagggtaccgttccgtcaagtaagggtttaccttagctcaattctagcgtccataatagggtatggagccagtacgtgggcacacaggttaaagaacgtgaaaaatcgggaaaaagtggatagagcacagagaggcttccttgttagaatgacaggagccttcagtacaacgccaacagaagccctaacagtgctcacaggagttttgccacttcatctagaaattaccagaagaggaagtcaatattggcttcgaaaacataatcctgacaaagtaatcgaaattctgggtgtacatgtacacaccagaaatgagataaacaatgtaatagagaggaagaggcaaaatgaatgggatgcgtctgtgaaagggagaagactctaccaatacataccacgtttgaatgaaattccaccatacttcaatccaaaacctgggttagtgcacttcctaacaggtcacggcccataccctagttatttgcatagattcagcctcaagcaggatgatctatgtgaatgtggacaggtaggaacacccgagcatgcgattttcgactgtgacatttacgaagatgtcggtgatttaagacagcgattacaagcaagacaaatagcagaaattttaaatgatgaagaactttataataatctaaacgacttgacagacagagtttccaaaaaacaactggagctctacaatcaaagaagaaacatacaacgaattccctaaagcttttgttatagaaatctttataatttgagaattgtttttatactttcaaatttatatttcaaaatttaaactttaactttacacttgaccacgtaggtggatagtaagatagctaaaactaaataaattagacctcattgttaagcgaacttgagagttggtaattgggtgcattgcggaactctctggacaaggttttggactaagggtctaatggctcaccagaaccgccggagggaaagcaatgcaccaataaacaatttaaaaacttcgagcgagttcgaactacgaaagtagttagtaggctaggaagtcatgatagcaggccgcactcaaggttgagggtgagcagctcacgttttgggtgcgggctgaaatcatgactgggataattattaacttagtaatagattcttaggtgtagtttggcatgttgtaggtcaatgctgcatgaatgaaggtttgacatcgcatgatgtacaaccttcaaataactctacattagatgattaggacctactattttatagaattagtatttagttaatttgtagttagatattaattataaataaaaaattgtaactgttcaaataaaataaattgttcaaattccggctaggattagattccagatgcctggcctttgttataaaaataaaacttg

SEQ ID NO: 4035 - DNA, 5936 bp, Diabrotica virgifera
  SmartBlast Evalue=2E-78; Info=TRAS3 protein n=1 Tax=Bombyx mori RepID=Q9BLI5_BOMMO
atgttaacaagtagagtgttaacatagtagatagcggcctacgggcatcaagtgaccaaaactagcatcaataaacaaagactttcttttcattcccctagtgggaattacattattttatttttggtatacggtatacggtgaaaatatggggtaacttgcatcaagtttgcaacacccaggattcataacccaatacctacaattccctatagtagggaatcatattgatttatggtagtggtcaataataaagctatttagtgccaagtgtgacacctccacgcggttaggggcgggcaaccactccgtggctattagtcgggtccgtcccgcaataagctccacggtagggctaagcgcacacttaaaacaattttgtggtgaaggacagttggtttagttaatttattgatttcgttcaggcgacttattgatttatttactatacttattaatttagttttattatacatttattaatttagtttttattatacatttattaatttagtttttattatacatttattaatttagtttttattatacacttataaatatgcatgaaagggaggaagatgagagcttcagcactcatctgaatctccgattaagttcgaactcggctgaagagccaactttcgaggaaaatatgaaagaactaatggaattcataaacaatgagatggatccgagcaatagactaaacaaagctgggagagaaggtctgaaagataggatcactgcgatagcaatgaacatggccaatttggctggacaaaataagatcttgagggaagaagtcgaaagactaagaaaagagtgtaagaatacagagcgaatgtcgtatgcaagggtaacggcacaacctgcaatggctataaaaaccgataaaaaaagtgaacaagaacgtaagatagagatgaggaaggaggagaataccttgttcatcacatgtgacaaagcaacgacaggtcgaaaggtacaagaggaactcactaaggtgttgaatccgcgaacagagaaaataagaattaaccgaatgaagaccattggtaaggctctcataatcgaggccgcaaccaaagaggatcttgaaaagatcaaaaacaatgctaacgtaacaagaaacttcaaatgtgaactgcccaaaaagaggaaaccgctagtcattttatatgacgtgagcagttctgctaaagaagacgatataaaggaagacataagagctcaaaattttgaaaacatgagcaaagaggagtttgaagattcatttaaaatacgttttaaaacgggcccaagaggaaagtcaactgtccactatgtggcagaggtgtcccctgggctgcggaaagcattaatcagagataagatatatataggattcagtgcgatcaacgccaaggactacatagtagtccccaagtgcctcaagtgccaagacctgggacacgttgcaaaacactgcacaaaggaaaccgcatgtagccattgcggaggtgcacacgaaaagaaagagtgtaacaagactgagcagcgaaggacttgcataccgtgcaaggcacgaggaaaacctgaatgcaataaagatctaaaagattgtccaacacacaagatgttaatagacaggcaaattctcaaaacagactggggtaataaattcgatcgtgaagattgtgttaatcaatcaacacgtgagaatgacaaccctgtggatggacaatcttctaagacaccgtcaaaacgattccgagatcgactgcgattactttcctttagaaggaaaagaaaaatataccgattgttaatagcgaaaaagaaaaaccaaagacaagcgatgatggagtgttggctctgtatgaaaatatggaggtcaacatgaggctatcgcgtctcgaggaggctaccatactggttgctgccttgaggcacatagtcagaaagctccatcaaagaggcgataaaatcacgtttcctgtacctgatgcggtggatagaattcagctcaaatgcttgaacatacccacgaacgcagacgaactgttgccgctgctgaaacaagtcttcagtaggagaggggaagtcttcgatcttgaggaactttacagtgacttcgtgaaaacctatgggagaatcgcaacggactatactcaaaaatggccaatgagtcagatacacacacgacatccgtgagaattaaggtggggcaaataaactgtatgagaagtaccaccgtacttcatgaagtacggaaatttgcagaagaccagaaattggacattgtgtgcatgcaagaagcatacacaaaacagggtaaaatacagtttatgccccttaaagcacaaaaagcgagtataggcgataatcccatggcagtcacagtactgttcaacaacgagatgaaacttttcctgctgaggcagttcagtgacgagcactgcgtatgcgttgaagtactaactaaggttggtaaagtaataattgcaaacctgtattgtcaattcaacgatgacatagaaccttacatagaaaaaatgagagcgatatttctagcatatagaaatgagaaagttgtggttgtggcggacgccaacgcgaaatcagtattgtggaactcaccacaaacggatgagagaggcgcattagttgaggacattattaatgaactgcaactgattgtgcataatagacccgggaatccgccaaccttccagaacagagcaggcgcagccagcaacatagatatctctatatcaaatgtgaaggcagctaacctggtcaaaaactggaaggttgtagaacatgcgaccaccagcgaccacaactttatcgtttttgaacttgcaaatacggcaaatagcacgtacttgtcatcgaagaagaagtacaatctaggtaaggcaaattgggagcaattgaagctgagttcttgccaccgcgtcctatactgagaggatgcaacgtacatgaggaagccaagcacttaacagcagcaataagagcagctatggatatagcaataccgaaagtagcttccgccaaatcggtaacaaacacagcttggaaggaaagcctgacgagattgagaagcagagttagattagcgcgtaagcgttaccagcgatgtggaatctatctcgaaaggcagagacttctgcaagaatacagagacataaaaagtgaatataaaagggaaatagtgcaaaccaaggcgaagagctgggagatgttcgtatcgagaaatctggaactggacatgtggggtgtcccatacaaaatcgtatctaacaaaataaaaagcccaataatgctttcaactttattgaaggaagacggctcgttgacagagagttgggaggaatcagctgacatattgttagatgtgttgctgccacccgatgacctagaaaacgagaccgaaatacaaactcagatcagagaggcaatgatacagaggtatgagacgcctggcgtgccagtgacagaggaattcacagaaaacgaaatcagagaaaacttaagaacgatgaagaaaagaaaggcccctgggcctgacaatattcacgttgaaatattacaagctctacatgagcaagtagtacccactctcgtggccttatacaatgaatgtgtaaggcaaagaaaatttcccaacaatttcaaacaagctgatgttataataataagcaaaggtgaagacaaagatcctacacagccaaaatcctacagacccatttgtttacttaacactatgggaaaactgttcgaaaaactgctgtgtgcaagactaaatcatgtacggagcataaacgggttacaccctgaccagtatggatacaggagcgggaaatccacggaagatgctattaacaaggtatacgaaatcgtcgacagtagtgaaggaaaatatgttatgacagtgttcatagacatttctggagccttcgacaatctctggtggcctgcgttctttgaaagacttcggaggatgcggtgcccgggggacttgtacggaagcttcagaaattattgccaagataggtatgcgagtctgagctgtccaaatgccaaaaagaccaggcacatcacaaagggatgccctcaaggttcagtatgtggtcccattttttgggatctcatgctggaagagttgcttggcgaaatgactgtgtgtcctgacgtgctagggtgcattgcttatgcggacgatctcctgctaataatagacgctgattcgagaaggcaattagaaggcaaagcaaacgatgtactacagataattagtaattggacatcgaaagttaagctttcgatatcccaaaccaaaaccgtttacagtttgataaaaggtaggctggaaagagatcctataataaggatcgatggaaggcctattagaagaactagtacagcgaaatacttaggaatcgttattgatgagcctaggctcttcagtaagcacattaccagcgtctgtgaaaaggcaacgaggttgatgcatggcatagcgagcctggcgcagagggactacagggtaccgttccgtcaagtaagggtttaccttagctcaattctagcgtccataatagggtatggagccagtacgtgggcacacaggttaaagaacgtgaaaaatcgggaaaaagtggatagagcacagagaggcttccttgttagaatgacaggagccttcagtacaacgccaacagaagccctaacagtgctcacaggagttttgccacttcatctagaaattaccagaagaggaagtcaatattggcttcgaaaacataatcctgacaaagtaatcgaaattctgggtgtacatgtacacaccagaaatgagataaacaatgtaatagagaggaagaggcaaaatgaatgggatgcgtctgtgaaagggagaagactctaccaatacataccacgtttgaatgaaattccaccatacttcaatccaaaacctgggttagtgcacttcctaacaggtcacggcccataccctagttatttgcatagattcagcctcaagcaggatgatctatgtgaatgtggacaggtaggaacacccgagcatgcgattttcgactgtgacatttacgaagatgtcggtgatttaagacagcgattacaagcaagacaaatagcagaaattttaaatgatgaagaactttataataatctaaacgacttgacagacagagtttccaaaaaacaactggagctctacaatcaaagaagaaacatacaacgaattccctaaagcttttgttatagaaatctttataatttgagaattgtttttatactttcaaatttatatttcaaaatttaaactttaactttacacttgaccacgtaggtggatagtaagatagctaaaactaaataaattagacctcattgttaagcgaacttgagagttggtaattgggtgcattgcggaactctctggacaaggttttggactaagggtctaatggctcaccagaaccgccggagggaaagcaatgcaccaataaacaatttaaaaacttcgagcgagttcgaactacgaaagtagttagtaggctaggaagtcatgatagcaggccgcactcaaggttgagggtgagcagctcacgttttgggtgcgggctgaaatcatgactgggataattattaacttagtaatagattcttaggtgtagtttggcatgttgtaggtcaatgctgcatgaatgaaggtttgacatcgcatgatgtacaaccttcaaataactctacattagatgattaggacctactattttatagaattagtatttagttaatttgtagttagatattaattataaataaaaaattgtaactgttcaaataaaataaattgttcaaattccggctaggattagattccagatgcctggcctttgttataaaaataaaacttg

SEQ ID NO: 4036 - DNA, 5762 bp, Diabrotica virgifera
  SmartBlast Evalue=3E-23; Info=CG6108 n=1 Tax=Drosophila melanogaster RepID=Q9VK08_DROME
attttaggtttagttttaagaataaaactttttacagtggcataattatttgttgagcagccttcacagtttgttggtacaggtcagggatttggaacgtctcctcaaccgttcattgttggacacattccaccagtgaggcttaaaaatcaaccaatacagaaaaaaatggatcctccagcatgcgttcagaacgccatgatgaccaaagacaagaaacccttcacctacacccctggaggaatagacctctccgaagctcgttctcctcgactacaacgaagaatcgagagaaacgctaatttaggcggagttggtgacatacctcaacaccctgctcctcatcctccaatctcaggccctcttcctccatctgccttggctgctatgcgccctcaaccgcaggtgcaagtttttccttcaggtcctccaccacctgcgcccatgcgcggtggagcacctcccccaccaccaccacccaaacaaggaattcctcccccacctcctccacctagttgtccattacccactcaaaaagtacagacctctgataatcaggttctagaaaggcctgatatgactaaaattatcccagataacccgatggcattgttgagaaagactggaggaccgcaaccaaggagaagcttagttgatcaaatatttgaggaaagtggaaagagtgctccagagcctagaactccaccagtccaaagccagcaacaatatcaacctccacaacagagaattcagtctggagggacaccaatctcccctgtaccacaacaaacatacaaaccttcactaccgcagcaacaacagcagtaccaaccacaggctcaaccacaataccaaccacagcagtaccaaccacagattcagcaacagcagcagtatcaacctccgattcagcaaactaccccacccagagaacaatattctagacctagctatccagagcctgtgaaagagcaacccaggtaccaaccaccggtaatagaaaggcaaccatcagcaccccagaacaacggacaacaagaagtgaaaacaagcactgcacatttgggatctttgtatattcctcccataaatcaacaacagaaacgtatagtatcacctccctcgcctcctgaaagaaatctggactccccaggcatacagacacctcctcttagagaggctcccagaccctggcagacaaagaagccccaagacgaggtgcctgcctgggcaaagagagaaaaccagatccctagtaatgtagatgaagcaaggaaaatttctcctcctgcttctcaacaacaacaacagaggtggccacaaccccaagctcagggaaatcctccaccttccttccaacagcaacagtacgagcaacccaaatataatcaacagcagttccaacaagcttatgcgggcagaccagatgcgactcaacatcaacagccaataggaattcgtatagatatccgtaccaaaccacaagcaccataccaagatcagacagaaatggaaaatagacctaacgtggtttacgtcactcaaccattggtgttgcagcatcctggtgcagctccgcagaggcaacaagatccaaacaaccaaggaggggcaagggttgtgccagtacccgttttaaatagacaacaaagttggggaagcaaccccgtgcaatccaattcgttcaaaatcattcaaaaattcaccaacacagacggtgaagaagacgagtacgacaacgtacccattactgaacactcgcccaagtatacacagaacttccaacagcctaatgatcagatgagacgaatgaaagtgaacgatggggaacaaagtattgcaaatactttcaaacaagtgcctcgtggaccacaacaacagcagtctaaaggaccccaagttaggaatattcccattcaaattgaaggtgatgatactcccaggccgtatgtgcatccaagtgaacaagtggtacaggaaccaaaaaaatacactggaagctcgatacccagtagatctttcaaaattttgcaagctatgactgctccaaatgattatgccaatgtagaagagcaaaacgaagaaaccccatacgatgaatgggtgtaccctccccattatcctccttatccctaccctccctactggtacgattattaccgttattattaccctgaatcatatcccgaagaaacccctaccaaaaaatcaacccctagaagtagtgtttctagaagtacctcgccagcaagatctggtcgccatactcctctgccttattgggggtatatgcctccttattgtccttcacccaatactactgatagcggcaaagagacgtcaccacaaaagtcaataccacctccttggtatgggtacgattcaaattacccttcagaacaagacagtaccgatgtagatgaaagtagcatatcacaggaatatttaccatactatgatccttactattatcattactattatggatatccaccaccaatgtatcctccttattcaccacgatatgccaacagcgatactgacagtactattaacggttattcttcattagatgaaaaaggaactaaatgtaaaaaggtaatagaaaatcaaaagaaagttgcaaatgattctggtgtaaaagcgatagtaacaccaactttagtagtaactgaagttgtaaccaaaccagccaaaccaaccaaaccaatagaggaaaaaattgaaagtactacagactgtgaaactgatacagaaacagacgatgaatatagtggccatctacaaataaatcccctgcagtctatgaaatctataacaaatattacttctcttaatgcatacagtagtgacgaagatatttctaaagaagaaatacaagaggatgagtattcgggtgagtctaatgacgaaattgatgatgccagttcaataggttatgaagacgatgcttaccctcaccaacttagtgttattatggaagagagtgaaaggacagaatctagaataagaagttttagtgctatgagtgatactactactatagcagaaagaagtgatccagaagaagacattgtagactacagtaagacagaaaagcttgacagtagacacgaaagtatttcagatgactacaataaacataatgaagaagaaaatattgtaaattgcagagaactagaatcggatgacagtaaacaagaacgtgcttcagaccactatgatagacataatgaagaagacgtactactagacacttataaagaagatgaccttaatgtagattgtgaacatgacgatgatgacataaaaagtaatgacagtgaagattggtgggggataataggaaaagaagacgacgatttaccagcaccaaagaaaacacaacttttttgcaatgtaaacgtagaggaaaagagcattttgaatgaatatgccgccagtgaagatataatagaaagtgataattcagatactgaagatatagttagtattaaagttaatgatgtagaaactgatagagtagataatttagaaatacataaaaatgatacagtaagtaattatagcacagaggttactaattcaaacaaaaacacaactcaaaattgcaatgaagaaagtaatgagtatagttcagaggtcactaatacaaataccaatacaactcaaggttgtaatgaagaaagtaataactacacagaatatacagtggtacgacgaattaaaaagaaaaacaatgttgtacacaaagaaacagaagttaaagaaagcttgtctcgacctccgagtatataccaatctttagaaagcctccaatcagaaccaaaatctaggcctagaagcatatacgaatcgttagaagatatccaggcagaatcaactggaagtcttataaaagttgataattttgtaggtattttggaacaaattcagaaagagactggtttttggaacttaaattcaagactaaacaacgaaaaaggtatcgaacctgttaagtttagaagaactagatctgtggaggaaaaacatttggacgaagagaaaaggtttacttggacatcgtttgaaaactttaatagagaatccctggatgatttggagaacaaaataaagagaatgtcttgtggttcattggaagatttgaaagtaaatattaaaacggacgaaacggttgagggttctactaattatattaagtataattctagtttgagctcaacacctgttattgaaacccaaattattcttgaagatataaacgatgataataagtcttccactaatgaatcacatacagaagaatctgactcttctgcttcagagaaagacgataaagaaactaacaacaatctagtgagactcgatgatgacgctgatgttaaaatacctacaataaaagaccgaattcaagctttaagagaaagtattaacttaaagagaagaatattctctgatgacactaaagagttaagtaaggataagatttctataaatgattcaagtaacagaagcaaaacagcttcttcaaaaagtagcttaaaatcttttgaagagttcagtgaagaagaagaggtagattcaggagttacatcagacatgagtaggcatatatcagataccgaagagtttcctgagttgaggaagcttactaaataccaaagagcagctacacactcaagactgtttaaacttttacaagaagaatgcaataacgaggatgtagaagaagatgctgaagagagtaagcaagctttagatctgaatttaaacgatgctaaaaatccagtaaatgaaagactagttaatgagttggtagatagtttactaaaactcaaaaaaggacaagcgtttaagaacttacctaaagaaaaattgtatgcagcagccgtgaaaatattgcaagaagatatggaggttacagataccctttctggatattccacaagtgtccaaacacctcaagagttcggaaccaattctgatgattataaacaatactacgatacctgggatagaagcgaagaaagctttgacatatttccttcaaaagccttcaaagttctgcaagaattatcgagcaacaaacaaggaggtggattgagccctataataaagtgtcccaaggtgttgtcctctaaaaacatccacaagaaactgatcagacttttagaaaactctgaaaactcttctagtcccattcctgacaaacctcccttagaaacgaacgatgtaacgagagtctcttgaaattccaaaggggctttaagcgaaaaattgataatttcttggacccggttttaatttgagatcttgcagatcataccgatttttaatgcatccactggccgatattgaagaatcgaaaagaagaagtttgaacagtggaaaataaaataactataaattaagcatttttaaaaccgcagggtgtgattgtgctgcttgaagaacacgcatttttaatattttcttaccctcctcgcgaggggctgaaaccgttctttggtacatttttttaatacttcgatgttctcatgtcaggattgttttttcaagttttcggtttcgataagtaaacatgatgtatataaaagttaatattgtaaggtgtatgatcacgtaatgtatattgtttaaatatgtatgtatataaatctaggcatctgaaatgaattcttctattgcattgttattaaaaaagagctcatgttaaaaaaaatgaaaactgtatgtatttttaaataaatgttttaact

SEQ ID NO: 4037 - DNA, 5753 bp, Diabrotica virgifera
  SmartBlast Evalue=3E-23; Info=CG6108 n=1 Tax=Drosophila melanogaster RepID=Q9VK08_DROME
attttaggtttagttttaagaataaaactttttacagtggcataattatttgttgagcagccttcacagtttgttggtacaggtcagggatttggaacgtctcctcaaccgttcattgttggacacattccaccagtgaggcttaaaaatcaaccaatacagaaaaaaatggatcctccagcatgcgttcagaacgccatgatgaccaaagacaagaaacccttcacctacacccctggaggaatagacctctccgaagctcgttctcctcgactacaacgaagaatcgagagaaacgctaatttaggcggagttggtgacatacctcaacaccctgctcctcatcctccaatctcaggccctcttcctccatctgccttggctgctatgcgccctcaaccgcaggtgcaagtttttccttcaggtcctccaccacctgcgcccatgcgcggtggagcacctcccccaccaccaccacccaaacaaggaattcctcccccacctcctccacctagttgtccattacccactcaaaaagtacagacctctgataatcaggttctagaaaggcctgatatgactaaaattatcccagataacccgatggcattgttgagaaagactggaggaccgcaaccaaggagaagcttagttgatcaaatatttgaggaaagtggaaagagtgctccagagcctagaactccaccagtccaaagccagcaacaatatcaacctccacaacagagaattcagtctggagggacaccaatctcccctgtaccacaacaaacatacaaaccttcactaccgcagcaacaacagcagtaccaaccacaggctcaaccacaataccaaccacagcagtaccaaccacagattcagcaacagcagcagtatcaacctccgattcagcaaactaccccacccagagaacaatattctagacctagctatccagagcctgtgaaagagcaacccaggtaccaaccaccggtaatagaaaggcaaccatcagcaccccagaacaacggacaacaagaagtgaaaacaagcactgcacatttgggatctttgtatattcctcccataaatcaacaacagaaacgtatagtatcacctccctcgcctcctgaaagaaatctggactccccaggcatacagacacctcctcttagagaggctcccagaccctggcagacaaagaagccccaagacgaggtgcctgcctgggcaaagagagaaaaccagatccctagtaatgtagatgaagcaaggaaaatttctcctcctgcttctcaacaacaacaacagaggtggccacaaccccaagctcagggaaatcctccaccttccttccaacagcaacagtacgagcaacccaaatataatcaacagcagttccaacaagcttatgcgggcagaccagatgcgactcaacatcaacagccaataggaattcgtatagatatccgtaccaaaccacaagcaccataccaagatcagacagaaatggaaaatagacctaacgtggtttacgtcactcaaccattggtgttgcagcatcctggtgcagctccgcagaggcaacaagatccaaacaaccaaggaggggcaagggttgtgccagtacccgttttaaatagacaacaaagttggggaagcaaccccgtgcaatccaattcgttcaaaatcattcaaaaattcaccaacacagacggtgaagaagacgagtacgacaacgtacccattactgaacactcgcccaagtatacacagaacttccaacagcctaatgatcagatgagacgaatgaaagtgaacgatggggaacaaagtattgcaaatactttcaaacaagtgcctcgtggaccacaacaacagcagtctaaaggaccccaagttaggaatattcccattcaaattgaaggtgatgatactcccaggccgtatgtgcatccaagtgaacaagtggtacaggaaccaaaaaaatacactggaagctcgatacccagtagatctttcaaaattttgcaagctatgactgctccaaatgattatgccaatgtagaagagcaaaacgaagaaaccccatacgatgaatgggtgtaccctccccattatcctccttatccctaccctccctactggtacgattattaccgttattattaccctgaatcatatcccgaagaaacccctaccaaaaaatcaacccctagaagtagtgtttctagaagtacctcgccagcaagatctggtcgccatactcctctgccttattgggggtatatgcctccttattgtccttcacccaatactactgatagcggcaaagagacgtcaccacaaaagtcagtaccacctccttggtatgggtacgattcaaattacccttcagaacaagacagtactgatgtagatgagagtagcatatcacaggagtatgcaccatactacgatccctactattatcattactattatgggtatccaccaccaatgtaccctccatatccaccacgatatgccaacagtgatactgacagtactattaacggttattcttcattagatgaaaaaggaactaaatgtaaaaaggtaatagaaaatcaaaagaaagttgcaaatgattctggtgtaaaagcgataataacaccaactttagtagtaactgaagttgtaaccaaaccaaccaaaccaatagaggaaaaaattgaaagtactacagactgtgaaactgatacagaaacagacgatgaatatagtggccatctacaaataaatcccctgcagtctatgaaatctataacaaatattacttctcttaatgcatacagtagtgacgaagatatttctaaagaagaaatacaagaggatgagtattcgggtgagtctaatgacgaaattgatgatgccagttcaataggttatgaagacgatgcttaccctcaccaacttagtgttattatggaagagagtgaaaggacagaatctagaataagaagttttagtgctatgagtgatactactactatagcagaaagaagtgatccagaagaagacattgtagactacagtaagacagaaaagcttgacagtagacacgaaagtatttcagatgactacaataaacataatgaagaagaaaatattgtaaattgcagagaactagaatcggatgacagtaaacaagaacgtgcttcagaccactatgatagacataatgaagaagacgtactactagacacttataaagaagatgaccttaatgtagattgtgaacatgacgatgatgacataaaaagtaatgacagtgaagattggtgggggataataggaaaagaagacgacgatttaccagcaccaaagaaaacacaacttttttgcaatgtaaacgtagaggaaaagagcattttgaatgaatatgccgccagtgaagatataatagaaagtgataattcagatactgaagatatagttagtattaaagttaatgatgtagaaactgatagagtagataatttagaaatacataaaaatgatacagtaagtaattatagcacagaggttactaattcaaacaaaaacacaactcaaaattgcaatgaagaaagtaatgagtatagttcagaggtcactaatacaaataccaatacaactcaaggttgtaatgaagaaagtaataactacacagaatatacagtggtacgacgaattaaaaagaaaaacaatgttgtacacaaagaaacagaagttaaagaaagcttgtctcgacctccgagtatataccaatctttagaaagcctccaatcagaaccaaaatctaggcctagaagcatatacgaatcgttagaagatatccaggcagaatcaactggaagtcttataaaagttgataattttgtaggtattttggaacaaattcagaaagagactggtttttggaacttaaattcaagactaaacaacgaaaaaggtatcgaacctgttaagtttagaagaactagatctgtggaggaaaaacatttggacgaagagaaaaggtttacttggacatcgtttgaaaactttaatagagaatccctggatgatttggagaacaaaataaagagaatgtcttgtggttcattggaagatttgaaagtaaatattaaaacggacgaaacggttgagggttctactaattatattaagtataattctagtttgagctcaacacctgttattgaaacccaaattattcttgaagatataaacgatgataataagtcttccactaatgaatcacatacagaagaatctgactcttctgcttcagagaaagacgataaagaaactaacaacaatctagtgagactcgatgatgacgctgatgttaaaatacctacaataaaagaccgaattcaagctttaagagaaagtattaacttaaagagaagaatattctctgatgacactaaagagttaagtaaggataagatttctataaatgattcaagtaacagaagcaaaacagcttcttcaaaaagtagcttaaaatcttttgaagagttcagtgaagaagaagaggtagattcaggagttacatcagacatgagtaggcatatatcagataccgaagagtttcctgagttgaggaagcttactaaataccaaagagcagctacacactcaagactgtttaaacttttacaagaagaatgcaataacgaggatgtagaagaagatgctgaagagagtaagcaagctttagatctgaatttaaacgatgctaaaaatccagtaaatgaaagactagttaatgagttggtagatagtttactaaaactcaaaaaaggacaagcgtttaagaacttacctaaagaaaaattgtatgcagcagccgtgaaaatattgcaagaagatatggaggttacagataccctttctggatattccacaagtgtccaaacacctcaagagttcggaaccaattctgatgattataaacaatactacgatacctgggatagaagcgaagaaagctttgacatatttccttcaaaagccttcaaagttctgcaagaattatcgagcaacaaacaaggaggtggattgagccctataataaagtgtcccaaggtgttgtcctctaaaaacatccacaagaaactgatcagacttttagaaaactctgaaaactcttctagtcccattcctgacaaacctcccttagaaacgaacgatgtaacgagagtctcttgaaattccaaaggggctttaagcgaaaaattgataatttcttggacccggttttaatttgagatcttgcagatcataccgatttttaatgcatccactggccgatattgaagaatcgaaaagaagaagtttgaacagtggaaaataaaataactataaattaagcatttttaaaaccgcagggtgtgattgtgctgcttgaagaacacgcatttttaatattttcttaccctcctcgcgaggggctgaaaccgttctttggtacatttttttaatacttcgatgttctcatgtcaggattgttttttcaagttttcggtttcgataagtaaacatgatgtatataaaagttaatattgtaaggtgtatgatcacgtaatgtatattgtttaaatatgtatgtatataaatctaggcatctgaaatgaattcttctattgcattgttattaaaaaagagctcatgttaaaaaaaatgaaaactgtatgtatttttaaataaatgttttaact

SEQ ID NO: 4038 - DNA, 5253 bp, Diabrotica virgifera
  SmartBlast Evalue=0; Info="ATP-binding cassette sub-family A member 3, putative n=1 Tax=Aedes aegypti RepID=Q16YY8_AEDAE"
tttttatcttacataatacaaaaatatatacattagttttatttatgttttatttatatttcaattattattctaattcttcttcttaacatcgtcaccttctggattttggtgttttgtaaacgttaggaatacctgttctagactactttgtcccaaagaatagtcttcaatattcagatcacttcgcttagctctttctaatataccaaacatagtggaccatgccatggaagtgtcggttatataataatacaatagttcttgatgtttctctctaagatgagcataaggaaatttatctttgatatacttctccagtgactctgtatctgcatgtaccagaccaccgctctctggcaatttctttagttttatggttaaggtgtatccctccgcaaatttgtttttaagatgctgtgtggatccaagacatttgaaattgccgttcaccataatggctattcgagtgcacaaagcttcacattcttccatgctgtgagaagttagaacgatgcacttgccgttgtctcgaattttgcataatgaatcccacaggtaacgtttcgttgctggatccatacctgttgtaggttcgtccaaaaatagtactggcggatcccctatcaacgacaaaacagtacttaacttcctcttatttccaccgctcatctctttaactttcttgtccaaatgacgatgaaaatcgaagtctcgagacaagaaattcgcaattctttgggttcttttaaactctattcctctgagtaggcagtacatgataattgtttctcttgctgtcatatcatccagcaaagcgtcgaattgaggacagtagccgatgttccgttgtacttgcttcagttgagtttttacactctttccttcgatccatgcatcaccgtaagatacagtttcatctccgctcatcattttaaatgttgtagtttttcctgcaccattaatacccaacaaaccaaagcactcagacttttcaattccaatagacaacccattcacagctaaaaagttgttgtagtatttggttaaatctttcacgactaaaatgttagtttgacgtatatcatgatctgtggccatgtgaatcctttctttttctttggatacgtcgtcgtcttcgtcttgaatgagaattggttgtttcgggaagaatttttggttgatgtagtacatcagtctggctatgaatttgtattcgatgataaatagtaatattgaccacaagacaccagaaatcagtgagtacgttacattttttgcgataccattattgtccatgaaaagtagttgtcgttaagattggtacaaatatcagcgacagtggatggaaattttgaaatgcactcatctttagtaaaattattttgagcacacgagtcaaatactgtttcacaaagagtgttgtatgaatagatagcgtagcatttgtttattcctgtagctaaagaatagtgcgggaacacaagaaaaacgttatccaaggtttctcctatacgttttaggtttgtgctttgcgttttaagcacttcaactaaaagaaaagctgcattccctatgaatatacccacgagagtcatccttgtgtaacccgtcgatggaactgtgaatattaatgatgctacataataaattggcataaacgaccaaccaaacaaaagtaataggaaaaatagccgacccatatctccacttgtcttaaacccatcttgttggaaacaatatatagtgatcaataatactgaacataccagtaagtagacaaacatatcacaaattatattaacaaccaaaaaatgtaaaccttcactcctgatacaaactgcaggtgttttgacttggatacgttttctcttatcaagaatataacataaaatgatgagataaacgccatactgaatccaatattaaatgcaaactggaatccctgagattgtccaccaacaatgttgtctatttgggttgcagctttaaaaggtaatggtttgttaacaaattcaatatgtccgttagtgtagtgattgtaaacggaagacaaagccatgcctaaggcaataccaggtgagtggtaaggatcattgttaaaccatgccgtaataactggatgaattgtcttgatgataccaaattcaaattcttgctctgtgaaagttgatcctataatgtaacttctacgcactacgtttggattagttgcagtcaggtctaacattatacgggtaatattgtcaatgtttgttggagacattccatatccatttaaaacaccgtagaagttattcgtataattttgtggatcgtcaaatcgctcaattaaagtaatagggtcagtgaatcttgctaaatttaaaggcattgccggcaaaacagagggaacacttcctgaaggtacactcataactataataacgtttatcataggcaaaaatatctgaatcgccaacaaaacccatgatctaaaggttcctataatcttcttcataagcattgcgacgaactgattgacaatcaaatgtaaaccaccagtgtacgagggagataaagattctggacctaaatcagcagaagtgagtataggatttttttcttttttgtcctttttctgtttttcattgtaaatttcttcttgtccatggtctgcaccaactttcatgaaaacttcttccatagtggttaaagaaataccatagctcctgattccaagttcatttgattcttgttctatttgttttaacattgcttcgaatacaggagcattattttcagataacaagtaagttagttcacttccaacattgctatggatctctatctctggtataaacttcttcagcagttctgtaactttatgtggattgcaagttttcgctttatccataataagactgtatcccgcaccgtacttcttcttcaagaagaagctggatccacagcattgtaattctccaccagccatgattgctattctatctcctaaaagatcagcttcgtccataaaatgtgtactgagcaatattgttcgaccctctttttgtttctgtaataattcccacaacactcgtctcgctgatggatccattccagcagtaggttcgtccaacataacaaccttcgaatttccacacaaggccattccaacacaaagttttcttttcattccccctgatagagtactggatttctccttcctctttggctccagatcaagcagcttgacgtatttatctatttctgctgttattttgcttttagacaaacctttgagtttgctgaagaagtacaagtgctcttcgacggtgagctcgtcgaaaatgatgttgtgttgtggacaaaggcccaagctattcctgactcctgcgatgtctaaccggatatcatgaccattgatttttgctgtgccgtttgttgggcttatcattcctgttaacatggacatcgtcgtagtttttccagctccgttgtgacccaacaaaactgtgatttgattttcaaacatatttaagcttagattccgtacagccgttttcttgccaaaagcttttttcagattgaatatctgaatcccaggtctaaggtttggttcggtttcaaagaattcatttgctgaatgatcattatagttattataatctgatacagctccttttccacaccagtatttctttgtgaatgggaagtaccatttttcagctactccatattctcctggaaatactgcctctatgtagagagcaattaataggtagattattgtgtttattatgatcattatccatattaatcccaggctcaaggtgtcatctggggtgtttggtttaaacagagtgctccaggtcacaccatctccagttccttcatacataagtacaacttgaaatccaaaagccatagcagtatttggcaacaaacttgttaatagcttagtagataatgcaagatcagtgtagttattctgcatgaagagataaggagcataagatatgaaccatgccaaacctgccatagttgctgcagtatttgctttggaaaagaagacgctcagagcaaagcaaaaagtgatcatagagcaacaatatagcaggagaaatacaaacaaaacgaatgggtctgcataggtgaatactgtgaattctgtattcgagtaccaccttactttgagaagtactaccataagtgctaccgaaattataacaaaaatgaagcacttgacaaaccaggccaaccaatgtagccaattaggtagtcccataattttcattgattcctttaactgtttttctttttctgtggtgatagatttgactgtatttatacaagtgtagacaaaactaagcatgacaatcattccaagcatgctcgtaagtgctgttagaagttgatcactgaaccaacttgcgaatggaaagcgttgcatttttatgagaggaaatggattagacttgtccatcaaaaaattaaatatttcctgtggatcttcgtgtgtaatacccttatctgctagaagaagagcagtagtcacaaaatgttgtacggccagaaatccttcagcaaaataatttggtgctgatccagtagcattgtcgggggatcttggaccagagctttgaaatacggggtacactaagttggtcctccaattttgacgcccaatcgaatctaattgatacactgtttctcctggaaatcttatattaacctctacattgtctctatcccctccaaactcgataccataataggatgagtttccagctaatgatattctttctaattcgcctgagcttattacacgctgagtgttgacttttggtattaacttaaagaagcctattacatcgtcgtagtatttatcttctggagcagtatataatattgtaaggctgaaattgctatcaccagcttgcatattactaaataatgatggtcctgcttgcacagcatctgggtcattacaaaaaagcggtaggctaaggttgaagtttccctcgaacgcacaaaatggcttatatattctttcatgttcatatgtcggatccgacaaacttctgatgtagactagaaggaatgaaaagagaacaggagcgacaatttctattatggtttgaattggttttctatattgcagcagccaattcttccacattaacaacaaaaatttatccaatttttctcccattattcctttattaccggtattagtgcaatttgatcagatctattcactcactacacttc

SEQ ID NO: 4039 - DNA, 5253 bp, Diabrotica virgifera
  SmartBlast Evalue=0; Info=ATP-binding cassette sub-family A member 7 n=1 Tax=Culex quinquefasciatus RepID=B0WSD3_CULQU
tttttatcttacataatacaaaaatatatacattagttttatttatgttttatttatatttcaattattattctaattcttcttcttaacatcgtcaccttctggattttggtgttttgtaaacgttaggaatacctgttctagactactttgtcccaaagaatagtcttcaatattcagatcacttcgcttagctctttctaatataccaaacatagtggaccatgccatggaagtgtcggttatataataatacaatagttcttgatgtttctctctaagatgagcataaggaaatttatctttgatatacttctccagtgactctgtatctgcatgtaccagaccaccgctctctggcaatttctttagttttatggttaaggtgtatccctccgcaaatttgtttttaagatgctgtgtggatccaagacatttgaaattgccgttcaccataatggctattcgagtgcacaaagcttcacattcttccatgctgtgagaagttagaacgatgcacttgccgttgtctcgaattttgcataatgaatcccacaggtaacgtttcgttgctggatccatacctgttgtaggttcgtccaaaaatagtactggcggatcccctatcaacgacaaaacagtacttaacttcctcttatttccaccgctcatctctttaactttcttgtccaaatgacgatgaaaatcgaagtctcgagacaagaaattcgcaattctttgggttcttttaaactctattcctctgagtaggcagtacatgataattgtttctcttgctgtcatatcatccagcaaagcgtcgaattgaggacagtagccgatgttccgttgtacttgcttcagttgagtttttacactctttccttcgatccatgcatcaccgtaagatacagtttcatctccgctcatcattttaaatgttgtagtttttcctgcaccattaatacccaacaaaccaaagcactcagacttttcaattccaatagacaacccattcacagctaaaaagttgttgtagtatttggttaaatctttcacgactaaaatgttagtttgacgtatatcatgatctgtggccatgtgaatcctttctttttctttggatacgtcgtcgtcttcgtcttgaatgagaattggttgtttcgggaagaatttttggttgatgtagtacatcagtctggctatgaatttgtattcgatgataaatagtaatattgaccacaagacaccagaaatcagtgagtacgttacattttttgcgataccattattgtccatgaaaagtagttgtcgttaagattggtacaaatatcagcgacagtggatggaaattttgaaatgcactcatctttagtaaaattattttgagcacacgagtcaaatactgtttcacaaagagtgttgtatgaatagatagcgtagcatttgtttattcctgtagctaaagaatagtgcgggaacacaagaaaaacgttatccaaggtttctcctatacgttttaggtttgtgctttgcgttttaagcacttcaactaaaagaaaagctgcattccctatgaatatacccacgagagtcatccttgtgtaacccgtcgatggaactgtgaatattaatgatgctacataataaattggcataaacgaccaaccaaacaaaagtaataggaaaaatagccgacccatatctccacttgtcttaaacccatcttgttggaaacaatatatagtgatcaataatactgaacataccagtaagtagacaaacatatcacaaattatattaacaaccaaaaaatgtaaaccttcactcctgatacaaactgcaggtgttttgacttggatacgttttctcttatcaagaatataacataaaatgatgagataaacgccatactgaatccaatattaaatgcaaactggaatccctgagattgtccaccaacaatgttgtctatttgggttgcagctttaaaaggtaatggtttgttaacaaattcaatatgtccgttagtgtagtgattgtaaacggaagacaaagccatgcctaaggcaataccaggtgagtggtaaggatcattgttaaaccatgccgtaataactggatgaattgtcttgatgataccaaattcaaattcttgctctgtgaaagttgatcctataatgtaacttctacgcactacgtttggattagttgcagtcaggtctaacattatacgggtaatattgtcaatgtttgttggagacattccatatccatttaaaacaccgtagaagttattcgtataattttgtggatcgtcaaatcgctcaattaaagtaatagggtcagtgaatcttgctaaatttaaaggcattgccggcaaaacagagggaacacttcctgaaggtacactcataactataataacgtttatcataggcaaaaatatctgaatcgccaacaaaacccatgatctaaaggttcctataatcttcttcataagcattgcgacgaactgattgacaatcaaatgtaaaccaccagtgtacgagggagataaagattctggacctaaatcagcagaagtgagtataggatttttttcttttttgtcctttttctgtttttcattgtaaatttcttcttgtccatggtctgcaccaactttcatgaaaacttcttccatagtggttaaagaaataccatagctcctgattccaagttcatttgattcttgttctatttgttttaacattgcttcgaatacaggagcattattttcagataacaagtaagttagttcacttccaacattgctatggatctctatctctggtataaacttcttcagcagttctgtaactttatgtggattgcaagttttcgctttatccataataagactgtatcccgcaccgtacttcttcttcaagaagaagctggatccacagcattgtaattctccaccagccatgattgctattctatctcctaaaagatcagcttcgtccataaaatgtgtactgagcaatattgttcgaccctctttttgtttctgtaataattcccacaacactcgtctcgctgatggatccattccagcagtaggttcgtccaacataacaaccttcgaatttccacacaaggccattccaacacaaagttttcttttcattccccctgatagagtactggatttctccttcctctttggctccagatcaagcagcttgacgtatttatctatttctgctgttattttgcttttagacaaacctttgagtttgctgaagaagtacaagtgctcttcgacggtgagctcgtcgaaaatgatgttgtgttgtggacaaaggcccaagctattcctgactcctgcgatgtctaaccggatatcatgaccattgatttttgctgtgccgtttgttgggcttatcattcctgttaacatggacatcgtcgtagtttttccagctccgttgtgacccaacaaaactgtgatttgattttcaaacatatttaagcttagattccgtacagccgttttcttgccaaaagcttttttcagattgaatatctgaatcccaggtctaaggtttggttcggtttcaaagaattcatttgctgaatgatcattatagttattataatctgatacagctccttttccacaccagtatttctttgtgaatgggaagtaccatttttcagctactccatattctcctggaaatactgcctctatgtagagagcaattaataggtagattattgtgtttattatgatcattatccatattaatcccaggctcaaggtgtcatctggggtgtttggtttaaacagagtgctccaggtcacaccatctccagttccttcatacataagtacaacttgaaatccaaaagccatagcagtatttggcaacaaacttgttaatagcttagtagataatgcaagatcagtgtagttattctgcatgaagagataaggagcataagatatgaaccatgccaaacctgccatagttgctgcagtatttgctttggaaaagaagacgctcagagcaaagcaaaaagtgatcatagagcaacaatatagcaggagaaatacaaacaaaacaaatgggtctgcataggtaaatacagtaaattctgtattcgagtaccaccttactttgagaagtactaccataagtgctaccgaaattataacaaaaataaagcacttgacaaaccaagccaaccaatgtagccaattaggaagtcccataattttcattgattcctttaactgtttttctttttctgtggtgatagatttgactgtatttatacaagtgtagacaaaactaagcatgacaatcattccaagcatgctcgtaagcgctgttagaagttggtcactgaaccaacttgcgaatggaaaacgttgcatctgtatgagaggaaatggattagacgcgtccatcaaaaaattaaacattccctgtggatcgtcgtgtgtaatacccttatctgctagaagaagagcagtagtcacaaaatgttgtacggccagaaatccttcagcaaaataatttggtgctgatccagtagcattgtcgggggatcttggaccagagctttgaaatacggggtacactaagttggtcctccaattttgacgcccaatcgaatctaattgatacactgtttctcctggaaatcttatattaacctctacattgtctctatcccctccaaactcgataccataataggatgagtttccagctaatgatattctttctaattcgcctgagcttattacacgctgagtgttgacttttggtattaacttaaagaagcctattacatcgtcgtagtatttatcttctggagcagtatataatattgtaaggctgaaattgctatcaccagcttgcatattactaaataatgatggtcctgcttgcacagcatctgggtcattacaaaaaagcggtaggctaaggttgaagtttccctcgaacgcacaaaatggcttatatattctttcatgttcatatgtcggatccgacaaacttctgatgtagactagaaggaatgaaaagagaacaggagcgacaatttctattatggtttgaattggttttctatattgcagcagccaattcttccacattaacaacaaaaatttatccaatttttctcccattattcctttattaccggtattagtgcaatttgatcagatctattcactcactacacttc

SEQ ID NO: 4040 - DNA, 5152 bp, Diabrotica virgifera
  SmartBlast Evalue=4E-37; Info=Salivary secreted protein n=1 Tax= Glossina morsitans morsitans RepID=D3TLY5_GLOMM
aaaaaatttattaaataatattgacataaactaaaattatatagtaacagtgaaataaacaaaataaaaagaaatattcacaaaataatatatatgcaaaggtgtatgaatgaaaagtaatgcgaaaactaacacccagatgaggtgtgaacaggactgttaatatataatgataaaggcctcatataatatacatctacatttaagagaatggattttccacgcgcatattttttaaaactgcaaattagccttaaaataaaaactctagatttctttctaccaataagatcgtcttggttaacgtttcctggatgatttactactacttatgtatgttatagcaaacagctttgaatatattcttaatattccgttaagcggaattgatgggaatgttaaaaagctaaatattttggaattgtatcagttgacaaatacatgttaagactatttgttttaaaaaaagtttcaaatgaactctactgcatcatgttacacttaattttccaaaaatagatatagcggatgttttaatagttacattcaaaggttcttatatattatgtcgcttcgattgtatatcctctactatccatcagtgatctacagagcgcaagcgatctgaaaaagaagctggaaaaagagggactaagatgtctcgactatataagcattgacacttcaaactttaaagtatctgaatatttattaggagcacactactaaaataacggtaatttcttgaatttttttgtatacattgaaattgtggaatagtgactgcttaaaaatttggaccaaaaatttggcaagtacagtcgaggtacgcaagattgaagtcattttcgtccttttttgcaagaacccaaccctcggaattcctcaccttagaactcgtgcaaaacttgcacagaaaaagtcggaatgcacactatatttatttatgaaatgcaaactaatgattgaaaacgatcggtcatacacatatattatgtgtcacataactttggagaggtgttaggacactcataaaaactaaaaatagtaaaaacaaagaacgtcttttcctcttagttcataaaggagcaaaattaggaaagaaaaccctatcccaccaacacctcttgtaaaaatataaacggttaaaatgagcagtggatcttatgtgtcaaattcacgtctattccacgaattttctgtttaaccttcggatgaccaagggggtaaatttggatcccagcgtatgtttttctttaataaattcaaaagtattttcaatttttaactcattatttttttattcgactttaatatcattctagatatcctcatatttcgaaataaaaaaattccatatattttacgaataaaaaatatattctgaagttgatgtttagtaatataccgtctattatgtggaattccaagtagttttacactgcgcgttatcaaaatctattttttagactgtggtgcctgttatgtacgaatcatgacattcctgtctgctacagttattattattccctggcgtatattattaaagtttcttagtattttgtgtacatataagttatggcccgcaaatatcttactgaggctgagttacaggaaattgttactgctagcgatttttatgataatatagaactaagatgaaatagtatcagaaaacgaggatgtattgttagatgaagatttaaatgctgaaaacattcattccaggtcatttttgacctggggtcattttttacctccgttggccatccgtgtaacaaaaaaaggttggtaatcggaaggttaagtaaagtgtagatctttggttgtatgtatagttacttttgtttcatctaaaagttatctatttacattaaccatataaaatgtttctgaaatattcttgaagaactgaaaatagttattcccagtttttttatagataaattctcacttctaattgaaaatctaatataaattcaaagtaaatactatttcattccatcgcttaagatttccaaagaatgtctccaactaaaatcagtttggtaaaatcttgttttgttacaagtgtacaaatgtttgatgcaaaatatctattatgaggttgtactaaattgtaagtatatttaaaaataaaaaatactgtagctgcttaaagaagcattcgggaaaaaaatttcttaatttcccccaaaaactttaaaattaaattaatagctttgtcttatatgtgttatatctgcttataataccaccacacttaagtttaaaaatcttccaatgattgttttatggatttttatgacaaatatgttgtttgtttacgaacttttgtaaagtttagaattttaaaaatttgtgttggtcgagacagtgtctaatagggaacttgcacatttttgttttattacatagtaatgttcagtttcgtttaaaaataagatttccaaaatttcacgcatcaaaacctcatagtaacttctaataagaagtacaaatttaaaatcttctgtgtatttaaatcatttcaaacgatcgaaaaagcgcgcgaccctttgtgacgtcatatcataatatttttaatggcatttctcatgtctcataaaaaattatttccattttgtttacttatgagtttaatacagtttttgaagagatagtattgaaatgtgtgtgttgttaccatggaaaatgtcctaaaagcaaacactgcaagtgtcgtttagtacaacaaagttttctatgtgagatcatcttttttaatgtaattatttaatatctgctgcctgcttaactagttttttgtttaataaatcaagtgtattttgaacataagaaaatataacttttggtatattttggtaggtgtacattacagattgaatgatatttgcctatacaatatttttctggaattatttttactataaaattaaaataaactaataataatagagatttatgttcatgatgggtaagttatcatactgccctttagaaaaatcctctccggtcattaaaaaaaaacgtcttaacaaaaactctcaaatattatgaaatatttaattcacagcaactatttaaagatttataaaactgagatataccataaaatgattacaacaagtaaacgaatatcaaacataatgaattaatggcgcggacctcaaacattataatgatatgacgtcaggaccaatgagggtgtgttttggactggctgctataatttgaattatctctcgattttaatcgtctttagaggccaaactaaagacaaaaacaactttttttttctttgatatatattttaaattatgttttgttgtgatttatagcatttttttcgaatttaaaattttatgcaagttccctattgccctcaaataaccttaaactttggaatcttgccacaaaacgttgtggttgtcacatgaaactggacaaaaagagaagcgctgagcagtgaaattgaggcagctctatttagctgaaatctacaagtaccgatcagaaagacatagagtgcaatattatataatatattctattcttatttatcgaatgaaccgagtacgtctccagaaaaattcgtggatcatatgaagtactttttcatctgtatccattatcacaaaaatcgaaaaaacgatgacatataaatgaaaaaacagtccacaaataaaaacttaatttttttttaacaatgcaataatatatgaacaggagtgtacattttctctttattcttatgttataaatatatacaatggtatgacattttgttcacgttaaatatcagcccatttagttgcataacaatgattttacaatatctacatattttaagtactaaaaattataagtaacggaaaacttcttcaaaaatagaaaacaacatgcatatttaacctacaataaaaaggctgttatctaaggcaaaccagtgggaaggctttttaacaatttaaacctaacctaaattttagtttttttgtacagtacctccaaacaccttcgagcgaaatgttgttgaggcgaatagtcccaactacacatgacgaatataactgtttaacttctatatagttcttaactttatattctattttattatgctgtactgctttttacctcttgtctagttcttcactgtctgtgccttaggtttgcatctttcccgtggtctggtgtattcttttggtctggactttggtctgtatcactttcttcgagttcggtcttattacgtttcttctcatatactataataatggcacataaaatgataacttcggcgcatattcctaagaaaggccaaagggcggcatatttatctttaatcctaaccatacattcagattggattgatttgttagtagcggcgtccacgccccctatgcatgtgactattcctcggtcgtcctttgttatgccttctactataaacattccatttaccacgactttaccatcttcggtgtaattctcaagagtaacgcggccttcagaaatgttgtaggtttgattattgaacgtccatgataactttgcatcacctaaaactttgcactgtattcttaatttctcttcttcaactacgttgatgtttgcgggtactttgacaagtaccgcccttgtcactctaatttcagcatatacttcgtctggcttgccgggatttgcaacacacttatagttaccagcaaaatcatcttttgggtctgacagtgtcaatgtgacctgacttttttctttactataagatgattttacatttttaagggcatctatcttcgttacctcgacatcatttctcgtccatatgatctctggtgttccgtctgcttcggatacattacaagatatcgtaaactgatgttttggtgtaaatattacagttttttctttagccgctagttgaattgaaaatacggagctgatgaaaaatagaaaattcaaggtaacacaaaacacaaaatttttcattttctaaattgtttttggcctaaattgtttgctacaccattaacaacacgtctttgttacaccgaacacacaccacacgcacactatctttgtcgtcctcgcattaattcactcaaaaaggacaatataaaatggcgataatcaaccaaagacagtcacg

SEQ ID NO: 4041 - DNA, 4446 bp, Diabrotica virgifera
  SmartBlast Evalue=3E-37; Info=Salivary secreted protein n=1 Tax= Glossina morsitans morsitans RepID=D3TLY5_GLOMM
aaaaaatttattaaataatattgacataaactaaaattatatagtaacagtgaaataaacaaaataaaaagaaatattcacaaaataatatatatgcaaaggtgtatgaatgaaaagtaatgcgaaaactaacacccagatgaggtgtgaacaggactgttaatatataatgataaaggcctcatataatatacatctacatttaagagaatggattttccacgcgcatattttttaaaactgcaaattagccttaaaataaaaactctagatttctttctaccaataagatcgtcttggttaacgtttcctggatgatttactactacttatgtatgttatagcaaacagctttgaatatattcttaatattccgttaagcggaattgatgggaatgttaaaaagctaaatattttggaattgtatcagttgacaaatacatgttaagactatttgttttaaaaaaagtttcaaatgaactctactgcatcatgttacacttaattttccaaaaatagatatagcggatgttttaatagttacattcaaaggttcttatatattatgtcgcttcgattgtatatcctctactatccatcagtgatctacagagcgcaagcgatctgaaaaagaagctggaaaaagagggactaagatgtctcgactatataagcattgacacttcaaactttaaagtatctgaatatttattaggagcacactactaaaataacggtaatttcttgaatttttttgtatacattgaaattgtggaatagtgactgcttaaatatttggaccaaaaatttggcaagtagagtcgaggtatgacagattgaagtcattttcgtccttttttgcaagagcccaaccctcagaattcctcaccttagaactcgtgcaaaacttgcacagaaaaagtcggaatgcacactatatttatttatgaaatgcaaactaatgattgaaaacgatcggtcatacacatatattatgtgtcacataactttggagaggtgttaggatactcagaaaaactaaaaataataaaaacaaagaacgtcttttcctcttagttcataaaggagcaaaattaggaaagaaaaccctatcccaccaacacctcttgtaaaaatataaacggttaagacaagcagtggatcttatgtgtcaaattcacgtctattccacgaattttctgtttaagtaaattgtagatctttggttgtatatatagttacttttgtttcatctaaaagttatctacattaaccatataaaatgtttctgaaatgttattgaagaattaagatttccaaagaatgtctccaactaaaatcggtttggtaaaatcttgttttgttacaagtgtacaaatgtttgatgcaaaatatctattatgaggttgtactaaattgtgagtatatttaaaaataaaaaatactgtagctgcttaaagaagcattcggaaaaaaaaataatttcttaatttcccccaaaaactttaaaattaaattaatagctttgtcttatatctgttatatctgcttataataccaccacactcaagtttaaaaatcttccaatgattgttttatggatttttaggacaaatataagttgtttgtttacgaacttttgtaaagtttagaattttaaaaatttgtgttggtcgagacagtgtctaatagggaacttgcacatttttgttttattacatagtaatgttcagtttcgtttaaaaataagatttccaaaatttcacgcatcaaaacctcataaagaagtacaaattttgaaatcttctgtgtatttaaatcatttcaaacgatcgaaaaagcgcgcgaccctttgtgacgtcatatcataatatttttaatggcatttctcatgtctcataaaaaattatttccattttgtttacttatgagtttaatacagtttttgaagagatagtattgaaatgtgtgtgttgttaccatggaaaatgtcctaaaagcaaacactgcaagtgtcgtttagtacaacaaagttttctatgtgagatcatcttttttaatgtaattatttaatatctgctgcctgcttaactagttttttgtttaataaatcaagtgtattttgaacataagaaaatataacttttggtatattttggtaggtgtacattacagattgaatgatatttgcctatacaatatttttctggaattatttttactataaaattaaaataaactaataataatagagatttatgttcatgatgggtaagttatcatactgccctttagaaaaatcctctccggtcattaaaaaaaaacgtcttaacaaaaactctcaaatattatgaaatatttaattcacagcaactatttaaagatttataaaactgagatataccataaaatgattacaacaagtaaacgaatatcaaacataatgaattaatggcgcggacctcaaacattataatgatatgacgtcaggaccaatgagggtgtgttttggactggctgctataatttgaattatctctcgattttaatcgtctttagaggccaaactaaagacaaaaacaactttttttttctttgatatatattttaaattatgttttgttgtgatttatagcatttttttcgaatttaaaattttatgcaagttccctattgccctcaaataaccttaaactttggaatcttgccacaaaacgttgtggttgtcacatgaaactggacaaaaagagaagcgctgagcagtgaaattgaggcagctctatttagctgaaatctacaagtaccgatcagaaagacatagagtgcaatattatataatatattctattcttatttatcgaatgaaccgagtacgtctccagaaaaattcgtggatcatatgaagtactttttcatctgtatccattatcacaaaaatcgaaaaaacgatgacatataaatgaaaaaacagtccacaaataaaaacttaatttttttttaacaatgcaataatatatgaacaggagtgtacattttctctttattcttatgttataaatatatacaatggtatgacattttgttcacgttaaatatcagcccatttagttgcataacaatgattttacaatatctacatattttaagtactaaaaattataagtaacggaaaacttcttcaaaaatagaaaacaacatgcatatttaacctacaataaaaaggctgttatctaaggcaaaccagtgggaaggctttttaacaatttaaacctaacctaaattttagtttttttgtacagtacctccaaacaccttcgagcgaaatgttgttgaggcgaatagtcccaactacacatgacgaatataactgtttaacttctatatagttcttaactttatattctattttattatgctgtactgctttttacctcttgtctagttcttcactgtctgtgccttaggtttgcatctttcccgtggtctggtgtattcttttggtctggactttggtctgtatcactttcttcgagttcggtcttattacgtttcttctcatatactataataatggcacataaaatgataacttcggcgcatattcctaagaaaggccaaagggcggcatatttatctttaatcctaaccatacattcagattggattgatttgttagtagcggcgtccacgccccctatgcatgtgactattcctcggtcgtcctttgttatgccttctactataaacattccatttaccacgactttaccatcttcggtgtaattctcaagagtaacgcggccttcagaaatgttgtaggtttgattattgaacgtccatgataactttgcatcacctaaaactttgcactgtattcttaatttctcttcttcaactacgttgatgtttgcgggtactttgacaagtaccgcccttgtcactctaatttcagcatatacttcgtctggcttgccgggatttgcaacacacttatagttaccagcaaaatcatcttttgggtctgacagtgtcaatgtgacctgacttttttctttactataagatgattttacatttttaagggcatctatcttcgttacctcgacatcatttctcgtccatatgatctctggtgttccgtctgcttcggatacattacaagatatcgtaaactgatgttttggtgtaaatattacagttttttctttagccgctagttgaattgaaaatacggagctgatgaaaaatagaaaattcaaggtaacacaaaacacaaaatttttcattttctaaattgtttttggcctaaattgtttgctacaccattaacaacacgtctttgttacaccgaacacacaccacacgcacactatctttgtcgtcctcgcattaattcactcaaaaaggacaatataaaatggcgataatcaaccaaagacagtcacg

SEQ ID NO: 4042 - DNA, 4469 bp, Diabrotica virgifera
  SmartBlast Evalue=0; Info="Alpha-actinin-4, putative n=3 Tax= Neoptera RepID=E0VM19_PEDHC"
gtcgggctcgggccaaagtggggaagagtgcgcgtgaggtcgtgtgctttcagcacggcggttttttacatctgtcgaacgaattttttataaacgaatcttttagcatagcaagcattttgtgcattttttgcaatcatgatgaccgacggatacaataacgtcgatcaggcagcctacgatggctacatggaacaagaggaagagtgggaacgagaaggacttctcgatccagcttgggaaaaacaacaaaaaaagacattcacggcatggtgcaacagccatttgagaaaggccggcacaggcatcgacaacatcgaagaagacttccgaaatggtctgaaacttatgttgctgttggaagtaatatccggagagacactaccgaagcccgaccgtggcaagatgagattccacaaaatcgccaacgtcaacaaggccctggatttcatcgctagcaagggagtcaaattggtatcaatcggcgcagaagaaattgttgacggaaacttgaaaatgacacttggtatgatttggactatcattctccgattcgccatccaggatatctccgtcgaagagatgactgccaaagaaggtctcctgttatggtgtcaaagaaagactgccccatataaaaacgtcaacgtacaaaacttccacctgtcattcaaagacggtttggcattctgcgctcttatccatcgtcaccgaccagatctcattgactacaataaactgtcaaaagataatcctctagaaaacctcaacactgccttcgatgttgccgagaagtatctcgacattccaaggatgttggatccagatgatctgatcaacactcctaaacccgacgagcgtgctatcatgacttacgtgtcatgctattatcacgctttccaaggggcacaacaggccgaaaccgccgcgaacagaatctgcaaagtactgaaagtcaaccaagaaaatgaacgtcttatggaagaatacgaacgtttggcaagcgatcttttggaatggattcgtcgtaccatgccatggttgaattcccgccagacggataattcactcgctggcgttcagaagaaattagaagagtaccgtacgtatcgtcgcaaacataaaccaccacgtgtggaacaaaaagcaaaactggagactaacttcaacaccctccaaaccaagttaagactgtcaaacagacccgcctacatgccaacagaaggaaaaatggtttcggatattgctaacgcctggaaaggccttgaacatgccgaaaaatccttcgaagaatggctcttatctgaaatgatgcgtctagaacgtttggaacatttagcccagaaattcaaacacaaggcagatgcgcacgaagaatggacccgcggaaaagaagaaatgctccagagccaagacttcagacaatgccgtcttaacgaattgaaggcgttgaagaagaagcacgaagctttcgaatctgacttagctgcccatcaagaccgagtggaacagatcgccgccattgcacaggaattaaatactcttgaataccacgacagcgtgagcgtcaatgcaagatgccagcgtatctgcgaccaatgggacaggctcggagctctaacccaacgtcgtcgccaagctttagatgaagcagaaagaatcttggagaagatcgacatcctccatctcgaattcgccaagcgtgcagctcctttcaacaactggttggacggtactagagaagacttggttgacatcttcattgtacacacggtcgaagaaattcaaggcttgattgatgcccaccatcactttaaggcaacactaggagaggccgacaaagaataccaaagcattgtaggacttgttagagaagtagaatctattgttaagcaacatcaagtacctggtggactagaaaatccctacacgacattgacagctcacgatttgaccagaaaatggggagaagttaggcagttggtgcctcagagagatgccacactccaagccgaacttaggaaacaacagaataatgaaatgctcaggcgtcaattcgccgagaaggctaacggtgttggaccatggatagaacgtcaattggacgctgtaactgctatcggtatgggactccacggtacactagaagatcaattgcatagacttaaggaatacgaacagggtgtatatgcttacaaaccacacattgaggaattggagaagatccatcaagccgtacaagaaagcatgatctttgaaaacagatatactcaatacacaatggaaactctccgtgtcggatgggagcaactcctaacctcaatcaaccgcaatatcaatgaagtcgaaaaccaaattttgacccgtgattctaagggtattacacaagaacagctcaacgaattcagatcttccttcaatcacttcgataagaacagaactggtcgcttgacacccgaagaattcaaatcgtgcctagtctctttgggctattccattggaaaagacagacaaggagacatcgatttccagagaattttagccgtcgtagatccaaatagcactggatatgtacacttcgatgcgttcttagatttcatgactagggagagcacagacacagatacagctgaacaagtcattgatagtttccgtattttagctgcagacaagccatacatcttgcccgatgaattgagaagagaactaccaccagaccaagctgaatactgcatccaacgtatgcccccatacaagggacccaacggtgttcccggagctcttgactacatgtccttctcaacggctctttatggagaatcagacctttaaacgttgttttaaatataaatatatcaaaaacacccatcgtactcacggtgatattatcaaagccatattagggttgtcaaaagatcccttacattaacaaaaaatgttacatatatttatttttcttaaaaaatattgaaatatcgatttgtaatgctaaatttcacacatatcagttgtagtgatagaacctactgaatgttgtaatattgctgtgagacaactacactaccaacgagtttctacaaactagtgttgatagataccaactgtatcagatattgtgccaatactttttgatttttgcaaaaattgttattgtctatgttaaattaagtcttcgtaagatgatgttgctatgatatagcgtggtataaacggtatagttgttgcattgtgatattaccttgtttagtgggatgtcccttgtttaaaacaggcttgccagctaaacgacacttgataaaatcaagttgaaaatcgaattcatcgaatttttttttgttttggcttctttttttttctttcagattgaaaacacgttcaccgtttcatcattgttccctcccgtatagaccacctttattatgtactttttttgcaagtgctcagatatttatttatttacttttaggcttgaagtgtacagattttattatttttgagtaaatgctctttattatcgtagattttaagctcaaccttataacttttagttcaaacatggaatgtaataaagagcttttactattatatatattattttttggttggagtttatgtaatgtaaaataaagtatttgcccaaagtatactaacttatataagtaatgagaaataaaatatatttgattcgaaataatttatttttaattttatggggtcgatgattttgttagaatactatctttgcctttttatcactgcagcctaatagcaatgtaaggaagcacccttagctacaagaacgatagctattttcagaatagtgtctctgacaaatacatgattgaatttaatgctatatggtgtattttgccttataaaattctgaaaatgtaaataacatctcatctctttttgccctcttaggcgtctgattttttatccaacttaggtatttattcaattataaaaaatatccaatccgtttaggtacattattaaaaacaataataaaaatacttgtttttatcttgtaaatattgataataccttcatcaaattatatactcttaaaatttaaaagagtgttagtttttctctatgattcaaccttcataagttaggtggtagacttatctatggttcgatggttagctagtacttgtacattcgaatctttctagctggattgaaatgggtgcagtaataacctgtgtataaaataacttgctgaaatctgcggtttcttgaaaaacatcataaacattcaaatttattgaacagacatataaactagtataaaagatatgcagattatttttctgagaaaaatggacattttttcaattccaaactaatgccaacgctgacattatctcagttagagcagatattcttagattttgatagttttaaagaaaaaaaaacaaaaaattaaaaatgatctgtctctaccattattttgcaatcgt

SEQ ID NO: 4043 - DNA, 4469 bp, Diabrotica virgifera
  SmartBlast Evalue=0; Info="Alpha-actinin-4, putative n=3 Tax= Neoptera RepID=E0VM19_PEDHC"
gtcgggctcgggccaaagtggggaagagtgcgcgtgaggtcgtgtgctttcagcacggcggttttttacatctgtcgaacgaattttttataaacgaatcttttagcatagcaagcattttgtgcattttttgcaatcatgatgaccgacggatacaataacgtcgatcaggcagcctacgatggctacatggaacaagaggaagagtgggaacgagaaggacttctcgatccagcttgggaaaaacaacaaaaaaagacattcacggcatggtgcaacagccatttgagaaaggccggcacaggcatcgacaacatcgaagaagacttccgaaatggtctgaaacttatgttgctgttggaagtaatatccggagagacactaccgaagcccgaccgtggcaagatgagattccacaaaatcgccaacgtcaacaaggccctggatttcatcgctagcaagggagtcaaattggtatcaatcggcgcagaagaaattgttgacggaaacttgaaaatgacacttggtatgatttggactatcattctccgattcgccatccaggatatctccgtcgaagagatgaccgccaaagaaggtctcctgttatggtgtcaaagaaagactgccccatataaaaacgtcaacgtacaaaacttccacctgtcattcaaagacggtttggcattctgcgctcttatccatcgtcaccgaccagatctcattgactacaataaactgtctaaagataatcctctagaaaacctcaacactgccttcgatgttgccgagaagtatctcgacattccaaggatgttggatccagatgacttacagaacacagctatgccggatgaaagagccgtaatgacgtacgtgtcttcttattaccatcgcttctcaggtgcacagaaggccgaaaccgccgcgaacagaatctgcaaagtactgaaagtcaaccaagaaaatgaacgtcttatggaagaatacgaacgtttggcaagcgatcttttggaatggattcgtcgtaccatgccatggttgaattcccgccagacggataattcactcgctggcgttcagaagaaattagaagagtaccgtacgtatcgtcgcaaacataaaccaccacgtgtggaacaaaaagcaaaactggagactaacttcaacaccctccaaaccaagttaagactgtcaaacagacccgcctacatgccaacagaaggaaaaatggtttcggatattgctaacgcctggaaaggccttgaacatgccgaaaaatccttcgaagaatggctcttatctgaaatgatgcgtctagaacgtttggaacatttagcccagaaattcaaacacaaggcagatgcgcacgaagaatggacccgcggaaaagaagaaatgctccagagccaagacttcagacaatgccgtcttaacgaattgaaggcgttgaagaagaagcacgaagctttcgaatctgacttagctgcccatcaagaccgagtggaacagatcgccgccattgcacaggaattaaatactcttgaataccacgacagcgtgagcgtcaatgcaagatgccagcgtatctgcgaccaatgggacaggctcggagctctaacccaacgtcgtcgccaagctttagatgaagcagaaagaatcttggagaagatcgacatcctccatctcgaattcgccaagcgtgcagctcctttcaacaactggttggacggtactagagaagacttggttgacatcttcattgtacacacggtcgaagaaattcaaggcttgattgatgcccaccatcactttaaggcaacactaggagaggccgacaaagaataccaaagcattgtaggacttgttagagaagtagaatctattgttaagcaacatcaagtacctggtggactagaaaatccctacacgacattgacagctcacgatttgaccagaaaatggggagaagttaggcagttggtgcctcagagagatgccacactccaagccgaacttaggaaacaacagaataatgaaatgctcaggcgtcaattcgccgagaaggctaacggtgttggaccatggatagaacgtcaattggacgctgtaactgctatcggtatgggactccacggtacactagaagatcaattgcatagacttaaggaatacgaacagggtgtatatgcttacaaaccacacattgaggaattggagaagatccatcaagccgtacaagaaagcatgatctttgaaaacagatatactcaatacacaatggaaactctccgtgtcggatgggagcaactcctaacctcaatcaaccgcaatatcaatgaagtcgaaaaccaaattttgacccgtgattctaagggtattacacaagaacagctcaacgaattcagatcttccttcaatcacttcgataagaacagaactggtcgcttgacacccgaagaattcaaatcgtgcctagtctctttgggctattccattggaaaagacagacaaggagacatcgatttccagagaattttagccgtcgtagatccaaatagcactggatatgtacacttcgatgcgttcttagatttcatgactagggagagcacagacacagatacagctgaacaagtcattgatagtttccgtattttagctgcagacaagccatacatcttgcccgatgaattgagaagagaactaccaccagaccaagctgaatactgcatccaacgtatgcccccatacaagggacccaacggtgttcccggagctcttgactacatgtccttctcaacggctctttatggagaatcagacctttaaacgttgttttaaatataaatatatcaaaaacacccatcgtactcacggtgatattatcaaagccatattagggttgtcaaaagatcccttacattaacaaaaaatgttacatatatttatttttcttaaaaaatattgaaatatcgatttgtaatgctaaatttcacacatatcagttgtagtgatagaacctactgaatgttgtaatattgctgtgagacaactacactaccaacgagtttctacaaactagtgttgatagataccaactgtatcagatattgtgccaatactttttgatttttgcaaaaattgttattgtctatgttaaattaagtcttcgtaagatgatgttgctatgatatagcgtggtataaacggtatagttgttgcattgtgatattaccttgtttagtgggatgtcccttgtttaaaacaggcttgccagctaaacgacacttgataaaatcaagttgaaaatcgaattcatcgaatttttttttgttttggcttctttttttttctttcagattgaaaacacgttcaccgtttcatcattgttccctcccgtatagaccacctttattatgtactttttttgcaagtgctcagatatttatttatttacttttaggcttgaagtgtacagattttattatttttgagtaaatgctctttattatcgtagattttaagctcaaccttataacttttagttcaaacatggaatgtaataaagagcttttactattatatatattattttttggttggagtttatgtaatgtaaaataaagtatttgcccaaagtatactaacttatataagtaatgagaaataaaatatatttgattcgaaataatttatttttaattttatggggtcgatgattttgttagaatactatctttgcctttttatcactgcagcctaatagcaatgtaaggaagcacccttagctacaagaacgatagctattttcagaatagtgtctctgacaaatacatgattgaatttaatgctatatggtgtattttgccttataaaattctgaaaatgtaaataacatctcatctctttttgccctcttaggcgtctgattttttatccaacttaggtatttattcaattataaaaaatatccaatccgtttaggtacattattaaaaacaataataaaaatacttgtttttatcttgtaaatattgataataccttcatcaaattatatactcttaaaatttaaaagagtgttagtttttctctatgattcaaccttcataagttaggtggtagacttatctatggttcgatggttagctagtacttgtacattcgaatctttctagctggattgaaatgggtgcagtaataacctgtgtataaaataacttgctgaaatctgcggtttcttgaaaaacatcataaacattcaaatttattgaacagacatataaactagtataaaagatatgcagattatttttctgagaaaaatggacattttttcaattccaaactaatgccaacgctgacattatctcagttagagcagatattcttagattttgatagttttaaagaaaaaaaaacaaaaaattaaaaatgatctgtctctaccattattttgcaatcgt

SEQ ID NO: 4044 - DNA, 4016 bp, Diabrotica virgifera
caacctaatctgaaaccacatatgctcatagaaatagttgcacacaaaaatactgaatatagtgtagaatgttgatatgtataccccaaaacaacaagtctacatatagtaaattctaaaaggaaaaccgtttaaaggagtcgactaacgaaaacttgtattttatgtatttagtgcttttccaccttaatttaatgattcattacttttattttttagtcaaaacactcttaaaagctgaaatcaagtttgcatagcatctggatctggccactgccatttttgggtaaagcatctaaaatcgtctttccaacttgaatattagttctatctactagcgtttagcatctacggggtgtataaaataataggtgtcgccaaatatatagtataatatctctaacgtgctatttactaagagtataagtcgtaataaagacctttctgcattcttctatattttgaacttaaaaattatgtaattatcaaaacagaaagtaaaatagttaattactacaattatggatcatatttcatcaccattttgatatttagttgtaagttgtaataattatttcagcagagagcataaaaaatattcatttttgacttataatacctactcttaatatatagaacgataaatttacaaagtaacatttagtttttaatagggatattgtagacctagatttcatatattaaagtgatcaaaaaactcagaaacaatttgttacttgcctataataaaaagagtatttagtgataccttattgcagttcttgcgtggtgaaagtttatatttatttataaaatcaatactttttgaaaaagtgttaatacgatacaggatcaatcttaataacccaaaagtgtatgataagttgatgatgaatctttaaaaccagaagtgccatagttccaacagcaaaaaatataaaatgttcattttatttataatatttcagttacataatagataaaatgttctattgtcactaaaggcaaaaacccgaaagatgtggctttactctatcgacaaagaaagggacctttttggaagcgagtaaactgccagtaaaggaaataattatcttggtggcggcaactttattacatttaaagccacgaatttctaaaggaagagttaataatgtgtaccacctgaatcctttctaaaatgtattttatgtctctttggcactgcctccttaaattttagtttacttagcgtttccatttcttctcgtaattctttaatttctgctttcatttgcgtattttctgctcttagttcactcatttctttgaggtattcacggagtttaattaatgttcagttttcatttctttaatttattccagcacctcgtcctttttcctgttccttgtagtcgccgttcgcaaatttatggcgccaggggtggtttcccagtcaatccatcggagaatttcagccctacctcaaaaatgccgattattgttgttttggctcttcaaaaatgtataatagccttgacaaagactattataaatttaaaggacctgcttcggtcttaaaagaaaaatcaaccaaagtatcaactactgtttcaaaacaaaataaaaccaagtgatacaatatcagaataattaggaccgagttcagtcactaactcactactctcactcactagtgactacgacttgtgaaagttttgattaaatttaaacaggggtatataaataaatattttgtgaacttttgaacaacagatcattttgaagatattaaaaatgtttatattttatataagaaacgcaatttaaaggacctgcttcggtcttaaaagaaaaatcaacaaaagtatctgtagtatcgtgagaaacagtgtagacacggcttaacacatgtagacttggcttaacgcatgtgacagccgttggacacactggttcccgcacaaatgggtgcggctatgttttatagaagatagacttaaccttagttagatattagatggtagtcaacgtttgtttttacataaatgtaataaagtgtttaacgacaacctagagccatcttgttatttatttactgctcctcgattacattagtatcaactactgtttcaaaaaaaaaataaataaaaccaagtgatacaatatcagaataattaggaccgagttcagtcactaactcactactctcactcactagtgactacctgactacgacttgtgaaagttttgattaaatttaaacaggggtatataaataaatattttgtgaacatttgaacaacagatcattttgaagatattagaaatgtttatattttatataagagcgccagcatatggctcaatttactaataatagtaacattacctccaaaatccgatttttcatcttctcaaaaaaacctttggattggcgaataggcgaatgctgattacgcaaaacaactgaaaatagtttaggacacgaaaaagaaagggaccttcttggaagcgagtaaactgccagtaaaggaaataattatcttggcaactttcttacatttaaagccacggatttggctttggactctggagggaatttggaccaccattcccaagtatggaataaggaaagaccattttgtgggttatcttgaaaaattttacttcaaaagaagattttctgatcggaagaagaggatgcatgcattctttaccgctgtcgcatcgttatatccatacccaccaagttattaggattgcatccatctgtttaacttaagtaattttcattaaatttttagatcttttaaaggttgaaactggcaacacggtcaaatgtaacgaaaaacttcttggcgcatgtccgacatatcgcacttccgttcaaagagtgtcataagtcaaaaatgaaaagtttcgagaaaacgacgtttaaagtttgtcctacaacattttcgggtttaattcaaaaactattaaaattagaataactattttagtcagttgcaatggtttttgaagctgtataaaatagcgtattaagtatattaaaaatatttaaaaaaatcattttctttttgagttgtgacactatacagataaaataacgaaaaatttacgaaatattatttatcaaaagtgacacttgcagtacagaatataatattattattgtctggttaacagacttataccttttaatgatgtaactttaaatacaagtaacaacattaaacacaaaatactgcaaaatgaaagataaataagtgataaatgttgagcacatacgcagattgttttgaataaattaatcacatatactgtaactcgacaaacgatgcttaatacacatcttcgatgtgcaaatgccttgcacaagtcgatatgtgtcactgtttgtgttcggtgcgtcgttgattttggctaatcgtataatgacactagtgtcatctaacgataaatacttgacccatagacgtgacactttgtaagatacgagtttatagttttatttaactgttggtgcaatcaaaccgattttaaaattttttgagttatgacactatttgagcggaggtgcgatattgttttggaatattaaaaacttgattgttttaaccaatattgcgtatttttttcataatataattgtaaaaatcagtgatatttattatgattaacgattttataaataaatataaaatattaccggggtgtatatttggcaatacactagtctttatacgagctatacaaaataactaatcatttttcaagttagaaatgtgtcaacttgcagttgttatatcgtttgtcgacctctcgggcatattcttatatagtctgttccaacgaaaatttgaccccccccccccccagaaactcagaaaccaagagcctcctcaaaatttaaaaaacacgtcaatttataataggaaggggacgaactttcatgcaaacttcatgccctcaaatgcaacccccctaccgccccgcatcaaccccccagcctttttcaatagcaaggcaca

SEQ ID NO: 4045 - DNA, 4003 bp, Diabrotica virgifera
caacctaatctgaaaccacatatgctcatagaaatagttgcacacaaaaatactgaatatagtgtagaatgttgatatgtataccccaaaacaacaagtctacatatagtaaattctaaaaggaaaaccgtttaaaggagtcgactaacgaaaacttgtattttatgtatttagtgcttttccaccttaatttaatgattcattacttttattttttagtcaaaacactcttaaaagctgaaatcaagtttgcatagcatctggatctggccactgccatttttgggtaaagcatctaaaatcgtctttccaacttgaatattagttctatctactagcgtttagcatctacggggtgtataaaataataggtgtcgccaaatatatagtataatatctctaacgtgctatttactaagagtataagtcgtaataaagacctttctgcattcttctatattttgaacttaaaaattatgtaattatcaaaacagaaagtaaaatagttaattactacaattatggatcatatttcatcaccattttgatatttagttgtaagttgtaataattatttcagcagagagcataaaaaatattcatttttgacttataatacctactcttaatatatagaacgataaatttacaaagtaacatttagtttttaatagggatattgtagacctagatttcatatattaaagtgatcaaaaaactcagaaacaatttgttacttgcctataataaaaagagtatttagtgataccttattgcagttcttgcgtggtgaaagtttatatttatttataaaatcaatactttttgaaaaagtgttaatacgatacaggatcaatcttaataacccaaaagtgtatgataagttgatgatgaatctttaaaaccagaagtgccatagttccaacagcaaaaaatataaaatgttcattttatttataatatttcagttacataatagataaaatgttctattgtcactaaaggcaaaaacccgaaagatgtggctttactctatcgacaaagaaagggacctttttggaagcgagtaaactgccagtaaaggaaataattatcttggtggcggcaactttattacatttaaagccacgaatttctaaaggaagagttaataatgtgtaccacctgaatcctttctaaaatgtattttatgtctctttggcactgcctccttaaattttagtttacttagcgtttccatttcttctcgtaattctttaatttctgctttcatttgcgtattttctgctcttagttcactcatttctttgaggtattcacggagtttaattaatgttcagttttcatttctttaatttattccagcacctcgtcctttttcctgttccttgtagtcgccgttcgcaaatttatggcgccaggggtggtttcccagtcaatccatcggagaatttcagccctacctcaaaaatgccgattattgttgttttggctcttcaaaaatgtataatagccttgacaaagactattataaatttaaaggacctgcttcggtcttaaaagaaaaatcaaccaaagtatcaactactgtttcaaaacaaaataaaaccaagtgatacaatatcagaataattaggaccgagttcagtcactaactcactactctcactcactagtgactacgacttgtgaaagttttgattaaatttaaacaggggtatataaataaatattttgtgaacttttgaacaacagatcattttgaagatattaaaaatgtttatattttatataagaaacgcaatttaaaggacctgcttcggtcttaaaagaaaaatcaacaaaagtatctgtagtatcgtgagaaacagtgtagacacggcttaacacatgtagacttggcttaacgcatgtgacagccgttggacacactggttcccgcacaaatgggtgcggctatgttttatagaagatagacttaaccttagttagatattagatggtagtcaacgtttgtttttacataaatgtaataaagtgtttaacgacaacctagagccatcttgttatttatttactgctcctcgattacattagtatcaactactgtttcaaaaaaaaaataaataaaaccaagtgatacaatatcagaataattaggaccgagttcagtcactaactcactactctcactcactagtgactacctgactacgacttgtgaaagttttgattaaatttaaacaggggtatataaataaatattttgtgaacatttgaacaacagatcattttgaagatattagaaatgtttatattttatataagagcgccagcatatggctcaatttactaataatagtaacattacctccaaaatccgatttttcatcttctcaaaaaaacctttggattggcgaataggcgaatgctgattacgcaaaacaactgaaaatagtttaggacacgaaaaagaaagggaccttcttggaagcgagtaaactgccagtaaaggaaataattatcttggcaactttcttacatttaaagccacggatttggctttggactctggagggaatttggaccaccattcccaagtatggaataaggaaagaccattttgtgggttatcttgaaaaattttacttcaaaagaagattttctgatcggaagaagaggatgcatgcattctttaccgctgtcgcatcgttatatccatacccaccaagttattaggattgcatccatctgtttaacttaagtaattttcattaaatttttagatcttttaaaggttgaaactggcaacacggtcaaatgtaacgaaaaacttcttggcgcatgtccgacatatcgcacttccgttcaaagagtgtcataagtcaaaaatgaaaagtttcgagaaaacgacgtttaaagtttgtcctacaacattttcgggtttaattcaaaaactattaaaattagaataactattttagtcagttgcaatggtttttgaagctgtataaaatagcgtattaagtatattaaaaatatttaaaaaaatcattttctttttgagttgtgacactatacagataaaataacgaaaaatttacgaaatattatttatcaaaagtgacacttgcagtacagaatataatattattattgtctggttaacagacttataccttttaatgatgtaactttaaatacaagtaacaacattaaacacaaaatactgcaaaatgaaagataaataagtgataaatgttgagcacatacgcagattgttttgaataaattaatcacatatactgtaactcgacaaacgatgcttaatacacatcttcgatgtgcaaatgccttgcacaagtcgatatgtgtcactgtttgtgttcggtgcgtcgttgattttggctaatcgtataatgacactagtgtcatctaacgataaatacttgacccatagacgtgacactttgtaagatacgagtttatagttttatttaactgttggtgcaatcaaaccgattttaaaattttttgagttatgacactatttgagcggaggtgcgatattgttttggaatattaaaaacttgattgttttaaccaatattgcgtattttttgtaaaaatcagtgatatttattatgattaacgattttataaataaatataaaatattaccggggtgtatatttggcaatacactagtctttatacgagctatacaaaataactaatcatttttcaagttagaaatgtgtcaacttgcagttgttatatcgtttgtcgacctctcgggcatattcttatatagtctgttccaacgaaaatttgaccccccccccccccagaaactcagaaaccaagagcctcctcaaaatttaaaaaacacgtcaatttataataggaaggggacgaactttcatgcaaacttcatgccctcaaatgcaacccccctaccgccccgcatcaaccccccagcctttttcaatagcaaggcaca

SEQ ID NO: 4046 - DNA, 3916 bp, Diabrotica virgifera
  SmartBlast Evalue=0; Info=Ubiquitin-like modifier-activating enzyme 1 n=1 Tax=Harpegnathos saltator RepID=E2C890_9HYME
catcattctgattcattttcagcttaatttttccatgtagtgccggttaattgaagtgatatatgatttatttatgtgattacatctaacagcagactcataaaattgtgtctttttgtgtccgatgtctagtggtagtttagcagacaactccatcgatcctccagccaaaaagcggaagcttgaatcaaagattgctaccctcgaaatggcgaacaatgaagcttcaggatcctccaccagtgatattgatgagggactttactcaagacaactgtacgttttggggcacgaagctatgcgccgcatggcaaatagtgatgttctaatatcaggtttaggtggtttgggtgtagaagtagctaaaaatgtaattcttggtggtgttaaatctgttacccttcacgatgaggctctttgtactattaaagacctgtcatcccaattttatttaacagagggggacattggtaaaaaccgcgcagaagcctgctgtaagcagttatctgaactcaacacttatgtccccacaaagtcttacacagggccccttgatgaagctttcatcttaaagttcagtgctgttgtcttaaccacaagcaatcgtgaagagcaactaagaatcagcgagataacacacgaaaacaacattgcattaattatagcagacacgaaaggcctttttgcacaagtattttgtgatttcggaaaatcctttactgttgtagatgtaaacggagaacctttagtctctgcgatgatagcagacatttcgaatgatgtcgaaagtgtagtcacttgcattgacgatacaaggcatggtatggaggatggagactatgttaccttctcgaagttcagggaatgactgaattaaataactgtgaaccaatcaaaatcaaagtattaggaccatacacttttagtattggtgataccaccaagttttctaaatacacccgaggtggtattgtaagtcaagttaaaatgccaaaacatctggaattcaaatcatttaaagattctcttgaaaatcctgagataccgattactgattattcaaaaatggattttcctacgcagcttcatctagcttttaccaccttacataagtttgtagaaaagtctgcaaggctacctaaaccatggaacaatgaagatgcaacagaatttgttaatttagctaaatcgttagctgcaaagggtgattctgaagaagttaatgtagacctcttagacacatttgccaaggtatcggctggagatttaaatcctataaatgctactattggtggtattgtagcccaagaagtaatgaaggcatgttctggaaaattccatcccattttccaatggttctactatgatgccatagaatgcctaccacaagataaatcagaaatcactgaagaactagctgcacccactggtagcagatatgatggccaagttgctgtttttggaaaagaattccaaaagaagttagcatcactgaaatattttattgttggtgctggagctattggttgtgaattgttgaagaactttgctatgatgggtgtaggaacacaaggagaagttacagtaactgatatggatttaattgaaaaatctaatttgaacaggcagttccttttcagaccacataacgtccaacaaccaaaatctgccacagctgcaaaggtcattaaaaagatgaatcctgatatcaatgttgttgcacatgaaaatcgtgttggacccgaaactgaaagtgtctacaatgacgatttctttgaaaagcttgatggagttgctaatgcactggataatgtagatgctagaatttatatggatagaagatgtgtctactaccgcaagcctcttctagagtctggaaccctaggaactaagggaaatactcaagtggtggcacctttcctctctgaatcatacagttcttctcaagatcctccagagaaaagcattccaatctgtactttaaagaatttccctaatgctatcgaacatactctacaatgggcaagagatatgtttgaaggattgtttaaacaaaatgccgaaaatgcttcgttgtacataacagaccctgatttcctcgataggactgttaagctacctggtgtacaacctttagaggtattggaatccgtaaaggctgccttaattgatgagagacctaaagatttaaatgattgcatcgcttgggcacgtaatcattggcaagaacagtattccaaccaaattaggcagttgttgttcaactttcctcctgatcaattaaccagtacggggcagttgttctggtcgggaccgaagagatgtccagaagcgcttacttttgacgtaaatgatcccctgcacttggattatgttattgctgcagctaatttgaaggctgaagtttatggtataccaactagtagaaatagagaacaaatcgcagaagtggttatgcaagtcaatgttccagaattcatccctaaatctggcgtaaagatagcagttacggattctcaaatggctatgaatggtaataatgtggatttggatcgtgtttcccaaattaaagaagaattaccctcagtagcagaactaggtggactacgtcttactcctttagaatttgaaaaggacgatgacaccaatttccacatggactttatagttgctgcttcaaatcttcgtgcagctaattacaaaataccgcctgctgatagacataaatcaaaacttattgctggtaagattattcccgccatagcaacaacaacctcagtagtcgctggaatggtttgcttggaactctacaaactcaccagaagttacacatccctaactccattcaaaaataatttcattaacctcgccctgcctttcttcagttgctcagaaccaatcgcagcccaacaaatggaatactgtggtaacaaatggacactatgggaccgcttcgacgttcagggagagatgacgcttagtgaatttttggaatacttcaaggaaaaacacggtcttgaaattacgatgttgtcccagggcgtctgcatgctgtattcgttcttcatggcaaaagctaaagctcaagaacgtttcggtctttcgatgtcagaagtcgtcagacgggtgtcaaagaagaaaatcgaacctcacgtaaaagcattggtattcgaactgtgttgcaacgattccactggtgaagacgtggaagttccatatgttaaatacaatttatgttgagccgactcagttcaaaactcaacttaaaagacttaagagttttgttaggtcagtttctggattaagagtacgggaaaactagccacgttttactatttacacattgtgagattgctgaccaatagttggaatacatattagcagcaagagcttgtgtcttttattatttattatttatcagctgttttttaatatttgcagacctttaaatattttttataacttttaaatgtcctttttgtattaacgtcatggcaaccactgttagtatttaacccttccagctccgctgtaatatgtccagcatcatgacgcacttacgcgtcaaatacactggccaatagtcatctttggacgcgcgtatgcgtcaccgtagctgaaagagttaaatctctgtaatttctccaattttcgtttacccaaaaactgatctatactgaatttgggtacttgactggaaagtgtgatctaaattattcttctcaaagaaattgtttgctgtcattttgagataggttaatgaaattaataacggaaaggattagcatttaaacacgttgatgcaatatacttataataacttgtaggagtatgtttatttttatgaaaatagtagttttcaggtaacagttattattttcttaagaaattttcatgtgtgagaataaaataaata

SEQ ID NO: 4047 - DNA, 3916 bp, Diabrotica virgifera
  SmartBlast Evalue=0; Info=Ubiquitin-like modifier-activating enzyme 1 n=1 Tax=Harpegnathos saltator RepID=E2C890_9HYME
catcattctgattcattttcagcttaatttttccatgtagtgccggttaattgaagtgatatatgatttatttatgtgattacatctaacagcagactcataaaattgtgtctttttgtgtccgatgtctagtggtagtttagcagacaactccatcgatcctccagccaaaaagcggaagcttgaatcaaagattgctaccctcgaaatggcgaacaatgaagcttcaggatcctccaccagtgatattgatgagggactttactcaagacaactgtacgttttggggcacgaagctatgcgccgcatggcaaatagtgatgttctaatatcaggtttaggtggtttgggtgtagaagtagctaaaaatgtaattcttggtggtgttaaatctgttacccttcacgatgaggctctttgtactattaaagacctgtcatcccaattttatttaacagagggggacattggtaaaaaccgcgcagaagcctgctgtaagcagttatctgaactcaacacttatgtccccacaaagtcttacacagggccccttgatgaagctttcatcttaaagttcagtgctgttgtcttaaccacaagcaatcgtgaagagcaactaagaatcagcgagataacacacgaaaacaacattgcattaattatagcagacacgaaaggcctttttgcacaagtattttgtgatttcggaaaatcctttactgttgtagatgtaaacggagaacctttagtctctgcgatgatagcagacatttcgaatgatgtcgaaagtgtagtcacttgcattgacgatacaaggcatggtatggaggatggagactatgttaccttctcgaagttcagggaatgactgaattaaataactgtgaaccaatcaaaatcaaagtattaggaccatacacttttagtattggtgataccaccaagttttctaaatacacccgaggtggtattgtaagtcaagttaaaatgccaaaacatctggaattcaaatcatttaaagattctcttgaaaatcctgagataccgattactgattattcaaaaatggattttcctacgcagcttcatctagcttttaccaccttacataagtttgtagaaaagtctgcaaggctacctaaaccatggaacaatgaagatgcaacagaatttgttaatttagctaaatcgttagctgcaaagggtgattctgaagaagttaatgtagacctcttagacacatttgccaaggtatcggctggagatttaaatcctataaatgctactattggtggtattgtagcccaagaagtaatgaaggcatgttctggaaaattccatcccattttccaatggttctactatgatgccatagaatgcctaccacaagataaatcagaaatcactgaagaactagctgcacccactggtagcagatatgatggccaagttgctgtttttggaaaagaattccaaaagaagttagcatcactgaaatattttattgttggtgctggagctattggttgtgaattgttgaagaactttgctatgatgggtgtaggaacacaaggagaagttacagtaactgatatggatttaattgaaaaatctaatttgaacaggcagttccttttcagaccacataacgtccaacaaccaaaatctgccacagctgcaaaggtcattaaaaagatgaatcctgatatcaatgttgttgcacatgaaaatcgtgttggacccgaaactgaaagtgtctacaatgacgatttctttgaaaagcttgatggagttgctaatgcactggataatgtagatgctagaatttatatggatagaagatgtgtctactaccgcaagcctcttctagagtctggaaccctaggaactaagggaaatactcaagtggtggcacctttcctctctgaatcatacagttcttctcaagatcctccagagaaaagcattccaatctgtactttaaagaatttccctaatgctatcgaacatactctacaatgggcaagagatatgtttgaaggattgtttaaacaaaatgccgaaaatgcttcgttgtacataacagaccctgatttcctcgataggactgttaagctacctggtgtacaacctttagaggtattggaatccgtaaaggctgccttaattgatgagagacctaaagatttaaatgattgcatcgcttgggcacgtaatcattggcaagaacagtattccaaccaaattaggcagttgttgttcaactttcctcctgatcaattaaccagtacggggcagttgttctggtcgggaccgaagagatgtccagaagcgcttacttttgacgtaaatgatcccctgcacttggattatgttattgctgcagctaatttgaaggctgaagtttatggtataccaactagtagaaatagagaacaaatcgcagaagtggttatgcaagtcaatgttccagaattcatccctaaatctggcgtaaagatagcagttacggattctcaaatggctatgaatggtaataatgtggatttggatcgtgtttcccaaattaaagaagaattaccctcagtagcagaactaggtggactacgtcttactcctttagaatttgaaaaggacgatgacaccaatttccacatggactttatagttgctgcttcaaatcttcgtgcagctaattacaaaataccgcctgctgatagacataaatcaaaacttattgctggtaagattattcccgccatagcaacaacaacctcagtagttgctggaatggtttgcttggaactctacaaactcaccagaagctatacatccctaactccattcaaaaataatttcattaacctcgctctgcctttcttcagttgctcagaaccaatcgcagcccaacaaatggaatactgtggtaacaaatggacactctgggaccgcttcgacgttcagggagagatgacacttagtgaatttttggaatacttcaaggaaaaacacggtcttgaaattacgatgttgtcccagggcgtctgcatgctgtattcgttcttcatggcaaaagctaaagctcaagaacgtttcggtctttcgatgtcagaagtcgtcagacgggtgtcaaagaagaaaatcgaacctcacgtaaaagcattggtattcgaactgtgttgcaacgattccactggtgaagacgtggaagttccatatgttaaatacaatttatgttgagccgactcagttcaaaactcaacttaaaagacttaagagttttgttaggtcagtttctggattaagagtacgggaaaactagccacgttttactatttacacattgtgagattgctgaccaatagttggaatacatattagcagcaagagcttgtgtcttttattatttattatttatcagctgttttttaatatttgcagacctttaaatattttttataacttttaaatgtcctttttgtattaacgtcatggcaaccactgttagtatttaacccttccagctccgctgtaatatgtccagcatcatgacgcacttacgcgtcaaatacactggccaatagtcatctttggacgcgcgtatgcgtcaccgtagctgaaagagttaaatctctgtaatttctccaattttcgtttacccaaaaactgatctatactgaatttgggtacttgactggaaagtgtgatctaaattattcttctcaaagaaattgtttgctgtcattttgagataggttaatgaaattaataacggaaaggattagcatttaaacacgttgatgcaatatacttataataacttgtaggagtatgtttatttttatgaaaatagtagttttcaggtaacagttattattttcttaagaaattttcatgtgtgagaataaaataaata

SEQ ID NO: 4048 - DNA, 3830 bp, Diabrotica virgifera
  SmartBlast Evalue=0.000000001; Info=Putative cuticle protein n= 1 Tax=Bombyx mori RepID=C0H6Y3_BOMMO
tgttactatagtgatttgtgcagtgttagtaccatgactttgacaatcaaattggtggcaatattcgcttttgcagctgctgcaacagggtctcctcttacgacgtttggaaaacggactccagcactaccaacaccatccaaagaaccagactcttaccagcccttccaaactcagttaccaatggaactagaattaccaaaagaagaagccaatcctgtaccattctacgctcctgaaccatccacggatcttaaagctccacaagaatctcaagaaccggactattatcaggtaccaatacccaaccaagaactcgcggcacccatagacaccgagtggaatcccaataatgatcctatttattactatgaagtcccagctataatcaacaaccaggaatcgcctacgagagagttccctaagaaatataacgaagatattcacgacaaaaagaaaccttttgcgtcccagccaaaggttgagattattttcgaaccgatcagcaagcagcagtacgaagaaaaacaaatagaattaaccaaaaagtttgataaactcgccaaaaaggaaaaccaaaagatcattcaggcacaacagactatttagattcgaagagcgagataaggaaggggtggtaaaaggtcactatggcttttacgacaaagaggggaagctgcaagtagtccactacgatgcccacccgcatacaggattccacgttgcagaaaattcataaacaatgggaaaaagtagtcaaactttgatcagactgaattagaaattatcgatagataatttttaattgcagaatattacttatagattttttatttttatgaaagggtggtattaatgtaagggcgaataaatatacacttttgaggatttttgaagcgaagcttctatattgacgttgtattaatttttctctatagttaaatgctgagtgatcgtcacgaaatagttaaaagagtccatttacgcgacgaagcaagtccgtagtttcaatggaaaagaaaacataagccgtgaaaaaaaaatttgctgtgaagcaagagtcagaggaaacatcttaacaggtacggcttctgaaatttaaaagcaaaattatgaaaacaataacagagcaaactgtaacaaagaataataaaaagaacttctaaaattgaaaataaattatacttggaaatcaatgtcagaatgatacattttgtatcctttggattatgctcaactaacgataaaaggaaagatcgagggaaagagtaaactagaagaggaaggagggaagaaatatccgacatgggccaaattttggacagtcaataagaacagctggagacagagaacagtttgcaattgtagcaactaatctccatagagaggatactttaagaagaaaatcctttggaggcttttttagtgtctggatgtataaagaaaactgtttttttttctctaaaggttagctctaaattctttggtttgatgtcattagctttattctttattttgtagacgctattcttcaccgattttataaaaaaaaactgtcttcctgtgctcttaccacatgacctatccatattatccggttagcttttatataatgtctgacgatgtttttagtaccatacagtcaccaatacagtattttggagccttctccacactcctgtcaattcgtctctttgagggccaaatatcattctgagaaccttccattcaaataccctcagcctatttattggccgaatattttagatgtggtcttaatttagattgtcattttggcagcttaaaatgatgacaaggagtataacgctttattccccgcagatatccttgctaagacttctttgtctatatggttgtcatctgtgattaccggattcagatatttaaactcttttgctacttctaagttgcggtcattaataattatgttttgcctaactcttggtcttggatttttggttactaacgtgtacatatttcgtcttctcttcgtttattcgaagacccagactacctgtttcctcatcgagtttgtaaaaacacctcgcacgtctcttgttgaatggacgacgctgcatctagatcatcagcaaaggccaacaataattttgatcctcagctcagacgatattttacttattgcacattctaaggccagattgaatagcaacggtgataaggggtctccttgtctgagtcctaatattatactaaatggcatcgatgttctgtttcccatatttaactgttcatatgagtatgtcacgcaggacagaacaacatataagtgttaattaattataaattaaatgatcctggatactacactgaacaattgaattttataataattcatgttatatcaatgacattatatattatgcattttagtcccctgtgtattcgtattcgcctttacttttatcaataaatattttttacatacatgtgatatttacacttttatatgtacctactttttgtcattcgctgttattttctctctagctctttagattcttagtaattttaatgttttactaatatgagccatgtttttttactatgttttgcaccaaggaatgtagcattgcttcgatttggaatgcacacattgtttagtctattattattattattgttatcagtacctttatgcaattacctactagttttttagcacagctttatctaacttaatgtatattagtacttaaatcctgagaaatttatatgctatattaaaaatggtggatttttcgtcaatttgtcatatgtagaagagcataactttgttgacatataaaaatgttgcattttcttgtaatttgctgatattttatgaattataatactaaataacaatggaaaatataaattctaaatattttcaccttcctccagcttatacagaaattttttattgtttctaaaaaatttttacgtttatcgttcaatgtgtctctgctgttcaataagttttgtggtttcataagaaaaacacaattttatggtggtttgaaatgcaccataatattgagtatactctccctgaacatcaatgcactggttgcaatgagattccaatttatgaattccctccctgaattgataatctgaagacctgcaaaatacacttccacatctgttatgacttcattatttgatgatgaaaaaggctttccacccacgaattttttagttagtggtcgctagggacaaaatctggtgaatagggtggatgttctcccaaaataaagtcagcatgaattttatgtataaaacaaagtcgcgaaaatatgccttaaacgtatgacgcaatattgttatttatgtggttgacgaaaaatgtttcctaaactagatgtccttaaagcagaaacattacaacacttgttaaagagtcatctttgaccaagcaataaaatgctcaaatcaatcgattttatttattcaatgttatacattgactgtatttaaataggcagatgtgttatacagaatgctagatttacgacatttttgtttaggtataacattattaagttggcaaagatattatttatatttggtattttcgttaatttcgcttttaatatcaaacagtatggccaactgcaggtttcgcaaacataaatacaccgtcatttaataaaacccagttaaaaaattatctacaggttgttattattaatcatcgtcagaatatagcattttgtatgatcaatactataattataaatttatgtgatttattgttattccgttaacgttaatgttttatgtataaaaaataaaaaaacaataat

SEQ ID NO: 4049 - DNA, 3765 bp, Diabrotica virgifera
  SmartBlast Evalue=0.000000001; Info=Putative cuticle protein n= 1 Tax=Bombyx mori RepID=C0H6Y3_BOMMO
tgttactatagtgatttgtgcagtgttagtaccatgactttgacaatcaaattggtggcaatattcgcttttgcagctgctgcaacagggtctcctcttacgacgtttggaaaacggactccagcactaccaacaccatccaaagaaccagactcttaccagcccttccaaactcagttaccaatggaactagaattaccaaaagaagaagccaatcctgtaccattctacgctcctgaaccatccacggatcttaaagctccacaagaatctcaagaaccggactattatcaggtaccaatacccaaccaagaactcgcggcacccatagacaccgagtggaatcccaataatgatcctatttattactatgaagtcccagctataatcaacaaccaggaatcgcctacgagagagttccctaagaaatataacgaagatattcacgacaaaaagaaaccttttgcgtcccagccaaaggttgagattattttcgaaccgatcagcaagcagcagtacgaagaaaaacaaatagaattaaccaaaaagtttgataaactcgccaaaaaggaaaaccaaaagatcattcaggcacaacagactatttagattcgaagagcgagataaggaaggggtggtaaaaggtcactatggcttttacgacaaagaggggaagctgcaagtagtccactacgatgcccacccgcatacaggattccacgttgcagaaaattcataaacaatgggaaaaagtagtcaaactttgatcagactgaattagaaattatcgatagataatttttaattgcagaatattacttatagattttttatttttatgaaagggtggtattaatgtaagggcgaataaatatacacttttgaggatttttgaagcgaagcttctatattgacgttgtattaatttttctctatagttaaatgctgagtgatcgtcacgaaatagttaaaagagtccatttacgcgacgaagcaagtccgtagtttcaatggaaaagaaaacataagccgtgaaaaaaaaatttgctgtgaagcaagagtcagaggaaacatcttaacaggtacggcttctgaaatttaaaagcaaaattatgaaaacaataacagagcaaactgtaacaaagaataataaaaagaacttctaaaattgaaaataaattatacttggaaatcaatgtcagaatgatacattttgtatcctttggattatgctcaactaacgataaaaggaaagatcgagggaaagagtaaactagaagaggaaggagggaagaaatatccgacatgggccaaattttggacagtcaataagaacagctggagacagagaacagtttgcaattgtagcaactaatctccatagagaggatactttaagaagaaaatcctttggaggcttttttagtgtctggatgtataaagaaaactgtttttttttctctaaaggttagctctaaattctttggtttgatgtcattagctttattctttattttgtagacgctattcttcaccgattttataaaaaaaaactgtcttcctgtgctcttaccacatgacctatccatattatccggttagcttttatataatgtctgacgatgtttttagtaccatacagtcaccaatacagtattttggagccttctccacactcctgtcaattcgtctctttgagggccaaatatcattctgagaaccttccattcaaataccctcagcctatttattggccgaatattttagatgtggtcttaatttagattgtcattttggcagcttaaaatgatgacaaggagtataacgctttattccccgcagatatccttgctaagacttctttgtctatatggttgtcatctgtgattaccggattcagatatttaaactcttttgctacttctaagttgcggtcattaataattatgttttgcctaactcttggtcttggatttttggttactaacgtgtacatatttcgtcttctcttcgtttattcgaagacccagactacctgtttcctcatcgagtttgtaaaaacacctcgcacgtctcttgttgaatggacgacgctgcatctagatcatcagcaaaggccaacaataattttgatcctcagctcagacgatattttacttattgcacattctaaggccagattgaatagcaacggtgataaggggtctccttgtctgagtcctaatattatactaaatggcatcgatgttctgtttcccatatttaactgttcatatgagtatgtcacgcaggacagaacaacatataagtgttaattaattataaattaaatgatcctggatactacactgaacaattgaattttataataattcatgttatatcaatgacattatatattatgcattttagtcccctgtgtattcgtattcgcctttacttttatcaataaatattttttacatacatgtgatatttacacttttatatgtacctactttttgtcattcgctgttattttctctctagctctttagattcttagtaattttaatgttttactaatatgagccatgtttttttactatgttttgcaccaaggaatgtagcattgcttcgatttggaatgcacacattgtttagtctattattattattattgttatcagtacctttatgcaattacctactagttttttagcacagctttatctaacttaatgtatattagtacttaaatcctgagaaatttatatgctatattaaaaatggtggatttttcgtcaatttgtcatatgtagaagagcataactttgttgacatataaaaatgttgcattttcttgtaatttgctgatattttatgaattataatactaaataacaatggaaaatataaattctaaatattttcaccttcctccagcttatacagaaattttttattataatattgtaaaaatacaattttatgggggtttgaaatgcacatattgagtatactctccctgaacatcaatgcactggttgcaatgagattccaatttatgaattccctccctgaattgataatctgaagacctgcaaaatacacttccacatctgttatgacttcattatttgatgatgaaaaaggctttccacccacgaattttttagttagtggtcgctagggacaaaatctggtgaatagggtggatgttctcccaaaataaagtcagcatgaattttatgtataaaacaaagtcgcgaaaatatgccttaaacgtatgacgcaatattgttatttatgtggttgacgaaaaatgtttcctaaactagatgtccttaaagcagaaacattacaacacttgttaaagagtcatctttgaccaagcaataaaatgctcaaatcaatcgattttatttattcaatgttatacattgactgtatttaaataggcagatgtgttatacagaatgctagatttacgacatttttgtttaggtataacattattaagttggcaaagatattatttatatttggtattttcgttaatttcgcttttaatatcaaacagtatggccaactgcaggtttcgcaaacataaatacaccgtcatttaataaaacccagttaaaaaattatctacaggttgttattattaatcatcgtcagaatatagcattttgtatgatcaatactataattataaatttatgtgatttattgttattccgttaacgttaatgttttatgtataaaaaataaaaaaacaataat

SEQ ID NO: 4050 - DNA, 7243 bp, Diabrotica virgifera
  SmartBlast Evalue=2E-32; Info="Muscle-specific protein 300, isoform G n=3 Tax=Drosophila melanogaster RepID=E1JHU5_DROME"
ccggtctccgtttttagttttctgggattggttcaatatgtttcaaagtttcagacttttctacatctaaaaattcttgtgttacagatttctcttgtgatatcaaaatatagtcaccatattcgctggatgtggtagttacctctgtaacttggacatccgccgattttgctttctcagttgtgttctcatcctctttcttttcaacaattactgcttcctcagtaaatttaggagactcgctttctttgttctctggaacaagtggttcttcttcatctgaaaataccataggttcatccaaaatgtccataaagagatttgtagattcgtcaacaggtaaacctttatactcaattttggttggttttatttcagtgatttgagtgtcttttggatctatagaagtttcaactgaagctggtttgtcttcctttggtttttcatcttttagtatgtcaggttctttgtcatcctgatctggtgttggtttagatgatgagtcctcttcgtctgagagaataattggttcgtctaataaatccacgaaaagagtagatgtttcatctataggaagacctttatattctatttttactgaactcatttcttgggtttgtatttctggtttcttttgagtagtttcagtaattgctacttcagtggtctcttttactaatggtttactgacttctggttgaactttcaaaggctcgtctagagttaaagatttctctgcatcaagaaaatctgtaacaacctcggttacttttggtttttcgaccatttcgaacggttcaagaattggttctatactaacttcttgttctttatcagataaaacaatcggttcatccaaaatgtctatgaagaggtttgtagacttatcaataggaagacctttgtagtcttttttaattattacaggttctgaagatttcgtggtaattgtttcagttgtaactgacttaatttctttttctacagtactttttggttcttctacattggtattaataagtacaactaaatcaggcgacttttccaaactttctgttttagtaagttcagtcttttctatcttctcgtcatatttttgtttttggtcgagagtaattactgtttctgtagtaactgattctgtgacaattatgtctgctgcatctttctgtccaataatatctttttgctcttctggtttggcttctacaacttcttgttgatgttttttgtttttcttctttttctttttatgagtaacgtcttgtttttcagtatcatcaacgtcttctggtttagtttctggttttattatcgtctcagtttttgaatctgagatgtgtctgatttcttctgtgactgtaactgctggtttatgaatttcttcagctacatgctttttcttgtgtttcttcttcttgtgtttcttttcatctggatgtgactcactggcatccgaaagaactgtagtttcctttgtaacgttttgtttttcagtatctacctctataagtggactaggcgatacacatggtttagcctctagtttttttatagtttcaatttttgtatctgataggtgtcttatttcttctgtgactgtaaattctggtttatgaatttcttcggctacgtgctttttcttgtgcttcttcttcttgtgtttcttttcatctggatgtgactcactggcatccgaaagaactgtagtttcctttgaaggttccagaatatatgctggcacaggtttaggcttgatttcaacaggttcgagatattgaggttttggttctaagtttgaacttacaatactagcccaagaaggtttgtttgttaagatcactgtttcttcattaggtttggcagcgacttctgtttcttttgcttcttgtactgaatgaacttcctcaacaattttttcatctggtacaggaatttgaggatgtttctttttatgctttttcttctttgattttttcacttcggaagtagtactatcctctgagtccggatattgaacattttctttaatatgctctactgaaattgtttcctcatctactttctgttcttctgtcactgtttgtgtttcagtaacatttgtcttaacgatcgtagcgtaggaaacacctagttcctgaatatttgttgtatcgatggattcaaccggtgtatgaacaaccttaggttcttgttgatcaggagtttcttccactgcagctgttttttctttgttttttcctccttggtttggaactggaatctaagttttctaaatcttcatcaactttaattgtctgttcttcattatggtctaccattactttttctgctatcggtttttgttcttctatttgcaccgcagaagtagctttaatttgagtcgaaacaacttctattggtagtagttcttgttctacttcttcaactaattcagttgttaatgtaggattctcggttaacgttttaacttcttgtgtaagtggtttaggtgtttcaggtttttgctcttctactgttgtaactaattcagttctattcacttgttcttcttctattttattagatatatctgttgatataacagtttcagttactgtttttacttcttgtgtaatggcctgaggtgttttttcttcaatggcttcatttttagatatttctgtggataatacatcttcgtgtttagtctgttttttctttgatttctttttcgatttaggctcatctttgggcactgatttttcactaattgtttcagtaaatgtttcttcaggcacaggtttaatttctatatttttctgttttttagacttctctttgtggtccattttgggcagttccactggtatttcaattttatctggcacatcttgttcatcagttgtttttgtaatttctggcagtaatgaattgtttatttcttctgtaatgaacatggcatttatatgcatgtttaccctatgttctggtacttttgcaggttttttgtcctgaacagaactgatatcttcatgtttttgttcatctttaggctttttagattttttctttttggattttttatcctgtactgattcagtaatttcattttgttgtgtactgatattactatggtcagtagtagtgttttcttcgacggtagtattctgaatcacttcaaaggtttgtacgatttcatcaatatgcttttcttcaggtgctttgcctttttcttcgcgttcttccacagagacaaaaacgaattcttcagcactctcagaatcatcatctggactcaaagcttgtgtttcttctatgcaagggatgttgctcttcaatatttattatttgaggagtctcttcaaatgttacagattttcttttcttatctttcttctttttctttttagcttcaactttttcgttcttagaaacaggtactgtaaactcttcttgtttttctttttcattcttgttcttggaaatagcttctgtaatctcttcttgctcttctttctcgttcttggaaatagtttctgtaatttctttttgaacttcttgttgatacttttgaatcgtttccgttttaagagcagtaagaatgtcttgtaaatcgtcttgaggtttctctacaattttaatggcttgaggagcacttgcagcaactgttgcttctaggtaggatatttctggcaaaggcttctctggtgacattggtatcgtaggtagattctggaaataatctttctcaacctttataaagacacttgatgatttaagttctggagttttatcaggaacttctgcctctttgctttcaatactggtttctttagttggttctttgactatcagttctggttctttcatttgagcggtaatttcaggttttttagtaatcggtttacccgtttcttcttgaattttgtcgcttgtaatacatgtctcgtgtgttgttttatctatgtttgcttcttcggtggttaaagtagattcagttacagtggtagttattgttgaccaagggacatgaggtcttactttcctatcaggtatactagataagtccggcttatacttggataatgtttcttgcttaagctgtaaaagaatgttttcagtattttgggatgtttctgttgtatctaatacctgttgttcagtagatgtaacgttttcttcactgtcttttatttcttgaattataaaatcatcaactgcactttctgttctgagagtatcttgtaggtgtttcttttctgtttcgctcaattctgaaatagtaacaatgtctgagctatcagcctcttcgatatctctctcaactaattcttcatctgaaataaaaacaggctctgttttacttacagttacatcttgtaaaatatcacatgactcactaggtttctggattgtttgatcttctgttaatgtagtagatacttttttagactgtctggaatccaaaacttccattatattttcgaaagttgtaatttcggtttcaataactgaatctgttcttgacagtgacggttcaatgtgttcgataatgtcaggagattgtatgtcagtagttgtgtctaacagtacgtccaaaggtaaagcctgacgttttttattggtacgaatattgtcgtcatcatctttagtttttctttattctctttctcttctcttgctttcctaatagctttttgacttggtcgttctttaaccgatccaaagattacctgttccatttcaagatcatagttctcagaagtttcttctgtcactttttctacattatctgttattatttgatgacgttcttctacttcttggacaattttttcagtttcggttctagttaacagttgttcttccacagaagtttcttgccgtacagcatcgatggtatctttagtttcttcttcacacaatcctttctcaatatgatgtatttcttcaacaacgggttctgtaaattccatctttaatgatatcacgggcttcattcttacttcttcgtgagtaataaatacgatttttgtggtatcttttggttcactagttactatagtttctttgacaacaacagtattttgagatttatcaccttcttttatctgatgtgtagatttctgtgagtctataaacatctgactacttgttgtagtttttgttgttgtagacttttctgttttagacagttctgtaacttttgttactgcatttgttatgacagattcgataaaatcagaagaaccgtctcttaaatattgtgttattaaagccttttcttcgtctttatctttattactaacatctgtaggaatgatgtctttattgtgaagcttttcatttactaaaaatgattctgtagtttgggaaacaactctgtttaaacttgttgttggttctttctcggtttttatattttcaagtcttgtgtcagcttccaaaataatattttctttattttcatctgctttaatatcttcagaaactttgtcctgtttgttttgcaaaggtttcttcttctgttttttattttttgattttttatcagtttctactacagttatttcagttgttttgacttcacttataggtaactcttctgtaacaactgtttgagattgagtagtttgagttttttcttctgtaacaactgtttgagattgagtagtttgagttttttctgttatgaagtcgaaagtgcatttatttgatcacttattacgtttaatgcatctgtaggtgaagattcttctttttcgtttacttctggagtttcattggtttcaacaggtttagactcaataatattagttgttattttcagctccagtggttttattgtttctactttagtagaaacttcagttttttcatcaattccaggttgctttttgccttttttctttttagacttcttgctagtttcatccaaagtattctgaacgtctgaatctttaatgatatcaatcactggctgaattaattcagtagtttgttctgaaacattggggagctcgaggtcttgttttacaatgactgttttattagttttgtcgatagtatctactacaagtaaagactcagtcacttgttccgtgataggagttttggttgcttcatcagcattgatgttaggtttagttttatcttttttcttattcgattttttactaggtttatttatagattcttctactttagtgtcagaagatttcagaggtgcagattctaaggttggaagtacttctccttcaagtaaagattcaaccatggtatggctctcaagaattttctgactttctggttctctagtttctgcaatagactcatctacaactttttggacatttgtcgttacagtttcaatattttcagtatgtttaacttcatgttgttgagtgacaacattaactacctctaacgattttgttgttagttttgtagtagaggtatcgatttttaactcaggtttcgtatcttttttattttttgattcctttttaatgtcgtgttcaactttagtcttgtctgaaggtggttcaatatattctaccaatataggttcagaaggagtactgtcttctttaacggcttctaccggctccgttattggaatttctgtttcctgcactatggtggtcgttgtaactattgtgtctggtttctttttatcctttttcttcttagattttttaacaggttcgtcttgggtttcaatatcaagagattttggtaactctagggattctgttatttgttcggcagtggaagaaacaactaatacttcttcctttttatcttcttcgttaaacttttgtacagatttatctaaaggttctggaacgtttacgatttctggaagtttattgtctacaataactgtatcaacagttttaactacttctgttgtttgttctgttgtagaagtaacaattggtacgtccttctttttatcttttttcctgctagattttacaggtttatctaaagcttcctgagtatcttccatgatttctgcagatttaatgtcgacagtaacagtttcaacaggatttacaatttctgtggatactgtaagttgttctgtagtaaaactatcaacttgtacgtctttctttttattttttttctgctagattttacaggtttatctaaatcttcctgagtatcttcaatgatttttgaagatttaatgtcgacagtaacagtatcaacaggttttacaatttctgtggatactgcaaattgttctgta

SEQ ID NO: 4051 - DNA, 3731 bp, Diabrotica virgifera
  SmartBlast Evalue=1E-164; Info=Z9 acyl-CoA desaturase B n=1 Tax= Tribolium castaneum RepID=D7EIY6_TRICA
gtcgcggagtccacggcacgttgcgtgactttgaaccgcgtaacccatatataaatttattttgcaacttatcctgtcagttgtgtgctaggtcttgatttgtcaagccctaaattaccgggagaacaagtcataacagtgtttacattaccccatagtgcactttgcaagtttggagtaacttgtaaactgttagtgaaaaccaaagagactcttggacttaattttcttgtgatttttctgtgaatttataacagataacaatggcaccaaacacgtcaatgcccaccggtgttcttcatgaacacgatgacgaagtccaagcaaaaatgattcccgcggaaattgtaaaaccaagcgagcgcaaacttgaactggtttggcgcaacatcattctttttgcttatcttcacatggtagcgctgtatggattttatctgatgatagcacaggcgaaagtatttacttcgatattggctgtagtgttatatatttgcggtggtctgggaataacagctggtgctcacagactgtgggctcatcgctcctatcaagcaaaatggccactgaaaattatccttaccatctttaataccttagcatttgagaactcagtaatagaatggtccagagaccacagagtacatcacaaattcagtgaaaccgacgcagatccgcacaacgccaagagaggattcttcttcgctcacgttggttggctactctgtcgcaagcatcccgaagtcaagagcaaaggcaaaggaatcgacatgtccgatctggaacaagaccccattttggctttccaggacagacactatctgatgctcatgcctataacctgcttcgtgattcccaccatcataccaatgtacttctggaacgaaactttcttcaatgctttctgtgtcaatatcttcagatatgtattcaccctgaacgctacctggttagttaattctgctgcacacatgtggggtgacaaaccttatgataaattcattaacccttccgaaaacgtctctgtttcggtcttcgccttaggtgaaggctggcacaactaccaccacaccttcccatgggactacaaaacttccgaattaggcaaatacagtaccaatttttcatcagccttcattgacttcttcgccaagatcggctgggcttacgatctcagaactgtctccattgacatgatcaagaaaagggtacaacgtaccggagatggaacccacgaaatctggggatggggagacaaagaccaacgtaaagaagactatgacgacgccacggtcttgtacaaaaaagattattaatacgaatgctagtgaatgatagtgaaacaatatatagtagtcgtgaatgtagtaaacactgaaaatgttactaaaatttttgagttgcgtccggatgttacttgtacaatttggaatttttactaattttattaatagtttagcatttaaaaacttttgatagaacatccggtaacgctgagacatgaatctcagaacacaaaaattgtaagtaatatatgtgtagttacatagaaccttgatattttcatgttaaaatttgaaataaatatatcttatttatgtaaagactttaacgactacaaattgtgtgtatctgtgacaaaaccctaagttatattgaagagactgataaaaaaatcgtaagtgacttgctctgaacgagtggtaaaactaaatggtaacttatccagccatgtatgtttgaactgtttcatcgtctgccggcagaccagtgatttgatttggaacacgaattttggtctttgtatacctaaatcatttagatttgccacttaaatttttaaaaattgatgtgaatcaaaataaataatcaatttattactgttgggtacaaaacacacttagttttgcgtacgcatcttatacaatactttcatgagatttttacactgtttaaaatattatagaccatatcttgaaatttggaactccatatgataagttggtcttcttctctcgtactgttcgttaaaaatcagttttgctccctaacttttgatatgtctttaatctaaaggtggcaggtagattttttgctttttgttaatttttagcacaggttcaagacactctgaggaatttacgtaggaaagaagaagttttctgagctaaaccacctgtataacttcacataatggataatgttaagaaatttaaatgtcaacaccatgggcgcccatataaaaaatttcagggggggggcagacctgaagattttgcacattacattttgtacactatggataacaatatatagtttgaagcacccgaaaagctaggggagctacggccccccctgctcttgggtatgggcgcctatggtcaacaccaaaaataacggccaataaaaggcgaaaaaaatggcagctttgataaagtggtttcgtgctttcttctttgaacgacaacggttcctttccgtttaagacctgtcgtttacttattgcgaggtggttttgctttcaatcatagtaaattttccggggataaataataagctagttttcaccacttgtggacgcttctctattccctctagagaggttcagtgtctgaaaagtttgaaatttgaagtatcagttacgataagatacctatgtagaaacctcatttttgaagatagctttgaagaatcaaaaatttaattgcaataaatattataatttttctacaagaaaaaaaaacaatagaaagagtataacatactagttattacgccatatagactttgttatccaactttgctgatatcattaccgtatctaataaaaaaatctatttttactacttaatatcacatttcctgatgcaatatccgagaaacgaaaaattacccaagataataaattgattttgctctacttaagaacatagtggctgttttaaaaatatgatgttaatatttttggaaattgtgtccaccttagtatataattaatactacatgtaccaaatgatggccacagactatttttcgttttctgtctgtcctaacgtccatctactaaacgtgaaagagtttggtagatggcggtaaaaatgccatgaacttatttctgtagaaaatgaggctattgaatatgttgtgaggaaataggcaagtgtatgattgcttacgattgccagacaaataaggaagactaatctagaattcttttcaaaatagaaaaaaagactaatcatttttaactgctacaaaaatatcattttgcatagtataaaaatataaagacgattttaaatgaaaattaagattatattgaattgattcaaaacagaatatttcgatgaatttacacttgaataaaaaagttttttattggaaaaataatctgtgaccttataatataccagtaaatcatcaatgtgaatatattttcatgtaaacgtgatatttagtttctaatgtttagctgtcttataagagaaagatctatcggtttttcgagagaataatagaaaaactgcacagaaatgtacagaaaaaggttgtgtaggaaagttttaaaaaagttttctcggaaagaaagatttgttctttatcgggcggtttagtggtattcaattgttaaatttttatttatatctatctctagtggtggttaagtaatcatagacgtttttgatcatttgtacttttgcctaaatagatttgtttttaaaattaaaaaa

SEQ ID NO: 4052 - DNA, 3733 bp, Diabrotica virgifera
  SmartBlast Evalue=1E-164; Info=Z9 acyl-CoA desaturase B n=1 Tax= Tribolium castaneum RepID=D7EIY6_TRICA
gtcgcggagtccacggcacgttgcgtgactttgaaccgcgtaacccatatataaatttattttgcaacttatcctgtcagttgtgtgctaggtcttgatttgtcaagccctaaattaccgggagaacaagtcataacagtgtttacattaccccatagtgcactttgcaagtttggagtaacttgtaaactgttagtgaaaaccaaagagactcttggacttaattttcttgtgatttttctgtgaatttataacagataacaatggcaccaaacacgtcaatgcccaccggtgttcttcatgaacacgatgacgaagtccaagcaaaaatgattcccgcggaaattgtaaaaccaagcgagcgcaaacttgaactggtttggcgcaacatcattctttttgcttatcttcacatggtagcgctgtatggattttatctgatgatagcacaggcgaaagtatttacttcgatattggctgtagtgttatatatttgcggtggtctgggaataacagctggtgctcacagactgtgggctcatcgctcctatcaagcaaaatggccactgaaaattatccttaccatctttaataccttagcatttgagaactcagtaatagaatggtccagagaccacagagtacatcacaaattcagtgaaaccgacgcagatccgcacaacgccaagagaggattcttcttcgctcacgttggttggctactctgtcgcaagcatcccgaagtcaagagcaaaggcaaaggaatcgacatgtccgatctggaacaagaccccattttggctttccaggacagacactatctgatgctcatgcctataacctgcttcgtgattcccaccatcataccaatgtacttctggaacgaaactttcttcaatgctttctgtgtcaatatcttcagatatgtattcaccctgaacgctacctggttagttaattctgctgcacacatgtggggtgacaaaccttatgataaattcattaacccttccgaaaacgtctctgtttcggtcttcgccttaggtgaaggctggcacaactaccaccacaccttcccatgggactacaaaacttccgaattaggcaaatacagtaccaatttttcatcagccttcattgacttcttcgccaagatcggctgggcttacgatctcagaactgtctccattgacatgatcaagaaaagggtacaacgtaccggagatggaacccacgaaatctggggatggggagacaaagaccaacgtaaagaagactatgacgacgccacggtcttgtacaaaaaagattattaatacgaatgctagtgaatgatagtgaaacaatatatagtagtcgtgaatgtagtaaacactgaaaatgttactaaaatttttgagttgcgtccggatgttacttgtacaatttggaatttttactaattttattaatagtttagcatttaaaaacttttgatagaacatccggtaacgctgagacatgaatctcagaacacaaaaattgtaagtaatatatgtgtagttacatagaaccttgatattttcatgttaaaatttgaaataaatatatcttatttatgtaaagactttaacgactacaaattgtgtgtatctgtgacaaaaccctaagttatattgaagagactgataaaaaaatcgtaagtgacttgctctgaacgagtggtaaaactaaatggtaacttatccagccatgtatgtttgaactgtttcatcgtctgccggcagaccagtgatttgatttggaacacgaattttggtctttgtatacctaaatcatttagatttgccacttaaatttttaaaaattgatgtgaatcaaaataaataatcaatttattactgttgggtacaaaacacacttagttttgcgtacgcatcttatacaatactttcatgagatttttacactgtttaaaatattatagaccatatcttgaaatttggaactccatatgataagttggtcttcttctctcttactgttcgttaaaaatcagttttgctccctaacttttaatatgtctttaatctaaaagtggcaggtagatgttttgctttttgttaatttttagcacaggttcaagacactctgaggaatttacgtaggaaagaagaagttttctgagctaaaccacctgtataacttcacataatggataatgttaagaaatttaaatatcaacaccatgggcgtccatataaaaaatttcagggggggggggcagacctgaagattttgcacattacattttgtacactatggataacaatatatagtttgaagcacccgaacagctaggggggctacggcctcccctgctcttgggtatgggcgcctatggtcaacaccaaaaataacggccaataaaaggcgaaaaaaatggcagctttgataaagtggtttcgtgctttcttctttgaacgacaacggttcctttccgtttaagacctgtcgtttacttattgcgaggtggttttgctttcaatcagagtaaattttccggggataaataataagctcgttttcaccacttgtggacgcttctctattccctctagagaggttcagtgtctgaaaagtttgaaatttgaagtatcagttacgataagatacctatgtagaaacctcatttttgaagatagctttgaagaatcaaaaatttaattgcaataaatattataatttttctacaagaaaaaaaaacaatagaaagagtataacatattagttattacgccatatagactttgttatccaactttgctgatatcattaccgtatctaataaaaaaatctatttttactacttaatatcacatttcctgatgcaatatccgagaaacgaaaaattacccaagataataaattgattttgctctacttaagaacatagtggctgttttaaaaatatgatgttaatatttttggaaattgtgtccaccttagtatataattaatactacatgtaccaaatgatggccacagactatttttcgttttctgtctgtcctaacgtccatctactaaacgtgaaagagtttggtagatggcggtaaaaatgccatgaacttatttctgtagaaaatgaggctattgaatatgttgtgaggaaataggcaagtgtatgattgcttacgattgccagacaaataaggaagactaatctagaattcttttcaaaatagaaaaaaagactaatcatttttaactgctacaaaaatatcattttgcatagtataaaaatataaagacgattttaaatgaaaattaagattatattgaattgattcaaaacagaatatttcgatgaatttacacttgaataaaaaagttttttattggaaaaataatctgtgaccttataatataccagtaaatcatcaatgtgaatatattttcatgtaaacgtgatatttagtttctaatgtttagctgtcttataagagaaagatctatcggtttttcgagagaataatagaaaaactgcacagaaatgtacagaaaaaggttgtgtaggaaagttttaaaaaagttttctcggaaagaaagatttgttctttatcgggcggtttagtggtattcaattgttaaatttttatttatatctatctctagtggtggttaagtaatcatagacgtttttgatcatttgtacttttgcctaaatagatttgtttttaaaattaaaaaa

SEQ ID NO: 4053 - DNA, 3703 bp, Diabrotica virgifera
  SmartBlast Evalue=1E-82; Info=Cyclophilin type peptidyl-prolyl cis-trans isomerase n=1 Tax=Glossina morsitans morsitans RepID= D3TMT7_GLOMM
tggccttctttgtcttttcccgtcaagccggtttacaaagcgcattcgccggtagaggtgtgagttcgcagtttgtgaattttcttagctgtactttggtcagaaacttaagccaaaaaatgggtttgcccagggtatatttcgacatgactgctgaaaacgagcccgttggaagaatcattatcgagctaagaaacgacgtagttccaaaaacagccgaaaacttccgggccttgtgcaccggcgaaaaaggctttggctacaaaggatccaccttccaccgtgtcattcccaacttcatgtgccaaggaggcgacttcaccaaccacaatggcactggaggaaaatcaatctatggaaacaaattcgcagatgaaaacttcacactaaagcacaccggacctggagtaatgtcgatggccaatgctggtccagacaccaatggatcccagttcttcatcaccaccgtcaaaacttcctggctggacaacaggcacgttgtattcggtgccgtagtcgaaggaatggacgtcgtcaagaagatcgaggctttgggctctcaatctggaaaaacatccaagaaaattgtcgtagcagactgtggtcaattgtaaatttatataattcttttttaaaaatatgttttagaataaaatgtcttacatggttaagaaaattattgtagttggtagttattatacaattcctagctatttgtggcttagtatatgaactgttggaaataataatatagtgatagagcatgcccattctaatgggtgagatgaaatatactaagcagtttcttaaatacaaacgaaatgctctgaagagaatgtcatctgttagaatggttcaaacaccttcacaggaatagttactgaatgaaggtttcatttttttaaacctctgaagtaatacttagctttaagaataacaccgtagatttcattcaaatgaattgaaatcaaatgtgtacacgtgcaggcattagctttgacaagtgtactagccttggtagtatttttacacctcggctaaagttcttatttcacgtctgaggtttctcgattgatatagggactcatctcttctgttttaggtacaacactatcgtaaattctctattttcactaatagaaaaatgtatacattccatggtatatttttagtaatgaattgctagttcgtactgcagaagggatacaacagcatcagggacgcagttggggtaatgtagaagtatccgattacctctactctccttaggtggcaacactgcaacagtaacaacattgtttaaaaattccagaaattaaattgtgaatttttaaatgcaaaaaaattcagaaaatcttaaaaaaatcataaaacaaaaaaagtacaagaacgcaaaacatcttaatatatttttgaaacatctacataatttaaactaatttatccattccaattaatatttgtgttcttgacaaaaaaaaatgcaacagttccaatcaacattcaaagttctcgctactaatggtaaaaagtaatatctctttcgattttgcattaaatcttaaccatttaagacgttttccaattgctccgatataaaaatgatacacccttcttgatataacgttcataaaagttaatgtttacttccctcgccccatttgacctacaataacacagaacaagtttcgttgcctgtcgtagattcattcacgtcacaaatgacacaaacatcagaccacattcgtcaaaatggttgaaatgacataaaatgttgccctacaacttatttttatgttacaatgttgcaatgctacaatgtaggtcaaacagtagaaaatggcattaatagtacacatatatctcgagcgcagaaacgacgaaataaaaaaaactaacgaaagggaaaaactaattttcgagcaagctaagaagaataaagaggggtccagcattgtagaagccaacgctattaaacaagtgcttaaaaccatgaatttgaaacttcacaatattcctgcagatggaaactgtttttatttagctgtaaatcatcagttgtaagttactggaagaccaactaagtctgtaaatgatttaagaaaagttacagcagattttataagacaaatcaaagatgacttcattccatttatgtgcaatgaattagatgaatctgaagtagttagcgaggaacagtttaaaaattattgtaaacagctttgttgcaacaacaaagttatggggaggtcagttagaactgtgagctttatcgaatattcttacttgccctattaaagttatttaggccgcgggtcctcccacactacagggtgaacaatttaaaggtccagaactggttttaacctactgtagacatttataccgtttaggagaagattataactctcctataccaatcactagggacgaagatgtataaaaatcactgccaatagctttaattaggaaatttaataaaaatatatgacaactacacgtgaaactgattaaaaagcgataaaaaaatttagaatttaaaaatattcagtaatcctaatattttgataataataatcctattttgacaacggaatccgatttggatgtcgaaacgttaataaaatcattttttttagtaaaattgtggcttatttcccattgaaaatagttgattagaaacatgccacaaggaaataacttcagaacaacattaatcctaatagttttgaaattaaacgttgacttaagaaaatttgttgcatatgcggaaaattttcgtctggtcatcaggcggggagttattgtacagtaaaattgtggcttatttaccatttaaaatagttgattataaaaatgccacaaggaaatagcttcagaacaacattaatcctaatatatagtcttgaaattatgtgttactcgagaaaatttgttgcatatgaggtaaatattcgtctggtcatcaggcggggagttatgtaataggatttcaaatttatgtacaatgttggtccagtgtgactttaatgtgacccatttagggagcattatctcgatcacaaagaacaaatacaatgcccttacaacagtgctcatctcatatgaagaaaggtatttaatacgcatctggtaaagtgcaaaaaggctaatccaaatattaaattggtaaaatgtgacccattttgtagaagatacatgctctcagcatcatcacgaaaattgtcctgatcgaaagaaaattgagacgcatttttgaagttcaagtgtatcacatcttcgttagaataaacaaatagtttatttgtttagcagggattgtaattgaagtgaaattattaattaaatctactggatatttgacgttagagaaatggtaagtgaagtatgacatgcagcgaaatctgttctgtgtttagtgtattcgtaattttttgactgttaagtataggtgtatcatcttggaaaaactgttataatagagttttgtgatctgatgatttatccgttaataatatttatattaataatgccattagagataggtatgactttgcatttaaattgtttcttatttttttggtgttaatcatcgtatgcgaatgcagactgaccgaagaatggcggtcagtcgttctagattcttaatgttttttaccagaattgtaagaggaatgaataaatccatcataaccagcaaaaa

SEQ ID NO: 4054 - DNA, 3693 bp, Diabrotica virgifera
  SmartBlast Evalue=1E-82; Info=Cyclophilin type peptidyl-prolyl cis-trans isomerase n=1 Tax=Glossina morsitans morsitans RepID= D3TMT7_GLOMM
tggccttctttgtcttttcccgtcaagccggtttacaaagcgcattcgccggtagaggtgtgagttcgcagtttgtgaattttcttagctgtactttggtcagaaacttaagccaaaaaatgggtttgcccagggtatatttcgacatgactgctgaaaacgagcccgttggaagaatcattatcgagctaagaaacgacgtagttccaaaaacagccgaaaacttccgggccttgtgcaccggcgaaaaaggctttggctacaaaggatccaccttccaccgtgtcattcccaacttcatgtgccaaggaggcgacttcaccaaccacaatggcactggaggaaaatcaatctatggaaacaaattcgcagatgaaaacttcacactaaagcacaccggacctggagtaatgtcgatggccaatgctggtccagacaccaatggatcccagttcttcatcaccaccgtcaaaacttcctggctggacaacaggcacgttgtattcggtgccgtagtcgaaggaatggacgtcgtcaagaagatcgaggctttgggctctcaatctggaaaaacatccaagaaaattgtcgtagcagactgtggtcaattgtaaatttatataattcttttttaaaaatatgttttagaataaaatgtcttacatggttaagaaaattattgtagttggtagttattatacaattcctagctatttgtggcttagtatatgaactgttggaaataataatatagtgatagagcatgcccattctaatgggtgagatgaaatatactaagcagtttcttaaatacaaacgaaatgctctgaagagaatgtcatctgttagaatggttcaaacaccttcacaggaatagttactgaatgaaggtttcatttttttaaacctctgaagtaatacttagctttaagaataacaccgtagatttcattcaaatgaattgaaatcaaatgtgtacacgtgcaggcattagctttgacaagtgtactagccttggtagtatttttacacctcggctaaagttcttatttcacgtctgaggtttctcgattgatatagggactcatctcttctgttttaggtacaacactatcgtaaattctctattttcactaatagaaaaatgtatacattccatggtatatttttagtaatgaattgctagttcgtactgcagaagggatacaacagcatcagggacgcagttggggtaatgtagaagtatccgattacctctactctccttaggtggcaacactgcaacagtaacaacattgtttaaaaattccagaaattaaattgtgaatttttaaatgcaaaaaaattcagaaaatcttaaaaaaatcataaaacaaaaaaagtacaagaacgcaaaacatcttaatatatttttgaaacatctacataatttaaactaatttatccattccaattaatatttgtgttcttgacaaaaaaaaatgcaacagttccaatcaacattcaaagttctcgctactaatggtaaaaagtaatatctctttcgattttgcattaaatcttaaccatttaagacgttttccaattgctccgatataaaaatgatacacccttcttgatataacgttcataaaagttaatgtttacttccctcgccccatttgacctacaataacacagaacaagtttcgttgcctgtcgtagattcattcacgtcacaaatgacacaaacatcagaccacattcgtcaaaatggttgaaatgacataaaatgttgccctacaacttatttttatgttacaatgttgcaatgctacaatgtaggtcaaacagtagaaaatggcattaatagtacacatatatctcgagcgcagaaacgacgaaataaaaaaaactaacgaaagggaaaaactaattttcgagcaagctaagaagaataaagaggggtccagcattgtagaagccaacgctattaaacaagtgcttaaaaccatgaatttgaaacttcacaatattcctgcagatggaaactgtttttatttagctgtaaatcatcagttgcaagttactggaagaccaactaagtctgtaaatgatttaagaaaagttaaagcagattttataagacaaatcaaagattgacttcataccatttatgtgcaatgaattagatgaatctgaagtagttagcgaggaacagtttgaaaattattgtaaacagctttgttgcaacaacaaagttatggggaggtcagttagaactgtgagctttatcgaatattcttacttgccctattaaagttatttaggccgcgggtcctcccacactacagggtgaacaatttaaaggtccggaactgattttaacctactatagacatttaggagaagattataactcctataccaatcactggggacgaagatgtataaaaatcactgccaatagctttaattaggaaatttaataaaaatatatgacaactacacgtgaaactgattaaaaagcgataaaaaaatttagaatttaaaaatattcagtaatcctaatattttgataataataatcctattttgacaacggaatccgatttggatgtcgaaacgttaataaaatcattttttttagtaaaattgtggcttatttcccattgaaaatagttgattagaaacatgccacaaggaaataacttcagaacaacattaatcctaatagttttgaaattaaacgttgacttaagaaaatttgttgcatatgcggaaaattttcgtctggtcatcaggcggggagttattgtacagtaaaattgtggcttatttaccatttaaaatagttgattataaaaatgccacaaggaaatagcttcagaacaacattaatcctaatatatagtcttgaaattatgtgttactcgagaaaatttgttgcatatgaggtaaatattcgtctggtcatcaggcggggagttatgtaataggatttcaaatttatgtacaatgttggtccagtgtgactttaatgtgacccatttagggagcattatctcgatcacaaagaacaaatacaatgcccttacaacagtgctcatctcatatgaagaaaggtatttaatacgcatctggtaaagtgcaaaaaggctaatccaaatattaaattggtaaaatgtgacccattttgtagaagatacatgctctcagcatcatcacgaaaattgtcctgatcgaaagaaaattgagacgcatttttgaagttcaagtgtatcacatcttcgttagaataaacaaatagtttatttgtttagcagggattgtaattgaagtgaaattattaattaaatctactggatatttgacgttagagaaatggtaagtgaagtatgacatgcagcgaaatctgttctgtgtttagtgtattcgtaattttttgactgttaagtataggtgtatcatcttggaaaaactgttataatagagttttgtgatctgatgatttatccgttaataatatttatattaataatgccattagagataggtatgactttgcatttaaattgtttcttatttttttggtgttaatcatcgtatgcgaatgcagactgaccgaagaatggcggtcagtcgttctagattcttaatgttttttaccagaattgtaagaggaatgaataaatccatcataaccagcaaaaa

SEQ ID NO: 4055 - DNA, 4302 bp, Diabrotica virgifera
  SmartBlast Evalue=7E-14; Info="Viral A-type inclusion protein, putative n=1 Tax=Trichomonas vaginalis RepID=A2FD36_TRIVA"
gcataatactgtttaatacacaattttgttagtataacattaaaaataaacatacaaatagttttatttacaagtttacagcataagtacataatatagtaataaataacagtttatatcttacaactttttaaaaaaatggcatctttaaaacatagatgtttagctatgtataactgttaatctgatattttgactgttttgaattttttttataaaaaaataaaaggaaaaatcccagttgttggctgtataaagttgttggctgtttaccatagtttaaacaaacttacaatggagtaacaaacttataatatatgatggtatatattttttaatatacatattaccataaattagatttttttttcttcattgtaagttttttttatttcttctaatatagaaacatccaagggcggatccagggagggggccatggggccatggccccctccgagaatttaaaaaaatataaatttatatattggcatttcaaatgttcttagtttcaaacacatataatattatgtataaaacaggggataaatatgttttctggactagaattgaacaaaagcagtaacagaagcttcaagaatgacatatgatgttttataaatcaaaatatagataagtgccaattgttaaaacgatcttgccatcaaaatcctatcaatttctatattctatacacacaaagaataaaaagaaatgaagcgttacttggatcaccagaacttataacaaaggagttggttggtattttcgaacagtcaaaagggattgttttacaagtattgaattttatttttctaatgaaaaatatggtcataataaagggatgacagccgaaagccttctcatgaaacctttaacatctttcgccaaactcatgggcaaagacggagccatacaaatccatgaaaaaacatcatatcacaaggagtgcgctaaggtttaggtggattttctacaaagttatcaaaacccgcaaaagtcagtcaaaccagaaagactctcaaagatctaaacagatacaagaaaataaagaaagactacgatcaatagtagagtctatctatagtgttcttaggtcgacaaaatattcctctaagaggctgtcatgatgatggccttctgcttctagacgaagatgctggacctagcgataaggggaattgttaagatttaaaatctcatcaggagataagactattcaacgacacctatccgcagcaacataccttagtaacaccagtcaaaatcaataattattaacatgttgtggtgaagaaataattgaacaaaacatgaatcatgttcaaagtgcaaattattactctgtcatatttgacgaaataaccgacgtatcccacgtagaacagctttatctaaatttgaaatacatacacaataacaacattcgtgaaaactttgtcaagttaattgacgcgtatgagaacataataaaaacaattattagtgaaaatcaagaaagaagggaagaagaaggcctgacagagtgacaggagaagcattggaaaaaatagtattaaacttgttgaaagaactgcacttggatccgaagaaatgtggatgaatcggtaacaactttaataatactttaataacgataacttttgaatgtctttatagaactcaaaagtgtgtaaaaagtgccttcaaactcaccattttaaccgtaatttttaaaaattaccccctggccccccggtacacttccccaaaaaaagttcatggcccctcccgaaaatcggtcctggatccgcccttggaaacatctgttatatgataaaactgataaaattatggtaatatataaaagatatatgtatatttatttatttaagatacatatactggctttatgtttggatcattgcaaaaaatatatctaaaattgtaataataataaacagttatataaaaataagatgaagtgaatttaaactgattgctcttaacttttaaggtacacctaagttgtgatttctgttgttgttgattcttctgttgttgtagctgtcgtatcagtgtaatcttcatcttcatcatcgttcccattattatctgaattaaggtctgtccttatatcgatatcatacttcattttcctttttctagcgggccttcttggatttttcgtttgttcttcacaatcaccacctgctctgatatctattagattccttacattctgcttgcatttcctcttgggcttgggcttttcgccaaatattttggcaacagattctcttatcgtatgattttgtagaggagttattgttgatgtaggtaagaattgaggagaactaactgtgtcatttcgtttatgtataatattctctagttttttaacaacgttgttttgacataactgcgagtctctggaggaattatttatcttttcaattgaggtagttagtgattttgtcaatctttgaatttccttatggatctgataattagatacattttctggtttttcattgtagagtatatattgaatgtctctggtagttctttccagtaaaattaacttgtccagaataaccttagttgtcgctacagatgtagttgctgacccatcgttgatggtagtttggacaaatgtaaatagggcgtttatatcggtacccacttttctaatttcgtttgtaagcaattgggcgttaactgttgacttttcgaataatgaaattatattttgatttgcttgcatcatattccggtttattctgttatcgtgacttttcagatttttttcgaaattcttcatatcctttgcttcagtagataacttcttttccaacatgtcgatgagcttatttaacatgacgcttatttctgattctatttgagactcgtccatttgcagtcgatgacagctttccaaaaatacatcttggttggttaatattttctcaatgttcgctgtcagctttttatctaaatctttgtagtcaacaccacttacgagcgccgtatccttgtgagatagttttccaatctgaatcattaacgagcgtactccattttgcaattccacctttgtactgtttacaatgactccgatattttttaaatcgtcttctgtagtatctgtactcttccacatatccgagttcatatctgctaccttattagcataactattgaaatcttcttttaattcgattttcatttgcttcaggaaagtattagtatcgtctgatatcttcatctgctgacttgttctgttatcaaggtattgtaggttgcctacaatattatcatgtagcttgttcacagattttctattttccatattatattttgttaataagttgagtgtatgtttggcaactgctagatcatcctcggtaacattcataactttcctttccaaaattttatatgtagttgtaagattcttgataccagatattgcggctgacacttcagtctccagatctgaatcgcgcttgatggcgtctttatccattttatctaaatgtttaaacatagcttctaatttgtcctgaaataattcagaattcacttcgagctttctctcgatataattcaaacgatgggttacgccttcatacgtcgaatccaattttctcaaaatatccgtcttagttaaatcgtccttaaaatttttggtactaatattttccgatactttgcccaaattcaacatcactaacgcttccagccgcgtaattttattatcgaggttctccagttttcggttgtattggtccagtttaacctccaggttttgtgacagctgcattgagtatacattatccaggctgcgtagcctttcttctatcgaactgagaattgtaaaggtgttctgttggtgtaaagcactttgaaatttattaactgtcaaaccagccgaatgttctgtagtcgtagccaaacaccaacaattacacaaagcatcattaagacaaaccaaccaaaaaagtaactcggctatttttcttcgcttcatttctccgtagtaaccaccccccttgaaaaaaagctaattgggccgcccagggcgtcggacttcactcttttaatttttaccgacgctcgaaaagaaattataactggccgcccagtacgcaaaggtcgagggtgcaatttttcgagtgattatatcgaccggatgatcgagtgaggttcagcaggaacgtgaagagaaagaattgtgtgtaccgcacgcgagaagagagtaacgcgatttgattgtagattgttgattgtggtaggttcagatgtcagatgctgccatgg

SEQ ID NO: 4056 - DNA, 2909 bp, Diabrotica virgifera
  SmartBlast Evalue=4E-14; Info="Viral A-type inclusion protein, putative n=1 Tax=Trichomonas vaginalis RepID=A2FD36_TRIVA"
gcataatactgtttaatacacaattttgttagtataacattaaaaataaacatacaaatagttttatttacaagtttacagcataagtacataatatagtaataaataacagtttatatcttacaactttttaaaaaaatggcatctttaaaacatagatgtttagctatgtataactgttaatctgatattttgactgttttgaattttttttataaaaaaataaaaggaaaaatcccagttgttggctgtataaagttgttggctgtttaccatagtttaaacaaacttacaatggagtaacaaacttataatatatgatggtatatattttttaatatacatattaccataaattagatttttttttcttcattgtaagttttttttatttcttctaatatagaatcatctgttatatgataaaactgataaaattatggtaatatataaaagatatatgtatatttatttatttaagatacatatactggctttatgtttggatcattgcaaaaaatatatctaaaattgtaataataataaacagttatataaaaataagatgaagtgaatttaaactgattgctcttaacttttaaggtacacctaagttgtgatttctgttgttgttgattcttctgttgttgtagctgtcgtatcagtgtaatcttcatcttcatcatcgttcccattattatctgaattaaggtctgtccttatatcgatatcatacttcattttcctttttctagcgggccttcttggatttttcgtttgttcttcacaatcaccacctgctctgatatctattagattccttacattctgcttgcatttcctcttgggcttgggcttttcgccaaatattttggcaacagattctcttatcgtatgattttgtagaggagttattgttgatgtaggtaagaattgaggagaactaactgtgtcatttcgtttatgtataatattctctagttttttaacaacgttgttttgacataactgcgagtctctggaggaattatttatcttttcaattgaggtagttagtgattttgtcaatctttgaatttccttatggatctgataattagatacattttctggtttttcattgtagagtatatattgaatgtctctggtagttctttccagtaaaattaacttgtccagaataaccttagttgtcgctacagatgtagttgctgacccatcgttgatggtagtttggacaaatgtaaatagggcgtttatatcggtacccacttttctaatttcgtttgtaagcaattgggcgttaactgttgacttttcgaataatgaaattatattttgatttgcttgcatcatattccggtttattctgttatcgtgacttttcagatttttttcgaaattcttcatatcctttgcttcagtagataacttcttttccaacatgtcgatgagcttatttaacatgacgcttatttctgattctatttgagactcgtccatttgcagtcgatgacagctttccaaaaatacatcttggttggttaatattttctcaatgttcgctgtcagctttttatctaaatctttgtagtcaacaccacttacgagcgccgtatccttgtgagatagttttccaatctgaatcattaacgagcgtactccattttgcaattccacctttgtactgtttacaatgactccgatattttttaaatcgtcttctgtagtatctgtactcttccacatatccgagttcatatctgctaccttattagcataactattgaaatcttcttttaattcgattttcatttgcttcaggaaagtattagtatcgtctgatatcttcatctgctgacttgttctgttatcaaggtattgtaggttgcctacaatattatcatgtagcttgttcacagattttctattttccatattatattttgttaataagttgagtgtatgtttggcaactgctagatcatcctcggtaacattcataactttcctttccaaaattttatatgtagttgtaagattcttgataccagatattgcggctgacacttcagtctccagatctgaatcgcgcttgatggcgtctttatccattttatctaaatgtttaaacatagcttctaatttgtcctgaaataattcagaattcacttcgagctttctctcgatataattcaaacgatgggttacgccttcatacgtcgaatccaattttctcaaaatatccgtcttagttaaatcgtccttaaaatttttggtactaatattttccgatactttgcccaaattcaacatcactaacgcttccagccgcgtaattttattatcgaggttctccagttttcggttgtattggtccagtttaacctccaggttttgtgacagctgcattgagtatacattatccaggctgcgtagcctttcttctatcgaactgagaattgtaaaggtgttctgttggtgtaaagcactttgaaatttattaactgtcaaaccagccgaatgttctgtagtcgtagccaaacaccaacaattacacaaagcatcattaagacaaaccaaccaaaaaagtaactcggctatttttcttcgcttcatttctccgtagtaaccaccccccttgaaaaaaagctaattgggccgcccagggcgtcggacttcactcttttaatttttaccgacgctcgaaaagaaattataactggccgcccagtacgcaaaggtcgagggtgcaatttttcgagtgattatatcgaccggatgatcgagtgaggttcagcaggaacgtgaagagaaagaattgtgtgtaccgcacgcgagaagagagtaacgcgatttgattgtagattgttgattgtggtaggttcagatgtcagatgctgccatgg

SEQ ID NO: 4057 - DNA, 3413 bp, Diabrotica virgifera
  SmartBlast Evalue=1E-27; Info="Alpha-glucosidase, putative (Fragment) n=1 Tax=Ixodes scapularis RepID=B7PYH5_IXOSC"
atatttaatactaaaaaagagtttacactttattgataacttagttgatactcttaaaatagaattgaaagaagaatgtgctctccagatgcagttccaccatctgattgttaaatattaaacaattgactttagttcgtggatatagttgtacacacgtaagtagtactttatattgtgttacttgtagcagttataagagcatcagtacttgtaattattgtagtttctgtatttgtgattgttgtagtacttttcgctgtaggtatactaccactagtaattgtgatttcaggtgtacttgcctctgtaggtgtaggactactagtgttaccaggatcttcagttgtgctttcacttgtagctgtagaaccactagtaggaccagtttcttcagttgtactttcccttgttggtgtagaactactagtggtaccagtatgtgcagttgtgatttcgcttataagtgaactactaccagtattaccagtacttccagttgtactttccattgtaggtgtagaagtactagtagtaccagtatcttcagttgtgctttctcttgttggtgtagaaatactagtggtaccagtatcttcagttgtgcttccacttatagatgaagtactatcagtttcaccagtacttccagttgtactttccattgtaggtgtagaactaatagtggtaccagtatcttcagttgtactttccgttacagtactagctgttgtagtactagttgttgtagaactggttgttgattctgtggtcgttgtgggtggaggttcatatggcatattttgagtatcttgatcaattgatctgtttacatcatagtatgccggtttattactgttcaaatattggtatacctttacataacctaaatgcaaactccattttttgtctgaactgctgctgatatcgactgatttgatattggctgtaaatgttatagaaattccgtctgttttcataaaacccgttgcagaaccagaactttctataaaacttcgtgttcttttgcttgatgtgaagttcagtgcaacgatcaaattcactgtattgccatctatcagaggaataacacttccttttggaataaaagccacaaaatctgcttccgtaacgctaatgctaacccaaggatttgttttggtaggtttgtaaatatctccaccccaaaattcataccagacgtcaatggcaggaggtagataaacattcattttggttctatctgcagtcagagggtgcaccaccaacatattcttgcccaccatgtactgctcatacagagaaaaagtggtggtgttttcgtagaagtcgtagaacataggtctaatcactggttcgttactgcttatgagaccgttgtagtaggctagtaacatatttcttgtatctaacgcagattgagctgtttgctgatcatatttggcggacaaatcatctggatttctccaaggtttaggagcagatattctaaacattggcatggtagcagcaatcaagtaccatctcaaacaaagtttcatttgaattgaagtatcgaaaacgttggtatccccacaaacaggtatactaaccaaatggttgccgattatactatcgaataacacgctgtccagatattttctgagattggtccaagaagtttctacgttctctatgatcataggttcgacttgactgattgatttcgttgctgatagtatgaatatttctttacttttgaaataatcttttaaggatttatattggtatcctccataggagttgtgcttttgaatgtgaagtatatcattggcagttgtgttccattgaatggtgtacgacatggcatcttgtaatgctttagtaaagtacggaaaactgtcattatccattttaaattcttcattcgctggccagttatcggttaaaaccaaaccatcgatagtgtgattgaagaaatcttctaaaaatgtaccaaatacttccatgtatttctggatattctcatgactgtagtctatataagaaacgtcctgatctaaatattttccttgataaattgttttattaagataggtatacagaagatcaagactgctagcattgttataaaaatctgagttagtcaatacctgtggaggaaccgacaataaaaacttctttcctttttcccttaaaggcgttattagggcttgcactgcgtcttggtagctagtgtcattagccctttctgccaagattcccattaataagttttcgtctatacaaaagctgtctgcctcactgtccaagacaaaattcgaaactaatgtggatacattcaaaaacttttcattttttctgcacatatgtgtctttaacaaccactcaggtacatccaactgttcactgtcttccaaatgttgctgatgaagatctgctggcgttggtccagtatataacacaagctctatagtttcacctaataatccttttaatataattagattagaagtaagaatagagacctcaagcggtccgtcatgcttgacggttaatccatgaaactgtcctctgtggtaggcccaaatcaccgggaaattactatgatcgttcttgttcttgtagaacaccttcgatatggtagaattcttatgtctttgaagcagcgtcttgtctagaccaaataaggaatgatcggttagatgcacagtccactcccagtagttttcagaggcgatcaatggtccttttgccgtcgaaaaaattctgtctccatttggtctgaaaatctccaccatgagcttttctgcagctttttttaccacatactcacgaacatttactgtattttctgcaatactcgtacttggtttgtgtaaaattatgctgactttgttgattgatatctcattgactgaaatctgcatttcttctatagctgttgtattaaatggtgatgaagaccgagaagctttgtaactggaacctgctaagtcatatgagtatcttgagggtaaataatggtaacaggagtctgtaggtttatcataacaacatgctaatttaacacattcatgttcactgatgttcacttttccacaaggtactctaaaagtgctgttaacgaaacatgtaaacgtgtctacttctttgtatgtacctaagttaaccactaaataatacgttaacacagggactattagagcaaatgcgaacgtaaaaaaccatcctacaatagttgttttgcacaaaatagtccacacagtccattttactgaagctgtagcagtttcatcttcgtcctcacggagttcattttgttgttgtatgaacgttgtcatgtttaatttaaaaaatattgaagattctttaagagatttcacataattattaacttgtcacaacacaactgattctctccgttgttcttg

SEQ ID NO: 4058 - DNA, 3413 bp, Diabrotica virgifera
  SmartBlast Evalue=5E-28; Info="Alpha-glucosidase, putative (Fragment) n=1 Tax=Ixodes scapularis RepID=B7PYH5_IXOSC"
atatttaatactaaaaaagagtttacactttattgataacttagttgatactcttaaaatagaattgaaagaagaatgtgctctccagatgcagttccaccatctgattgttaaatattaaacaattgactttagttcgtggatatagttgtacacacgtaagtagtactttatattgtgttacttgtagcagttataagagcatcagtacttgtaattattgtagtttctgtatttgtgattgttgtagtacttttcgctgtaggtatactaccactagtaattgtgatttcaggtgtacttgcctctgtaggtgtaggactactagtgttaccaggatcttcagttgtgctttcacttgtagctgtagaaccactagtaggaccagtttcttcagttgtactttcccttgttggtgtagaactactagtggtaccagtatgtgcagttgtgatttcgcttataagtgaactactaccagtattaccagtacttccagttgtactttccattgtaggtgtagaagtactagtagtaccagtatcttcagttgtgctttctcttgttggtgtagaaatactagtggtaccagtatcttcagttgtgcttccacttatagatgaagtactatcagtttcaccagtacttccagttgtactttccattgtaggtgtagaactaatagtggtaccagtatcttcagttgtactttccgttacagtactagctgttgtagtactagttgttgtagaactggttgttgattctgtggtcgttgtgggtggaggttcatatggcatattttgagtatcttgatcaattgatctgtttacatcatagtatgccggtttattactgttcaaatattggtatacctttacataacctaaatgcaaactccattttttgtctgaactgctgctgatatcgactgatttgatattggctgtaaatgttatagaaattccgtctgttttcataaaacccgttgcagaaccagaactttctataaaacttcgtgttcttttgcttgatgtgaagttcagtgcaacgatcaaattcactgtattgccatctatcagaggaataacacttccttttggaataaaagccacaaaatctgcttccgtaacgctaatgctaacccaaggatttgttttggtaggtttgtaaatatctccaccccaaaattcataccagacgtcaatggcaggaggtagataaacattcattttggttctatctgcagtcagagggtgcaccaccaacatattcttgcccaccatgtactgctcatacagagaaaaagtggtggtgttttcgtagaagtcgtagaacataggtctaatcactggttcgttactgcttatgagaccgttgtagtaggctagtaacatatttcttgtatctaacgcagattgagctgtttgctgatcatatttggcggacaaatcatctggatttctccaaggtttaggagcagatattctaaacattggcatggtagcagcaatcaagtaccatctcaaacaaagtttcatttgaattgaagtatcgaaaacgttggtatccccacaaacaggtatactaaccaaatggttgccgattatactatcgaataacacgctgtccagatattttctgagattggtccaagaagtttctacgttctctatgatcataggttcgacttgactgattgatttcgttgctgatagtatgaatatttctttacttttgaaataatcttttaaggatttatattggtatcctccataggagttgtgcttttgaatgtgaagtatatcattggcagttgtgttccattgaatggtgtacgacatggcatcttgtaatgctttagtaaagtacggaaaactgtcattatccattttaaattcttcattcgctggccagttatcggttaaaaccaaaccatcgatagtgtgattgaagaaatcttctaaaaatgtaccaaatacttccatgtatttctggatattctcatgactgtagtctatataagaaacgtcctgatctaaatattttccttgataaattgttttattaagataggtatacagaagatcaagactgctagcattgttataaaaatctgagttagtcaatacctgtggaggaaccgacaataaaaacttctttcctttttcccttaaaggcgttattagggcttgcactgcgtcttggtagctagtgtcattagccctttctgccaagattcccattaataagttttcgtctatacaaaagctgtctgcctcactgtctaagacaaaatttgaaactaatgtggatacattcaaaaacttttcattttttctgcacatatgtgtttttaacaaccattcaggtacatccaattgttcactatcttccaaatgttgctgatgaagatctgctggcgttggtccaatatataacacaagctctatagtttcacctaataatccttttaatataattagattagaagtaagaatagatacctcaagcggtccgtcatgcttgactgttaatccatggaactgtcctctgtggtaggcccaaatcaccgggaaattactatgatcgttcttgttcttgtagaacaccttcgatatggtagaattcttatgtctttgaagcagcgtcttgtctagaccaaataaggaatgatcggttagatgcacagtccactcccagtagttttcagaggcgatcaatggtccttttgccgtcgaaaaaattctgtctccatttggtctgaaaatctccaccatgagcttttctgcagctttttttaccacatactcacgaacatttactgtattttctgcaatactcgtacttggtttgtgtaaaattatgctgactttgttgattgatatctcattgactgaaatctgcatttcttctatagctgttgtattaaatggtgatgaagaccgagaagctttgtaactggaacctgctaagtcatatgagtatcttgagggtaaataatggtaacaggagtctgtaggtttatcataacaacatgctaatttaacacattcatgttcactgatgttcacttttccacaaggtactctaaaagtgctgttaacgaaacatgtaaacgtgtctacttctttgtatgtacctaagttaaccactaaataatacgttaacacagggactattagagcaaatgcgaacgtaaaaaaccatcctacaatagttgttttgcacaaaatagtccacacagtccattttactgaagctgtagcagtttcatcttcgtcctcacggagttcattttgttgttgtatgaacgttgtcatgtttaatttaaaaaatattgaagattctttaagagatttcacataattattaacttgtcacaacacaactgattctctccgttgttcttg

SEQ ID NO: 4059 - DNA, 3543 bp, Diabrotica virgifera
  SmartBlast Evalue=1E-155; Info=Eukaryotic translation initiation factor 5 n=1 Tax=Culex quinquefasciatus RepID=B0W0M0_ CULQU
gacagtaatttttattgacattaaaacagtaaaatttataggtaatatataaacaacttatcaagtccaaccatattttgcaaaaacatctaacacaagatcttttaaagataagtgactcgaatatgcaattctataccactctagataagacaactatgaacgaatttcacgacagtcacttccaagaaatacatttttttctgtaaccaatgattccctttgatcaacatcgaaaacgggttttaatatgggaaaatgctagtttaatattcttaacattgcaaaaatggtaaatagtaaaaataatagttgtacaggatgatacgtacaaaacaaaatggcatctatcggaaaaaaactgacgatattgaaaaaatgagagcaatttttaatattattagtagtttgcttaatagattccaatctgtttagtgcaacactcaccctgcaatcctgatcaccaacattaacatatttataaaaatcataatggatagatagatagatataaaattatactaaagccctttataatagttaggaccatcggattaaacaaaatataaacaagtaccgataaatgtgtagtttagacacaatctaagagtaatggcaacatcgcgctgccatttttagaatgtaggttatgttgatggagtgtctttaccattgacatataacaggatggacggagaactcccctatatctgacacagaatcgggtgtcataacgatcattagacattttcactctacactcccaaaaatataaaatataattcgattttcacaatgaaaaacacaagacaaacaacgatcaaatatgcacatacaaacaaaacaatatttgatcgtgtcgtgttcataaaaatttctccccttcctatcaaaacgtgtacttcggcgaagtatatgtttatgacattttttatagttgttgctgtgtctatcctcttatatgtcattggtctttactatactttaccgtgtacagcttttacttatagagggtgttccaaaacgtcttcatggcggaattttcaaatgttttgttaaatatttactctacttggacagttatatcgattttaataaataaagtccctgctttatgtcatttcgcaagtatttaataattgttccaatattttctaacacttatcgattcttgtgtgtgtgtgtgtgtgtgtgtgttagataaaactcgcaatccagcgccaagaacatgacagatgacacctgtcatgtttttggtgtctcgtgttgctggaaatgcgaggtacaggtggaatttagcaaatccacgatgttttgaccttctttcttgattcttgaaattgtaaaattgaaacaccctctattttatgtaagtttgagccattgctgccccaaataaatatattgttacaaaattgtgacctgtgtgatgattattaaaaaaagaacaaatcggtttttgtcccgtaggagtttcagtcgtccaaaaatgaagaatataaagagtgatggcctttttcatacggaatattacgtttaatggtacactactataatgataattataataaaaaagttcgtaacaaagggcctaactaataataagagaagtgtttagatagcatcgatatccacatcatcttgcccatcatcatcgttactagccaccggtttgggtttgctttggggagtaatcttcagttggatttgtgccctgtcattgtattcaatctccacgtcatcgtcttcttcatcatcatcgttgtcggaatcttccgattcggcttccttcaaccattttatgaacggttctgctttgtcgtgaatctcttggcttacttccttagctacgtattttttggacactttttctgaccattctatgatgcactcctctccaagaatgtccatatcgtaaaagattttcagcaaaccgggaactttgctcataagtttgtctttgtgtaaggcaatgacttgttctagcccaccaattagatatttctgtgcttttttctcgttcaaagtgaaacgaaggaagagcatacgatatttcttagcctgtgcgaggatgttctgatcaaaaagcaactcggccaaaacgagaggagctttggttttaatctccaaacgttcagcttcgctcaatacttctttttgagtctgcacatttcccaaaagtccggtatcgcgtttaacttttaccatgttgtacaagatgtccatacgttctttctcggatttttcaagatcgtcactgatggtcatgtttttggcaccatcactgagatcttgcatcctttgccttacagcttcctcggatacatctacggcccattcagtttggtcatcatcgctgccaccgttattgtctgttgaattttccatagcagaagaatcgagcgtcgaatcattttcttggtcgccattcgcttcgccattacgtttgctgcgcttggatcgttttccttcagtcagcgacgatccttgactggctggattcgagttgggtggattcttcaagatgaaggtcatcaacttatggttggattccaacaaaccgtggtagccgcacgctttacatccctgggatattgtgtttttcttcacagaaactagaagatcggtttctggattgtcgcattcgggacacaaaacaaacttgcgtatgaacccatctagaagatcttgcagtttagaagcgtcatgggaaccgttcacaatgaaacgttcatttttaaagtcgaattgagtttgagcacccaactcacagccgaagtatttagtagggtaagtgggaggtcggcctagagctttggcgacctcggccatgttgacaattaccgtttttataccgttacctttaccttcaactttggccataagccggggcattttgtagcgatagaacacatcgctgacgcctctgttaacgttgacactcattgtggatgtagtgcgttagctatgttgtaagatcgtaggagaaaggatattggttttaatgatctttggtgtttttcgtgaaattataatagccagtcacgtttctctaaatggttgaagttttcgatgcctattcgatgaaaattttatagtcctataataagtaggctcacgtcgctgcgaagtcatacacctcgcttgctcgggccctaaatccccaactatgcttcttgctaataatgtcttttgatggtttaccaaagtcatataaaattttagcgcccttatggacgatgacttttagagatttaaaatctttctgttaaatatgatattctaaatgagcttacgaatatctaaaaatctctactgggtccagcttcaaccacgtttcatctgcatccagcaacagtatcgtatctaattaggtgaacaaaaaccaaaatagtacgaataaaaaagaaaaattaatctataacgatgatgttataaattatttgccgaaaaatataactaaagtccagctgcaattgatatcttaactaaaaagttaatctttgccacagcaggaattttccttcacactgacctgggctg

SEQ ID NO: 4060 - DNA, 3224 bp, Diabrotica virgifera
  SmartBlast Evalue=1E-155; Info=Eukaryotic translation initiation factor 5 n=1 Tax=Culex quinquefasciatus RepID=B0W0M0_ CULQU
gacagtaatttttattgacattaaaacagtaaaatttataggtaatatataaacaacttatcaagtccaaccatattttgcaaaaacatctaacacaagatcttttaaagataagtgactcgaatatgcaattctataccactctagataagacaactatgaacgaatttcacgacagtcacttccaagaaatacatttttttctgtaaccaatgattccctttgatcaacatcgaaaacgggttttaatatgggaaaatgctagtttaatattcttaacattgcaaaaatggtaaatagtaaaaataatagttgtacaggatgatacgtacaaaacaaaatggcatctatcggaaaaaaactgacgatattgaaaaaatgagagcaatttttaatattattagtagtttgcttaatagattccaatctgtttagtgcaacactcaccctgcaatcctgatcaccaacattaacatatttataaaaatcataatggatagatagatagatataaaattatactaaagccctttataatagttaggaccatcggattaaacaaaatataaacaagtaccgataaatgtgtagtttagacacaagctaagagtaatggcaacatcgcgctgtcattcttagaatgtaggttatgttgatggagtgtctttactaaactttaccgtgtacagcttttacttatagggggtgttccaaaacgtcttcatggcggaattttcaaatgttttgttaaatatttactctacttggacagttatatcgattttaataaataaagtccctgctttatgtcatttcgcaagtatttaattgttccaatattttctaacacttatcgattcttgtgtgtgtatgtgtgttagataaaactcacaatccagcgccaagaacatgacagatgacacctgtcatgtttttggtgtctcgtgttgcttgaaatgtgaggtacaggtggaatttagcaaatccacgatgttttgactttctttcttgattcttgaaattgtaaaattgaaacaccctctattttatgtaagtttgagccattgctcccccaaacaaatatattgttacaaaattgtgacctgtgtgatgattattaaaaaaagaacaaatcggtttttgtcccgtaggagtttcagtcgtccaaaaatgaagaatataaagagtgatggcctttttcatacggaatattacgtttaatggtacactactataatgataattataataaaaaagttcgtaacaaagggcctaactaataataagagaagtgtttagatagcatcgatatccacatcatcttgcccatcatcatcgttactagccaccggtttgggtttgctttggggagtaatcttcagttggatttgtgccctgtcattgtattcaatctccacgtcatcgtcttcttcatcatcatcgttgtcggaatcttccgattcggcttccttcaaccattttatgaacggttctgctttgtcgtgaatctcttggcttacttccttagctacgtattttttggacactttttctgaccattctatgatgcactcctctccaagaatgtccatatcgtaaaagattttcagcaaaccgggaactttgctcataagtttgtctttgtgtaaggcaatgacttgttctagcccaccaattagatatttctgtgcttttttctcgttcaaagtgaaacgaaggaagagcatacgatatttcttagcctgtgcgaggatgttctgatcaaaaagcaactcggccaaaacgagaggagctttggttttaatctccaaacgttcagcttcgctcaatacttctttttgagtctgcacatttcccaaaagtccggtatcgcgtttaacttttaccatgttgtacaagatgtccatacgttctttctcggatttttcaagatcgtcactgatggtcatgtttttggcaccatcactgagatcttgcatcctttgccttacagcttcctcggatacatctacggcccattcagtttggtcatcatcgctgccaccgttattgtctgttgaattttccatagcagaagaatcgagcgtcgaatcattttcttggtcgccattcgcttcgccattacgtttgctgcgcttggatcgttttccttcagtcagcgacgatccttgactggctggattcgagttgggtggattcttcaagatgaaggtcatcaacttatggttggattccaacaaaccgtggtagccgcacgctttacatccctgggatattgtgtttttcttcacagaaactagaagatcggtttctggattgtcgcattcgggacacaaaacaaacttgcgtatgaacccatctagaagatcttgcagtttagaagcgtcatgggaaccgttcacaatgaaacgttcatttttaaagtcgaattgagtttgagcacccaactcacagccgaagtatttagtagggtaagtgggaggtcggcctagagctttggcgacctcggccatgttgacaattaccgtttttataccgttacctttaccttcaactttggccataagccggggcattttgtagcgatagaacacatcgctgacgcctctgttaacgttgacactcattgtggatgtagtgcgttagctatgttgtaagatcgtaggagaaaggatattggttttaatgatctttggtgtttttcgtgaaattataatagccagtcacgtttctctaaatggttgaagttttcgatgcctattcgatgaaaattttatagtcctataataagtaggctcacgtcgctgcgaagtcatacacctcgcttgctcgggccctaaatccccaactatgcttcttgctaataatgtcttttgatggtttaccaaagtcatataaaattttagcgcccttatggacgatgacttttagagatttaaaatctttctgttaaatatgatattctaaatgagcttacgaatatctaaaaatctctactgggtccagcttcaaccacgtttcatctgcatccagcaacagtatcgtatctaattaggtgaacaaaaaccaaaatagtacgaataaaaaagaaaaattaatctataacgatgatgttataaattatttgccgaaaaatataactaaagtccagctgcaattgatatcttaactaaaaagttaatctttgccacagcaggaattttccttcacactgacctgggctg

SEQ ID NO: 4061 - DNA, 3358 bp, Diabrotica virgifera
  SmartBlast Evalue=5E-52; Info=Pol polyprotein (Fragment) n=1 Tax=Drosophila buzzatii RepID=A1BPH1_DROBU
acttcaaaatcctacattctatacattgtattcatatgccgtgtgtaggtatagttgttccaacagatctttacacatggtgacattctttactaaatacttttaatactaggtctctttttttactcacagaaaccagtatggcaaaattcataactgttataactactaactgttgccttcttttttattactgcgggtaattatttaattttaaactaatgtgacaaataatatgtttcaacctatacatataataatatcagtaaactacatgaatctggctattgtcctgtcgaatggaaacttatttgtttattttcgagatgactgttttaatttttgttttttttttatttatttattacatttctatatttatctttatattagtaatagctggtatgatgttcaagctttaatgttgagtccattaatctccgcaatagtgaaaaaatagatttcaataaaataactttataagatacgtctaccgggataacagccattttaccgggataacagccatttctatggctattatcccggtagcattagccaaaggatgtacaaacataaactttgtaaatcagtcaacaacaacaaaaagaaagcgatttacacttttagatgtaggatacggaccaagtatcacgatattgtcctataaaaccagctggaggtaagttactaggcttacaagaagcacaaactttacatttatgaacatagttcacaacaaaaggtctcattttaggccagtaataaagttctgaattcctagaaagggttttaaagacacctaaatgagaagctgtaggataatcatgatacatatgcaaaattatttccttcttatgtggagcaggaacaaaaattttccattctggagtagaatcagaaaatttaaatttagaaaaaacatgtttgtaaagaacattatcttgaaccttaaaggcaggatataaatcactattatctgtaacttttaccaagataccaagcatctgtttttaaatcagacaaattcaacagagaaacttgattcaacagagatgcttcaggaattcttgaaagtgaatcagctactacaataaatttgtgacaagacagtttcattatccatctagcaattctaggagaaggattcttcatgctgtataaccactgcaatgatgagtgatctcgtgatctgtaatcacagtaaagttatcactaccgtcaatatagcatcgaaatttttcaattgaaagcaaaattgctaacaattctttctcagtagttgtgtactttcgctaagctctagttaaagttttgctgaagtaagcaataggatgttctaattcatcatccttttgaaattaaacaccacacacaccagtgtcacttgcatcacaagcaagatagaaatgcttggaaaaatcaggacttgcaagaacaggagctgttgtaagaacctgtttaattttatggaaagtttcatcagcttcaggagtccaagtaatgggttgacctttctttctgcctttcaataagtcagaaatgggactgcaaatagtagcaaaattgtttaaaaacctacggtaataaccaattaagccaatcaacctacgtatctgggttgtatttgtgggtacatgatattccaaaatagactggaccttaccaggatcagttcttaacccttgattatctactacaaatccaagaaattgcaatgaagatctgcaaaactagcatttctcaaaattgacagtgagatttgcatctttcaaacggtagacgtatgaatgaagataaacgttacacttaatgttttgatttaaattgtttgcaaatcaataattacgtttgtactaagatctgttggaacaactgtatgtgctcacatgctatggaaaattattttgtttttgaatcactgagataaacacttaatatattcttaagttttgtctccaccaaagcaacataccgcaacttactgcgataacaacataaaagttggctgttgttgtgaagcagtatgtttatgtcgcagttggagtctgttgcgtgtttccatcttcggcggtaaagataaaagaaaatcttgcaacatagcgcaacagctacaaatgttaacataagtttcgaactgtttgttttgttttctgaatttggttaataaaatggtgttaaaagggactgtagaagcctgtattattttaagagataattataaacaggatatatatatctttggaatgcaactgacaaaaattataaatgcagagaaggtaaatatgatgccaggtacaatatttgtagcagtctaaactgtgaaattatagaagaggcaaaaccaaaaataacaaatttgtgagcccagttctacggagaaaggaaaaaatacaaggctatgaagaaatccggagcaggtgcctctttcgtcgctcattataaacaactgttgcttcagtggatacatgatgatacatctagccgcaaatacgtgcaacaaactccaacattggaacaacaaagttgcttgggtatagatactttgttacaaaaatgtgaaacttaattcaacctacttcaacattgtaaaacacaaaagttgaagtaagttgctttggtgcagatacacatttagaaaaagaatgttatcgtttttaatatcactaatcacgattcatggctgcttcaataacattaatataatcgttaactccttcgttaatttctttaaaatggggcacatcctcaaatcttttgatccatgctgatatttttggaaacctttcttctgtgattggaataaagtatgaaaaagttgtaacgttggtaacacagctaagatcagcgatggtcatttggtcgccagctatccattcgttttgggttagaaatttttctactattccaatagcctcatctaataaagctatatatttttcggggacttctttgactgattcaaatattattaattttgttattgcgagcccccttgcgaagagaatgccagtgtcaaaatgtagtctatggttgagagtagctctcgattttatatcttttggaagtaaaggcgaatcttcagcatatgtttcaataaggtactgcataatagcatgactatcggctaaaatgaatccgtcatcatctaaaagtggtacggtatgttgagggtttaactttaggtaatcctgtgtcatttgttctccagttattaaatccatatcaattaaatccagatctatatttgcaatttttgaacacaataacacagcccttacgggcggactaagattcattttgtataattttggagtcatgttttgatgttaacaatacgctactcaactgagaaatg

SEQ ID NO: 4062 - DNA, 3336 bp, Diabrotica virgifera
  SmartBlast Evalue=5E-49; Info=Pol polyprotein (Fragment) n=1 Tax=Drosophila buzzatii RepID=A1BPH1_DROBU
acttcaaaatcctacattctatacattgtattcatatgccgtgtgtaggtatagttgttccaacagatctttacacatggtgacattctttactaaatacttttaatactaggtctctttttttactcacagaaaccagtatggcaaaattcataactgttataactactaactgttgccttcttttttattactgcgggtaattatttaattttaaactaatgtgacaaataatatgtttcaacctatacatataataatatcagtaaactacatgaatctggctattgtcctgtcgaatggaaacttatttgtttattttcgagatgactgttttaatttttgttttttttttatttatttattacatttctatatttatctttatattagtaatagctggtatgatgttcaagctttaatgttgagtccattaatctccgcaatagtgaaaaaatagatttcaataaaataactttataagatacgtctaccgggataacagccattttaccgggataacagccatttctatggctattatcccggtagcattagccaaaggatgtacaaacataaactttgtaaatcagtcaacaacaactaaaagaaagcgatttacacttttagatgtaggatacggactaagtaaatcagcaaataaaaattgaaaaggaaaattaatatcacgatattatttatgaacatagttcacaacaaaaggtctcattttaggccagtaataaagttctgaaatcctagaaagggttttaaagacacctaaatgagcagctgtaggatcatcatgatacatatgcaaaattatttccttcttatgtggagcaggaacaaaaattttccattctggagtagaatcagaaaatttaaatttagaaaaaacatgtttgtaaagaacattatcttgaaccttaaaggcaggatataaatcactattatctgtaacttttaccaagataccaagcatctgtttttaaatcagacaaattcaacagagaaacttgattcaacagagatgcttcaggaattcttgaaagtgaatcagctactacaataaatttgtgacaagacagtttcattatccatctagcaattctaggagaaggattcttcatgctgtataaccactgcaatgatgagtgatctcgtgatctgtaatcacagtaaagttatcactaccgtcaatatagcatcgaaatttttcaattgaaagcaaaattgctaacaattctttctcagtagttgtgtactttcgctaagctctagttaaagttttgctgaagtaagcaataggatgttctaattcatcatccttttgaaattaaacaccacacacaccagtgtcacttgcatcacaagcaagatagaaatgcttggaaaaatcaggacttgcaagaacaggagctgttgtaagaacctgtttaattttatggaaagtttcatcagcttcaggagtccaagtaatgggttgacctttctttctgcctttcaataagtcagaaatgggactgcaaatagtagcaaaattgtttaaaaacctacggtaataaccaattaagccaatcaacctacgtatctgggttgtatttgtgggtacatgatattccaaaatagactggaccttaccaggatcagttcttaacccttgattatctactacaaatccaagaaattgcaatgaagatctgcaaaactagcatttctcaaaattgacagtgagatttgcatctttcaaacggtagacgtatgaatgaagataaacgttacacttaatgttttgatttaaattgtttgcaaatcaataattacgtttgtactaagatctgttggaacaactgtatgtgctcacatgctatggaaaattattttgtttttgaatcactgagataaacacttaatatattcttaagttttgtctccaccaaagcaacataccgcaacttactgcgataacaacataaaagttggctgttgttgtgaagcagtatgtttatgtcgcagttggagtctgttgcgtgtttccatcttcggcggtaaagataaaagaaaatcttgcaacatagcgcaacagctacaaatgttaacataagtttcgaactgtttgttttgttttctgaatttggttaataaaatggtgttaaaagggactgtagaagcctgtattattttaagagataattataaacaggatatatatatctttggaatgcaactgacaaaaattataaatgcagagaaggtaaatatgatgccaggtacaatatttgtagcagtctaaactgtgaaattatagaagaggcaaaaccaaaaataacaaatttgtgagcccagttctacggagaaaggaaaaaatacaaggctatgaagaaatccggagcaggtgcctctttcgtcgctcattataaacaactgttgcttcagtggatacatgatgatacatctagccgcaaatacgtgcaacaaactccaacattggaacaacaaagttgcttgggtatagatactttgttacaaaaatgtgaaacttaattcaacctacttcaacattgtaaaacacaaaagttgaagtaagttgctttggtgcagatacacatttagaaaaagaatgttatcgtttttaatatcactaatcacgattcatggctgcttcaataacattaatataatcgttaactccttcgttaatttctttaaaatggggcacatcctcaaatcttttgatccatgctgatatttttggaaacctttcttctgtgattggaataaagtatgaaaaagttgtaacgttggtaacacagctaagatcagcgatggtcatttggtcgccagctatccattcgttttgggttagaaatttttctactattccaatagcctcatctaataaagctatatatttttcggggacttctttgactgattcaaatattattaattttgttattgcgagcccccttgcgaagagaatgccagtgtcaaaatgtagtctatggttgagagtagctctcgattttatatcttttggaagtaaaggcgaatcttcagcatatgtttcaataaggtactgcataatagcatgactatcggctaaaatgaatccgtcatcatctaaaagtggtacggtatgttgagggtttaactttaggtaatcctgtgtcatttgttctccagttattaaatccatatcaattaaatccagatctatatttgcaatttttgaacacaataacacagcccttacgggcggactaagattcattttgtataattttggagtcatgttttgatgttaacaatacgctactcaactgagaaatg

SEQ ID NO: 4063 - DNA, 3326 bp, Diabrotica virgifera
  SmartBlast Evalue=0; Info=Ebna2 binding protein P100 n=1 Tax= Aedes aegypti RepID=Q17PM3_AEDAE
tttaacgatcaaagtaatttatttgtaaacagagcccatcccctacattatcgctttcccgaaatatgaataattgcagtacgtacataaatatataacaattcagaggactaaatatttcctttactggcgtatcagtctagtttaatattatttcatgtcttttacagagtggaagtgtgtgaacacctttagaattcatcacaaaaattaatattcaacagaaatatgtaaatagataaattgaattcaaaataaatatatcataaaaacaatcgtgtcggaaaaaattacaaaaaaatgacttagaataaagagacccagtatataaatataataattaaaatttgcacataataaaaatataaaacaacaaataacacctaaaaacatatttctcatgtataaatatcggaaatcaattataaatattatgtctattactataaatgtggaagttgtttcattttaatcaatatgatttggaagtctatgaacctacaatgtagatggtttgctctggtagactggtccctattccctagtttaaacgccaagtccaaattccttagcatcgacttctgtgatgtcaccatattcccaaatattagcgtgttgtttcttggccgtttcctgagcttctcggtaactttccaacaatttattgttacgccttcctttgatgttgtcgacgataagtaatccctctttgacgagattttttacaatgtcggcatcagacgtcttgtcagaatgtaaagaagctgctgcaggggatccgggttgtctgtattctacattcatgtatagcttgctaacggcggtatcttctttaaggtatttgatagccaacgaagagaattcttcgtctttgggcaggacgatgaagggaaggacgtattctgttgcgaagggtctctcacttacgtaggcggcgggtaaactggctaggcgggtggttggaagagtttctttgttaccgtagtcgatgtaatgaacagaagcttttcctccttgtactttttcaaccttcaccctgtaccactcatcgtcgactgtgaatttggcagcacagatatcaccacgtttcggtgtaaaagcaccgggaagaggcgggttggcttggaattcttgtcgcagtttggcgaacagagcttcagcttttggtccttctgaaatcttttgaatgtagaaactaccttcgggcgtcacctctgtcactacgacttcctcaaagttcacttgacgttcgacaggtactttttcctcttcgtgtttttcttccttttcttcttcgacataatttttccatattcttaatttttcagattttgcactgtcttctgcacttttcaatagagacgcgtattgggatttttctcctgtgaaatgaaccgaagcaaaaccttctttaacgagtgccacagacatattcacattatctacccacaaccaaccaataaaattgcctgctttgtcatgagtgtcgacttggatggatacttcccgttgcatgcatctttctttagtgaagaggagcgcttcgtctccgtagggttctccgggggtgtcggtggcttggcgggttgctctcgggcagttgataccacccaacaagaaagtgcataagctgtttgattttggaatgtataatctcaatctagatccgctggcaacaaattcgacgattccatctatcctttgagctctctgtaaggcaggaagttccaattttgctctagcagcatcaatttcggtaactcttagtggaggagcatctttcttggagtgaacaccgacttgagatttgttagccttagtctctgcagttaggagttcatcatagcgacaactacgttggtcatcgtcctggcgatacttaacaacagttgcaagacctttggaaactagagcttctgcgacattttttcctccgacggtaacggtagcacaaactttttctgggaagccatctctagcttcttggatataatcaacgacgacatgcacctttttgccaatgagtttctttctcaaatattctctggcttcaaacatgtaggggatatcgtagaggggacggaaacccttaggtcttggaatgggttttccctcgtcgtcgttggcacggccaggctctttgggggcacgaatactggccaaaaagatctttttgctgtcaccgttggccatcttaagtacaagggcatctccgttgttgacctcgctaaccgtagcggagaattccttttcttttccggtaattttaggtgccgtcggtacgaaatctttccacaacctccttcgaccttctttagcttgcttctcagctgctctcaatttgtctgggttgctcttcatgagcatgatagaccaatcaacacatttgcctaaaccttccttgagtaagagttcggcaatatttccttttggatgaattacggttccaatgaaattattgttattgactgcttcaaggacgatttctacatctctttgaagaagacggacttccacgaagtaacgagcttcttcggcgaactcaactttggcgttagggtctcttttgccattggcgtctaatttgaaaccaggacacctaattccagagagcataagagtcacgtagtaaaagtctggtaacaagaaagctcttactgtggatccatctcgtacgtgttcaataactgcttttactggcttgaattggagttgatctaccaattctttggatttttcaatagtccatttgatatcacggacgtgatcagatgacggagcgccactccatatgccttttccagctgatttggcagcatcttgaagttcaagcaggcgggttatttctggagtaggtcttactgcttctctaacagtgactagtccctctgataccaaggattccgtaatgttttctgcagtattaaagtcttttcccaaataaacaactccatattcacgaacagcatttggtggtttttcactagtaaagaatacctcttccccgatgagtttctttctcaaaaattcccttgcttcccaggcccatggttcatcctttgttgtttctccagattctgcagctcgtctagctaattttggtgcagtaatgcttgaaaagttaatctgtttttcaggtggaggtgctccagatggtgctcgaattataacagaatccccagaaagaatctgttttataattccacgtttcggaggagctggagtcggttgctgggtcgtcatcgtggatatttggttgaatgaaaggaaaggggagtgaaatttcttgacatctcacttaaacgtcaacgtcatcatcacgtgac

SEQ ID NO: 4064 - DNA, 3326 bp, Diabrotica virgifera
  SmartBlast Evalue=0; Info=Ebna2 binding protein P100 n=1 Tax= Aedes aegypti RepID=Q17PM3_AEDAE
tttaacgatcaaagtaatttatttgtaaacagagcccatcccctacattatcgctttcccgaaatatgaataattgcagtacgtacataaatatataacaattcagaggactaaatatttcctttactggcgtatcagtctagtttaatattatttcatgtcttttacagagtggaagtgtgtgaacacctttagaattcatcacaaaaattaatattcaacagaaatatgtaaatagataaattgaattcaaaataaatatatcataaaaacaatcgtgtcggaaaaaattacaaaaaaatgacttagaataaagagacccagtatataaatataataattaaaatttgcacataataaaaatataaaacaacaaataacacctaaaaacatatttctcatgtataaatatcggaaatcaattataaatattatgtctattactataaatgtggaagttgtttcattttaatcaatatgatttggaagtctatgaacctacaatgtagatggtttgctctggtagactggtccctattccctagtttaaacgccaagtccaaattccttagcatcgacttctgtgatgtcaccatattcccaaatattagcgtgttgtttcttggccgtttcctgagcttctcggtaactttccaacaatttattgttacgccttcctttgatgttgtcgacgataagtaatccctctttgacgagattttttacaatgtcggcatcagacgtcttgtcagaatgtaaagaagctgctgcaggggatccgggttgtctgtattctacattcatgtatagcttgctaacggcggtatcttctttaaggtatttgatagccaacgaagagaattcttcgtctttgggcaggacgataaagggaaggacgtattctgttgcgaagggtctctcacttacgtaggcggcgggtaaactggctaggcgggtggttggaagagtttctttgttaccgtagtcgatgtaatgaacagacgcttttcctccttgtactttttcaaccttcaccctgtaccactcatcgtcgactgtgaatttggcagcacagatatcaccacgtttcggtgtaaaagcaccgggaagaggcgggttggcttggaattcttgtcgcaatttggcgaacagagcttcagcttttggtccttctgaaatcttttgaatgtagaaactaccttcgggcgtcacttctgtcactacgacttcctcaaagttcacttgacgttcgacaggtactttttcctcttcgtgtttttcttccttttcttcttcgacataatttttccatattcttaatttctcagatttcgcactgtcttctgcacttttcaatagagacgcgtattgggatttttctcctgtgaaatgaaccgaagcaaaaccttctttaacgagtgccacagacatattcacattatctacccacaaccaaccaatgaaattgcctgctttgtcatgagtgtcgacttggatggatacttcccgttgcatgcatctttctttagtaaagaggagcgcttcgtctccgtagggttctccgggggtgtcggtggcttggcgggttgctctcgggcagttgataccgcccaacaagaaagtgcataagctgtttgattttggaatgtataatctcaatctagatccgctggcaacaaattcgacaattccatctatcctttgagctctctgtaaggcaggaagttccaattttgctctagcagcatcaatttcggtaactcttagtggaggagcatctttcttggaatgaacaccgacttgagatttgttagccttagtctctgcagttaggagttcatcatagcgacaactacgttggtcatcgtcctggcgatacttaacaacagttgcaagacctttggaaactagagcttctgcgacattttttccaccgacggtaacggtagcacaaactttttctgggaaaccatctctagcttcttggatgtaatcaacgacgacatgcacctttttgccaatgagtttctttctcaaatattctctggcttcaaacatgtaggggatatcgtagaggggacggaaacccttaggtcttggaatgggttttccctcgtcgtcgttggcacggccaggctctttgggggcacgaatactggccaaaaagatctttttgctgtcaccgttggccatcttaagtacaagggcatctccgttgttgacctcgctaaccgtagcggagaattccttttcttttccggtaattttaggtgccgtcggtacgaaatctttccacaacctccttcgaccttctttagcttgcttctcagctgctctcaatttgtctgggttgctcttcatgagcatgatagaccaatcaacacatttgcctaaaccttccttgagtaagagttcggcaatatttccttttggatgaattacggttccaatgaaattattgttattgactgcttcaaggacgatttctacatctctttgaagaagacggacttccacgaagtaacgagcttcttcggcgaactcaactttggcgttagggtctcttttgccattggcgtctaatttgaaaccaggacacctaattccagagagcataagagtcacgtagtaaaagtctggtaacaagaaagctcttactgtggatccatctcgtacgtgttcaataactgcttttactggcttgaattggagttgatctaccaattctttggatttttcaatagtccatttgatatcacggacgtgatcagatgacggagcgccactccatatgccttttccagctgatttggcagcatcttgaagttcaagcaggcgggttatttctggagtaggtcttactgcttctctaacagtgactagtccctctgataccaaggattccgtaatgttttctgcagtattaaagtcttttcccaaataaacaactccatattcacgaacagcatttggtggtttttcactagtaaagaatacctcttccccgatgagtttctttctcaaaaattcccttgcttcccaggcccatggttcatcctttgttgtttctccagattctgcagctcgtctagctaattttggtgcagtaatgcttgaaaagttaatctgtttttcaggtggaggtgctccagatggtgctcgaattataacagaatccccagaaagaatctgttttataattccacgtttcggaggagctggagtcggttgctgggtcgtcatcgtggatatttggttgaatgaaaggaaaggggagtgaaatttcttgacatctcacttaaacgtcaacgtcatcatcacgtgac

SEQ ID NO: 4065 - DNA, 3179 bp, Diabrotica virgifera
  SmartBlast Evalue=4E-16; Info="Viral A-type inclusion protein, putative n=1 Tax=Trichomonas vaginalis RepID=A2DGN0_TRIVA"
gttgggatctacagttcaataggaaaagtcccagtcagagtcagcagatgcctcttcaacgacaccaaggacgcctactccgacatctcagacaactgtgtaaaagctttccaatccggaaccttcatcgacaaatggcaggataagaacatacttgctgagaaaggttctccaatcgtattggaagagtacgtttccaaggctgatttggtgaaaaacgaaatttctctgagaacaggcaagatttgcaggtacgatagaggtttctgttatgatccaactgaaaccaacacttatgctgtcgtttgggaaatcctcgacaagtccaaagttcaatgtcctaatcaactctttaaggtattccaaggagatgttgatttctgggaattcaagcaacaaggtctcaactatttgttccattacgatgcgcttgaggacaaagctttttacttgagcttagagaacagagcccaatgtcaagatacagatgtttggtacaccgaagaaggttacattgtgtccactaagccacttaaatctaaagatatggaatccaaaggattggctctgagaaccaaaggaggagttaaaggaggtgttaagggaggagccataaaagcaggagctagcgtaagtcatgattacttcactgtcagaaccaaaaaaattgtaagtgaaaacattttaaaacattgtgacatcaaatctctatcatttgaagaattgattgaagccgtcgattcagactacctacaaaacccccacaacttgcatcttattttggaacggtactacaaccttattatggacacaaaacaggaagttatcgaacttatctataaagaaagtacagtaaacattacaaaagaattaaaacaacaacttattattctgcaagagcttttagaaaaaactcgcgtggaggttactcaaatccaagaaactcttcttgctgctggcgatctcaaaggaataagaattgatgtagatactttggctaaacaaattgccttattattgaagacaaacgaacactacgatgaaatcattaaagaaatttatgaatctattaaaaagaacactgttttgatcaacgatcaaagtaaagaaattacaactctctatgagaaagtggaaaaaatccaacaaattataaacacacaactccctgaatttatcacaaaacaagaggtgtacgaaaagatcacacaaatagaacaagattttcatggaaagctcagagatttagccatgaatgtaaccatgcttattatggaaggtggtggcggcggctctggtggtgtgagaggagggccaaaagcaaaagaagaacttgaaggacttgttcttgagaaactaaaaactttcaaacttgatgaacttgaatcaaaaattgacaggctttcagaaaagattcaattagaattaaaccaatacagacatgaatcgtatagtaactcaactctcttagaggaaagaattttgaagaagcttgccgacttggaagctaaaaacaaaccaattttagacagattgaacaagtacgaagaacaaatcaacaatttgtttagcgaagtcagtgttattaaagaaactgctgaacactttaaagaatctgtagaaaaagtttttaaagaatttgactccaaacatgaaagtattttgaaaacttttgaagactatgacaaacttattaatcaagtaagaagtgacttaaaagtattgagtgagaaggaaattgactttactccagctattgaaaaagccaaacaattgctacaagaagcacttaggtcaagagacattcgtctagaaaccttagagactcttgctgttaagttgggagacagtgttgaaaagagcgaacacgagtttgataacgtagaaaatcaaattaagggcctccaggaatctttaagtcgtatcgacagagttaaagaagaaatttcagaagttattgatagaaaatcagctcaatgcgaaaagaatctttctgagttgaaggaaattgtagaacaaatatctgcaaaacgcgatcaaacagacaaagatcttcaagccagtaaagaagcttcaaaaacaaggatagatggagtttacgaagaatgtaggtcttcaattgagcatattaatgccactttgggagaagacagaaaattaattgaccaaatacaaagtgaagataccaggatcaacggtgttattgataatttaaggaaagaaatcggaggccacaaggattcgatttcaaaacttgaaagcctcataacagaaaagagttttgcgtgtgaagctaaaggcaagcaaaaccgtgagcttattgatgaattgaagaaaaaggtaactgaattgtacgagatcgttaaaaaacaagaggatctgattctcgaattaaaaaagtcaactgaaaaagcttcctttactaaaggaggtactaagggtggtactaaaggtggtacggtactaaaggaggatacggtcaacaatctcaaactagccaagatttcgattacgagagtgaatggaacaatggtcaaaagattgtctcacaacaaacatctgatgattgggaacaacaaaaccaacaattcggtggaagtgacagctacgttaaaactacaaagactgttgttcattcttcgatacctgaccacagccacattcacaaacaaaccacacataactcccattcccactcctcgatagaagagactgacgtcaacttgattatcgaaagacaagaaggtgaaatcactcacttaagaacagtccttgccaacgctcatgtcgctctggatgctcatgagcatagaattgatgacttagaacttaggattgatcaattattgcacaaacttgctcatgtacaaaaagatctagaaggtgatatccataccatggatatcagagttgatgaagtacacgaagaacttgtgcatttggagagtgacttaagaggttcaattgcaggatgctgccatcagaatcacggacagcttgttagtcatgccaacgtcaagacaacatatagtagctactccggtaggaaacattaaaacctctaaactgaattcattgaaatatttttaatattttcactttaaacaattattatttatttgttaaggttccattctagtgatatttttatataaatgtataataaatcttgacaaaaa

SEQ ID NO: 4066 - DNA, 3179 bp, Diabrotica virgifera
  SmartBlast Evalue=1E-16; Info="Viral A-type inclusion protein, putative n=1 Tax=Trichomonas vaginalis RepID=A2EMR6_TRIVA"
gttgggatctacagttcaataggaaaagtcccagtcagagtcagcagatgcctcttcaacgacaccaaggacgcctactccgacatctcagacaactgtgtaaaagctttccaatccggaaccttcatcgacaaatggcaggataagaacatacttgctgagaaaggttctccaatcgtattggaagagtacgtttccaaggctgatttggtgaaaaacgaaatttctctgagaacaggcaagatttgcaggtacgatagaggtttctgttatgatccaactgaaaccaacacttatgctgtcgtttgggaaatcctcgacaagtccaaagttcaatgtcctaatcaactctttaaggtattccaaggagatgttgatttctgggaattcaagcaacaaggtctcaactatttgttccattacgatgcgcttgaggacaaagctttttacttgagcttagagaacagagcccaatgtcaagatacagatgtttggtacaccgaagaaggttacattgtgtccactaagccacttaaatctaaagatatggaatccaaaggattggctctgagaaccaaaggaggagttaaaggaggtgttaagggaggagccataaaagcaggagctagcgtaagtcatgattacttcactgtcagaaccaaaaaaattgtaagtgaaaacattttaaaacattgtgacatcaaatctctatcatttgaagaattgattgaagccgtcgattcagactacctacaaaacccccacaacttgcatcttattttggaacggtactacaaccttattatggacacaaaacaggaagttatcgaacttatctataaagaaagtacagtaaacattacaaaagaattaaaacaacaacttattattctgcaagagcttttagaaaaaactcgcgtggaggttactcaaatccaagaaactcttcttgctgctggcgatctcaaaggaataagaattgatgtagatactttggctaaacaaattgccttattattgaagacaaacgaacactacgatgaaatcattaaagaaatttatgaatctattaaaaagaacactgttttgatcaacgatcaaagtaaagaaattacaactctctatgagaaagtggaaaaaatccaacaaattataaacacacaactccctgaatttatcacaaaacaagaggtgtacgaaaagatcacacaaatagaacaagattttcatggaaagctcagagatttagccatgaatgtaaccatgcttattatggaaggtggtggcggcggctctggtggtgtgagaggagggccaaaagcaaaagaagaacttgaaggacttgttcttgagaaactaaaaactttcaaacttgatgaacttgaatcaaaaattgacaggctttcagaaaagattcaattagaattaaaccaatacagacatgaatcgtatagtaactcaactctcttagaggaaagaattttgaagaagcttgccgacttggaagctaaaaacaaaccaattttagacagattgaacaagtacgaagaacaaatcaacaatttgtttagcgaagtcagtgttattaaagaaactgctgaacactttaaagaatctgtagaaaaagtttttaaagaatttgactccaaacatgaaagtattttgaaaacttttgaagactatgacaaacttattaatcaagtaagaagtgacttaaaagtattgagtgagaaggaaattgactttactccagctattgaaaaagccaaacaattgctacaagaagcacttaggtcaagagacattcgtctagaaaccttagagactcttgctgttaagttgggagacagtgttgaaaagagcgaacacgagtttgataacgtagaaaatcaaattaaaggcctccaggaatctttaagtcgtatcgacagagttaaagaagaaatttcagaagttattgatagaaaatcagctcaatgcgaaaagaatctttctgagttgaaggaaattgtagaacaaatatctgcaaaacgcgatcaaacagacaaagatcttcaagccagtaaagaagcttcaaaaacaaggatagacgaagtttacgaagaatgtaggtcttcaattgaccatattaatgccactttaggagaagacagacaattaattaacaaaatacaaagtgaagatactaggatcaacggtgttattgacaatttaaagaaagaaatcggaggccacaaggactctatttcaaaacttgaaagcctcataacagaaaagagttttgcgtgtgaagctaaaggcaagcaaaaccgtgagcttattgatgaattgaagaaaaaggtaactgaattgtacgagatcgttaaaaaacaagaggatttgattctcgaattaaagaaatcaactgaaaaagcttcctttactaaaggaggtactaagggtggtactaaaggtggtacggtactaaaggaggatacggtcaacaatctcaaactagccaagatttcgattacgagagtgaatggaacaatggtcaaaagattgtctcacaacaaacatctgatgattgggaacaacaaaaccaacaattcggtggaagtgacagctacgttaaaactacaaagactgttgttcattcttcgatacctgaccacagccacattcacaaacaaaccacacataactcccattcccactcctcgatagaagagactgacgtcaacttgattatcgaaagacaagaaggtgaaatcactcacttaagaacagtccttgccaacgctcatgtcgctctggatgctcatgagcatagaattgatgacttagaacttaggattgatcaattattgcacaaacttgctcatgtacaaaaagatctagaaggtgatatccataccatggatatcagagttgatgaagtacacgaagaacttgtgcatttggagagtgacttaagaggttcaattgcaggatgctgccatcagaatcacggacagcttgttagtcatgccaacgtcaagacaacatatagtagctactccggtaggaaacattaaaacctctaaactgaattcattgaaatatttttaatattttcactttaaacaattattatttatttgttaaggttccattctagtgatatttttatataaatgtataataaatcttgacaaaaa

SEQ ID NO: 4067 - DNA, 3379 bp, Diabrotica virgifera
  SmartBlast Evalue=1E-163; Info=Cgmp-dependent protein kinase n= 1 Tax=Aedes aegypti RepID=Q16JU3_AEDAE
aaaatatttagtatctgtaggtccttccaaattttggtttgaatggtgaaggaatctccatcttttgcatcttttgccaatccacgccgaggaaccatttgtggtttttgacatcttgaattccatttttctgcattcccatacgttcggaaggcaccggtctacacaatttctcaacaagatgtctagccttcaaatttatataagttggaaatggaatattgtctattccgcctagaattttattgtacgttttcatgtggctaacatcgtcggttctaaaaggagttttgcctgacaacatttcaaacacgaaagctccaaaggcccaataatccactgctctatcgtgtcccctgtttaatactatctcaggagctacgtattcaggagtacctgcaaatgtataagtttttcctcgatctggtactttcttggcaaaaccaaagtcggttaacttgatgtaaccattcacagctaaaagtaagttttctggcttaagatcacgataaatgatgcctctagaatgaagatattcgaatgccaatagcacacatgaacatatgaatcgcgcttccttttcttcaaaccttttattcttttgtctttgaagcaaactccataaatccccacccaaacacgattccatcaagaaataaatatacttgctatctctgtaagtcctgtataatctgacaataaacggcgacttcgaactcatctgaatccttttctcgttaaaaacatgttcttgttgattctgctcaacaatctcaatttttttgaggtactttaatgcaaatacaatcttttcatttttagtgtgctgtaccaactcaactcttccgaacccaccaactccaagagttttgataatttttaaatcaaacaaattaatatcgtcgtattcaccgtgcacagaccgtatggaatccttgggtttgtcttttactttgatatacttgaagtttttgatgtctcctaagtgatctacgaattcttttcgagttaacgttaaacattcgacgccaggactattggcagttacggttgcttgtctacaatcttcttctaatagagccagttcaccaaaacaatctccttttttgtatactccaacggttcctactccttctttgcttatcgtgacagttccagctctaataatgtaaaatttgtcacctctatcgccctgtttaacaatagcttggtcagtaggaaagaattcagtcttcaataacgtcgaaacaatttgcaacgcatcgcttccaacaacgttcaaaatctcattatttgataaaaactccttgatttcgtcttcttttttcagattactcctaagcacaatttgttggtacaccgtactatccaatacccacacacttccagaagagagagctttaatcgtcgcaagtctcttggcgttgtacaaaatagctagttcgccaaacactctgacatcactgaattgactgaccgtctttccatttacaatgacttggtaatttcctttggctgaaatgtacatatgctgacctttatctccttgtttgatgatcacttcttttgctgaaatttctttgttgtacatcgctgctattacgtcttttagctgctcctctgatattattttatggaggaaatcgttactcttaatggcattacgtatgatctcttcatcactttgaagtttattaaaaactggaagtttttccttcagattttgatcgatacgtactggaacgggaactacaccgtctcttcttggttgtgattcaagtacactgccaatacttgtttttggagtatccaagtcaagacttcgcttgggagaagtagtttcgccataagttgaataaattttaccatcatcagctggttccccattttgatgggtactagatctagttgggggagtagggctcacaggcctattagaaacaggtacagggggtgctttatctttctttaaagctgacttgggtttgggtttttcttgattaatcaatacagctgcatttccggaactgcgatcactagtttttcctttttcaataattcttgctttttctgtattgaagttttgttctcctgacgagtagatctgttcctgaggctgagttattgtttctattttagcgtgttgcagccttgatgagtacatatcctcctcagaattactcttggtcaaatattccgagttttgagtttttgatgaggatatctggtcttcttggtgctgtgttatcgttgaaataactgagggtgaagattttccattatcttgcgaactacttatattatttgttgccttttgtgttaaactgtgtcttcttgtagcagctgtttgttgattagtttcctgcactcctgcagtagtagaaaattgagacattgtatgctcatcttgatgggtagaatatatttcattatcttgcgaactacttatattatttgttgccttttttgttaaactgggtcttcttgtagcagctgtttgttcactggtctcctgaacacctgcagttgtagaaaattgagaccttgtatgctcatcttgatgggaagaagatatttcattattttgcgaactacttataatatttgttgtcttttgtgttaaactgttccttgttgtggcagttgtttgtttattggtctcctgaactcctgcagtattagaaaattgaggccttgcattctgatcttgatgggaagaaaatatttcattattttgcgaactacttatattatttgttgtcttttgtgttaaactgtctcttcttatggcagttatttctggattcgtctccttaactcctgcagtagtagaaaattgaggccttgcatgctgatcttgatgggtagaagttatttcattatcattcgatccggagttttgtcgaggtacagttcccgcagagccgttttgttcatctttttttcttagttttatttccggaagggtcactattctgtctcttgctagatcgccagttttattgtctttgatgttaaactctttggtattagaatttatcactaatgttcggctgaagcagcctcgccgcatacaaaaacaaaataccattttgccacaaaatgacggtaaacgtcactagttggggtaagaatcactttattacgtaccacaagataagataatcattctgaaaacacttcactactacaggaaatataaagaatgtctatcaaatatattatgaagttgaggtttttaacaaacgaaactataatctgctgttcatacactaaactatacttcttacagtaaaaagataaattacaaatttcagtgagaaattaaaatcacaattgaatattacaagtagttcgcaaaataatgaaatatcttctt

SEQ ID NO: 4068 - DNA, 3229 bp, Diabrotica virgifera
  SmartBlast Evalue=1E-163; Info=Cgmp-dependent protein kinase n= 1 Tax=Aedes aegypti RepID=Q16JU3_AEDAE
aaaatatttagtatctgtaggtccttccaaattttggtttgaatggtgaaggaatctccatcttttgcatcttttgccaatccacgccgaggaaccatttgtggtttttgacatcttgaattccatttttctgcattcccatacgttcggaaggcaccggtctacacaatttctcaacaagatgtctagccttcaaatttatataagttggaaatggaatattgtctattccgcctagaattttattgtacgttttcatgtggctaacatcgtcggttctaaaaggagttttgcctgacaacatttcaaacacgaaagctccaaaggcccaataatccactgctctatcgtgtcccctgtttaatactatctcaggagctacgtattcaggagtacctgcaaatgtataagtttttcctcgatctggtactttcttggcaaaaccaaagtcggttaacttgatgtaaccattcacagctaaaagtaagttttctggcttaagatcacgataaatgatgcctctagaatgaagatattcgaatgccaatagcacacatgaacatatgaatcgcgcttccttttcttcaaaccttttattcttttgtctttgaagcaaactccataaatccccacccaaacacgattccatcaagaaataaatatacttgctatctctgtaagtcctgtataatctgacaataaacggcgacttcgaactcatctgaatccttttctcgttaaaaacatgttcttgttgattctgctcaacaatctcaatttttttgaggtactttaatgcaaatacaatcttttcatttttagtgtgctgtaccaactcaactcttccgaacccaccaactccaagagttttgataatttttaaatcaaacaaattaatatcgtcgtattcaccgtgcacagaccgtatggaatccttgggtttgtcttttactttgatatacttgaagtttttgatgtctcctaagtgatctacgaattcttttcgagttaacgttaaacattcgacgccaggactattggcagttacggttgcttgtctacaatcttcttctaatagagccagttcaccaaaacaatctccttttttgtatactccaacggttcctactccttctttgcttatcgtgacagttccagctctaataatgtaaaatttgtcacctctatcgccctgtttaacaatagcttggtcagtaggaaagaattcagtcttcaataacgtcgaaacaatttgcaacgcatcgcttccaacaacgttcaaaatctcattatttgataaaaactccttgatttcgtcttcttttttcagattactcctaagcacaatttgttggtacaccgtactatccaatacccacacacttccagaagagagagctttaatcgtcgcaagtctcttggcgttgtacaaaatagctagttcgccaaacactctgacatcactgaattgactgaccgtctttccatttacaatgacttggtaatttcctttggctgaaatgtacatatgctgacctttatctccttgtttgatgatcacttcttttgctgaaatttctttgttgtacatcgctgctattacgtcttttagctgctcctctgatattattttatggaggaaatcgttactcttaatggcattacgtatgatctcttcatcactttgaagtttattaaaaactggaagtttttccttcagattttgatcgatacgtactggaacgggaactacaccgtctcttcttggttgtgattcaagtacactgccaatacttgtttttggagtatccaagtcaagacttcgcttgggagaagtagtttcgccataagttgaataaattttaccatcatcagctggttccccattttgatgggtactagatctagttgggggagtagggctcacaggcctattagaaacaggtacagggggtgctttatctttctttaaagctgacttgggtttgggtttttcttgattaatcaatacagctgcatttccggaactgcgatcactagtttttcctttttcaataattcttgctttttctgtattgaagttttgttctcctgacgagtagatctgttcctgaggctgagttattgtttctattttagcgtgttgcagccttgatgagtacatatcctcctcagaattactcttggtcaaatattccgagttttgagtttttgatgaggatatctggtcttcttggtgctgtgttatcgttgaaataactgagggtgaagattttccattatcttgcgaactacttatattatttgttgccttttgtgttaaactgtgtcttcttgtagcagctgtttgttgattagtttcctgcactcctgcagtagtagaaaattgagacattgtatgctcatcttgatgggtagaatatatttcattatcttgcgaactacttatattatttgttgccttttttgttaaactgggtcttcttgtagcagctgtttgttcactggtctcctgaacacctgcagttgtagaaaattgagaccttgtatgctcatcttgatgggaagaagatatttcattattttgcgaactacttataatatttgttgtcttttgtgttaaactgtctcttcttgtggcagttgtttgttgattggtctcctgaactcttgcagtagaagaaaattgaggccttgtattctgatcttggtgggtagaagatatttcattatcgttcaatccagagtgttgtcgagggagagttcccgcagagccattttgttcatctttttttcttagttttatttccggaagggtcactattctgtctcttgctagatcgccagttttattgtctttgatgttaaactctttggtattagaatttatcactaatgttcggctgaagcagcctcgccgcatacaaaaacaaaataccattttgccacaaaatgacggtaaacgtcactagttggggtaagaatcactttattacgtaccacaagataagataatcattctgaaaacacttcactactacaggaaatataaagaatgtctatcaaatatattatgaagttgaggtttttaacaaacgaaactataatctgctgttcatacactaaactatacttcttacagtaaaaagataaattacaaatttcagtgagaaattaaaatcacaattgaatattacaagtagttcgcaaaataatgaaatatcttctt

SEQ ID NO: 4069 - DNA, 3292 bp, Diabrotica virgifera
  SmartBlast Evalue=0; Info=Paramyosin n=3 Tax=Obtectomera RepID= B3VTP0_BOMMO
tggacgtctcgacgctcatatacgaacgactctgccaccactgtcaggcggcgcaggcacgcggatttcaatcttgaaattttcgacggtcagtgcaccaacgacacgactatacattcacaaaaaagcaaaaaaatctcttgaagatggcttcttcctctgtggcgaggacctccaaatactcttaccgttccacaggagctgcaggaggcagtgctgacgtcagcatcgaatacagcgcggatctgacagcgctttctaggcttgaggataaaattcgcctacttcaggatgacctagaaattgaacgagaacttagatctagaatcgaaagagaaaaagccgaccttagtgtacaagtaatccaattatcagaacgtctagaagaagctgagggtggtgcagaaagtcagtttgaaattaacaaaaaacgtgacacagaattgctgaagcttcgcaaactattagaagatgtacacatagagtcagaagaaactgctctcatcctcaagaagaaacatcaagaaatcgttgtcgacttccaagaacaaattgattccttagctaaagctaaatcaagagccgaaaaagaaaagggcaaattccaagccgaaatctaccagctcatcgcccaggtcgaaagcgttaccaaagaacgcttgatttccatcaaacaatgtgagaaactagaaatcaccgtcaacgagctcaacatcagaatcgaggagcttaaccgttccgtcgttgacatcacctcccacaagacccgtctctcccaagagaacatcgagctcatcaaggaagtccaagacctcaaggtcaatatcgaaaacgccatctacctcaagagccagctcgccggccaactagaggatgcccgccgtcgtgctgaagacgatgaaagaagacgctcccttttggaggccaacctccaccaggtcgagatcgaacttgaatctgtccgtgtgcaacttgaggaagaaagcgaagctcgtcttgaccttgaacgtcaattggtcaaatcccaaggtgaagttcaagtctacaaatccaaatatgaaaccgaagtcgttgctcgtgctgaagaagttgaagaaatccgtcgcaaattcaccatcagaatccaagaacaagaagaacacattgaagccctcttggtcaaggtcaacaacctcgagaagcaaaagtcccgcctccaatccgaagtcgaggttcttatcattgacttggagaaagcaaataacaccgctagagaacttcaaaaacgcgttgaacaactcgagagaatcaatattgacttgaagacccgtctcgatgaaacagttcaattgtacgagcaaagccaacgtgacctccgtaacaaggttactgaattgcaacgcgctgtacacgaattggacaaaactcgcgaactgaaggaccaacttgccagagaaaacaagaaattatgcgacgatctcagcgactccaagattaccattaccgagcttactcgtcgtctccatgaactcgacttggaagttcgccgtttggaaaatgaacgtgatgaacttactgcagcctacaaagaagctgaagccggacgtaaagctgaagaacaacgtgcccaacgccttgccgccgaacttggtcaattccgtcacgaagccgaaaaacgtcttcaagaaaaagacgaagaaattgaagctatccgcaaggcaaccagcatcgaaattgaacagctcaatgcccgcgtcgttgaagccgaaaccaggctcaagactgaggtcacccgcatcaagaagaagttgcagatccaaatcaccgagctcgagatgtccttggactccgccaacaaactcaacatcgacctccaaaagaccatcaagaaacaatccctgcaactcaccgaaatccaggctcactatgacgaaatccaacgtcaattgcaagttactcttgaccaactcagcgtatcacaaagaagagtacaggcacttaccgccgaatctgaagaaatcaggagcaattatgaaggtgctcttcgtggtaagaggcaagccgagcaaatgtacgaagaagctggcactcgcatcaacgagctcaccaccatcaacgtcaacctttcttcaatgaaggtcaagattgaacaagaactgtcctcagttcttgctgactacgatgaaatcaccaaggaactccgcatttctgatgaacgctaccaacgtgtacaggccgaactcaaacataccgtcgaaatcctgcatgaagaacaagagcgcgtggtcaagatcgaagctatcaagaagagtctggaaatcgaagtcaagaacctctcagtccgtttggaagaagtcgaagccaacgctatcgttggaggaaaacgtatcatcagcaaactcgaagctcgtatcagggattgcgaagctgaactcgatgaagaaaagagacgtcacgccgaaaccatcaagatcttgcgcaagaaggaacgtactgttaaggaagtcatgatccaatgtgaagaggaccaaaagaacatcgctctattgcaagaaactttagacaaggctaattcgaagattactattttcaagagacaactacaagaagtcgagggtgtatctagccaaagcataactcgcgtacgtcgattccagagggaattggaagccgccgaagaccgtgccgaaaccgccgaaagcaatctgtccctcatccgcgccaaacaccgcactttcgtcaccaccagcacagtacctggctcccaagtctacttggtacaagaacaacgagcatcttccgaaatctaatcatctcctattctagctactaataaactaccccatccggccgaataacaacgtcaaagacatttatccatacagcagcgacatctgcgaaggaaaacttgagttggaagactcgtttctcttcgtcagtttcttgctgtgtgcaaacttgtctttgggctcgcgacatggtggaagacatcatcatacaagatcatttttttttgttcttcgtgcacataattaaataatatttaccactctctttgaaatattattattattattataacgaaacgtacatatttcattaaataaattaataaaatgagtaagcgatttatatttgtttgcaatcgcacgatgagtccatggtatggaaatttgtaggtttctaataaactgttatgttatgtaattgtacttatatcactgatgtgtgcttctattagaggtacaagggttattggaatgtaatttataagtttttgaatgtaccgtgtaagaataaattgcttataaat

SEQ ID NO: 4070 - DNA, 3292 bp, Diabrotica virgifera
  SmartBlast Evalue=0; Info=Paramyosin n=3 Tax=Obtectomera RepID= B3VTP0_BOMMO
tggacgtctcgacgctcatatacgaacgactctgccaccactgtcaggcggcgcaggcacgcggatttcaatcttgaaattttcgacggtcagtgcaccaacgacacgactatacattcacaaaaaagcaaaaaaatctcttgaagatggcttcttcctctgtggcgaggacctccaaatactcttaccgttccacaggagctgcaggaggcagtgctgacgtcagcatcgaatacagcgcggatctgacagcgctttctaggcttgaggataaaattcgcctacttcaggatgacctagaaattgaacgagaacttagatctagaatcgaaagagaaaaagccgaccttagtgtacaagtaatccaattatcagaacgtctagaagaagctgagggtggtgcagaaagtcagtttgaaattaacaaaaaacgtgacacagaattgctgaagcttcgcaaactattagaagatgtacacatagagtcagaagaaactgctctcatcctcaagaagaaacatcaagaaatcgttgtcgacttccaagaacaaattgattccttagctaaagctaaatcaagagccgaaaaagaaaagggcaaattccaagccgaaatctaccagctcatcgcccaggtcgaaagcgttaccaaagaacgcttgatttccatcaaacaatgtgagaaactagaaatcaccgtcaacgagctcaacatcagaatcgaggagcttaaccgttccgtcgttgacatcacctcccacaagacccgtctctcccaagagaacatcgagctcatcaaggaagtccaagacctcaaggtcaatatcgaaaacgccatctacctcaagagccagctcgccggccaactagaggatgcccgccgtcgtgctgaagacgatgaaagaagacgctcccttttggaggccaacctccaccaggtcgagatcgaacttgaatctgtccgtgtgcaacttgaggaagaaagcgaagctcgtcttgaccttgaacgtcaattggtcaaatcccaaggtgaagttcaagtctacaaatccaaatatgaaaccgaagtcgttgctcgtgctgaagaagttgaagaaatccgtcgcaaattcaccatcagaatccaagaacaagaagaacacattgaagccctcttggtcaaggtcaacaacctcgagaagcaaaagtcccgcctccaatccgaagtcgaggttcttatcattgacttggagaaagcaaataacaccgctagagaacttcaaaaacgcgttgaacaactcgagagaatcaatattgacttgaagacccgtctcgatgaaacagttcaattgtacgagcaaagccaacgtgacctccgtaacaaggttactgaattgcaacgcgctgtacacgaattggacaaaactcgcgaactgaaggaccaacttgccagagaaaacaagaaattatgcgacgatctcagcgactccaagattaccattaccgagcttactcgtcgtctccatgaactcgacttggaagttcgccgtttggaaaatgaacgtgatgaacttactgcagcctacaaagaagctgaagccggacgtaaagctgaagaacaacgtgcccaacgccttgccgccgaacttggtcaattccgtcacgaagccgaaaaacgtcttcaagaaaaagacgaagaaattgaagctatccgcaaggcaaccagcatcgaaattgaacagctcaatgcccgcgtcgttgaagccgaaaccaggctcaagactgaggtcacccgcatcaagaagaagttgcagatccaaatcaccgagctcgagatgtccttggactccgccaacaaactcaacatcgacctccaaaagaccatcaagaaacaatccctgcaactcaccgaaatccaggctcactatgacgaaatccaacgtcaattgcaagttactcttgaccaactcagcgtatcacaaagaagagtacaggcacttaccgccgaatctgaagaaatcaggagcaattatgaaggtgctcttcgtggtaagaggcaagccgagcaaatgtacgaagaagctggcactcgcatcaacgagctcaccaccatcaacgtcaacctttcttcaatgaaggtcaagattgaacaagaactgtcctcagttcttgctgactacgatgaaatcaccaaggaactccgcatttctgatgaacgctaccaacgtgtacaggccgaactcaaacataccgtcgaaatcctgcatgaagaacaagagcgcgtggtcaagatcgaagctatcaagaagagtctggaaatcgaagtcaagaacctctcagtccgtttggaagaagtcgaagccaacgctatcgttggaggaaaacgtatcatcagcaaactcgaagctcgtatcagggattgcgaagctgaactcgatgaagaaaagagacgtcacgccgaaaccatcaagatcttgcgcaagaaggaacgtactgttaaggaagtcatgatccaatgtgaagaggaccaaaagaacatcgctctattgcaagaaactttagacaaggctaattcgaagattactattttcaagagacaactacaagaagtcgagggtgtatctagccaaagcataactcgcgtacgtcgattccagagggaattggaagccgccgaagaccgtgccgaaaccgccgaaagcaatctgtccctcatccgcgccaaacaccgcactttcgtcaccaccagtacagtacctggctcccaagtctacttggtacaagaacaacgagcatcttccgaaatctaatcatctcctattctagctactaataaactaccccattcggccgaataacaacatcaaagacatttatccatacagcagcgacatctgcgaaggaaaacttgagttggaagactcgtttgccttcgtcagtttcttgctgtgtgtaaacttgtctttgggctcgcgacatggtggaagacatcatcatacaagatcatttttttttgttcttcgtgcacataattaaataatatttaccactctctttgaaatattattattattattataacgaaacgtacatatttcattaaataaattaataaaatgagtaagcgatttatatttgtttgcaatcgcacgatgagtccatggtatggaaatttgtaggtttctaataaactgttatgttatgtaattgtacttatatcactgatgtgtgcttctattagaggtacaagggttattggaatgtaatttataagtttttgaatgtaccgtgtaagaataaattgcttataaat

SEQ ID NO: 4071 - DNA, 3219 bp, Diabrotica virgifera
  SmartBlast Evalue=0; Info=Lysosomal alpha-mannosidase (Mannosidase alpha class 2b member 1) (Fragment) n=1 Tax=Aedes aegypti RepID=Q178V9_AEDAE
ttccacattatccttctcatcagtttcgtcaactactctcttcttaatgtattctctccatttgtattgtgcccaattttggtaatctgagactttatgtgcaagccataagtcttctatcggtaaaccagagtcgaagttcagacgatggttctcggataaccattggttggctcccagtgttgtttctcttatattagatatctcaaatggagcgaaaagaccttttaaatcgatcctcaatggtttggataatactggatcttcatcaatctcaaacacatgctccaacctcaataaaaatgtatcagctttccaaggctctaatgtcaaaatttgaatatttttgtccaaattacgttttaatccagcatactgcataacatattttgatttatattgatcaaaagataagttttcagtaccagaaacaaaagtccatgctgacaataatttttgttgaatttgatcgtgtacctggctcgctgttgtataaccatttggattagagtctttggaacttcccagaataacgtaatgcgatcctctagctaccaatcccttaccgaaagctgtttcatttaaagcttcacccacaccaaaggcgtcatcatgtaaacaatttctgtgtatcataagttcaatttctccatcctttaaactagatcctccttgcgctctgtcggtcagcacagctaattccaaatcgtcgtccttaatggcaattttcgtggtaactggataatagtttccagatactggttcttccaatttcagattccacgtcggtctgaagtttctgattctcgtcagtgtttcacgaccatttgaatccgtgtaaaatgtggcattagatttaatggaagttttgtatctcgtgataatttctttaccatgcacatcatcaatgggtattggtcctaccagccaattaaactcgataacattttcttcttcatacaccctgataacttgactgatccagtcgttgaacgtttggtggacctcggttactacaggacctctggtaaccttgaagctagccttagttgccactttaaagggatctccataaggtctgaatatgtaagctccggaagatcggttgataaatttctcgttatcaccaacgtatccttgataatacaagaaatcctgtgtgaagttgatggaatgaccattaatgcttatttccgtgatcataccggtgtctgggtcaatatcaaattcagtgtttggtgactcatcaatcgagcggccttttggtatcccctttggaatatcattactttcatatttctgtataaagtatgatttaaaaccaagagcgggaatatcaacagctttaaaaaccaattcgttttctgctagactttttctgcctggaatcctgagtaatgaggcgggaacaggaactatttgggtaactacagtggcaccttgaggatccttgatagtatatttgtttcctactactggaactcgcacatgcttagatacaggtctgcttaatgggttgtagactgttatgacaaaatcgttgttggtttcagtgaatgcacattgactaatatttgccaagggacatgttgtgaacggtatagtaggtacgggttcatcgcgcaagtaacttctcatatttggggcaactattttgcttagcgctgttgcggttatccattcacactccttgattccgttggagagtattctggcataatcgttggcaacatgttgcttctcagttcctgtgattgcatcgtgatgttgcattactcccatagcttcgcgaagagcattcaggtcaactctgtcgaccggatctaaatcagctaaagaataaagctgtttgcacacctgtaagaaattgtttccttccctctcaaaccttttgagcgtaggcctagaagtaaagtaccccgtccaaaaagcgtgtggatcggacgcataagggaagaagtcatcttgcttaacataccatttcttctttcccttagtttcatcatatatggctttgacataacaagatggtgtagagtaaataagattatatctggagccattagattgacggagatttgcgtaggaaatcaatttatctaagtttttgaaccaagttgcagcgtcttggtaattgaagtcttcacccatggttataattaggttgtgagtgtcgtacacgcttgtcatattatcgagaactcgaaagaattcgttaaccctttcatcaacgttgtaatctggactttttttgtcgtcgataattggctcgtctgaacataacaaatcaaaacagaatcctctgggaggtgaataaacattaaacatggatccagtaaatatgttacttttttctcctaaattttggctagacctccaaactacttctgcagtttttgtcgataatctaaaatctttttcttggtaatcgattctgcccaataataaaccgtcgaaacccaattgagcaaatattgaggccatctctctactatgaccaaatggatcgatctgccatcccatttttggcctaccacattctccaaaagaatcatttaattttctcaaaccccaggtcatttgatcaataattgactggtagtgtgtggcagcttcgtcgttcatgctccatccaccacttatgaattccagttgtccattgtttacgaatttcctaacttgagatttaacagtatcgtgttgttttatccaccatttccaaaagaaggccgtttcgacgtaaataaatcttctatttggatcctttcgcaaagaatctatgactgaatccaaaatgtattgcacacctgcattctgtatcaacgttttgctgccgtagaagtattgatcaacagtcttcagccagccgacatcatcgtgagtgtgaggaacaatgtggacgtttataaaatctccaccctttacgggatggcatgaatcatatccgcaattactaactgcaggcgcaggttttgtagaagttgcaggaggatgagatgtgacatatgttgttaaaagtgtcaaaaggatcactagctccttcttcatcataacagcatctgacaatgtaataaagccagaaataactcaatatcgaccggcacaataatgtaatcactgcctataaaacaacgacaccggacgacctatcgtctccaactgtgataacgtttaatttaactagtttgttttcattgtccactgcgtcggtcagtcaca

SEQ ID NO: 4072 - DNA, 3219 bp, Diabrotica virgifera
  SmartBlast Evalue=0; Info=Lysosomal alpha-mannosidase (Mannosidase alpha class 2b member 1) (Fragment) n=1 Tax=Aedes aegypti RepID=Q178V9_AEDAE
ttccacattatccttctcatcagtttcgtcaactactctcttcttaatgtattctctccatttgtattgtgcccaattttggtaatctgagactttatgtgcaagccataagtcttctatcggtaaaccagagtcgaagttcagacgatggttctcggataaccattggttggctcccagtgttgtttctcttatattagatatctcaaatggagcgaaaagaccttttaaatcgatcctcaatggtttggataatactggatcttcatcaatctcaaacacatgctccaacctcaataaaaatgtatcagctttccaaggctctaatgtcaaaatttgaatatttttgtccaaattacgttttaatccagcatactgcataacatattttgatttatattgatcaaaagataagttttcagtaccagaaacaaaagtccatgctgacaataatttttgttgaatttgatcgtgtacctggctcgctgttgtataaccatttggattagagtctttggaacttcccagaataacgtaatgcgatcctctagctaccaatcccttaccgaaagctgtttcatttaaagcttcacccacaccaaaggcgtcatcatgtaaacaatttctgtgtatcataagttcaatttctccatcctttaaactagatcctccttgcgctctgtcggtcagcacagctaattccaaatcgtcgtccttaatggcaattttcgtggtaactggataatagtttccagatactggttcttccaatttcagattccacgtcggtctgaagtttctgattctcgtcagtgtttcacgaccatttgaatccgtgtaaaatgtggcattagatttaatggaagttttgtatctcgtgataatttctttaccatgcacatcatcaatgggtattggtcctaccagccaattaaactcgataacattttcttcttcatacaccctgataacttgactgatccagtcgttgaacgtttggtggacctcggttactacaggacctctggtaaccttgaagctagccttagttgccactttaaagggatctccataaggtctgaatatgtaagctccggaagatcggttgataaatttctcgttatcaccaacgtatccttgataatacaagaaatcctgtgtgaagttgatggaatgaccattaatgcttatttccgtgatcataccggtgtctgggtcaatatcaaattcagtgtttggtgactcatcaatcgagcggccttttggtatcccctttggaatatcattactttcatatttctgtataaagtatgatttaaaaccaagagcgggaatatcaacagctttaaaaaccaattcgttttctgctagactttttctgcctggaatcctgagtaatgaggcgggaacaggaattatttgggtaactacagtggctccttgaggatccttgacagtatatttgtttcctactactggaactcgcacatgcttagatacaggtctgcttaatgggttgtagactgttatgacaaaatcgttgttggtttcagtgaatgcacattgactaatatttgccaagggacatgttgtgaacggtatagtaggtacgggttcatcgcgcaagtaacttctcatatttggggcaactattttgcttagcgctgttgcggttatccattcacactccttgattccgttggagagtattctggcataatcgttggcaacatgttgcttctcagttcctgtgattgcatcgtgatgttgcattactcccatagcttcgcgaagagcattcaggtcaactctgtcgaccggatctaaatcagctaaagaataaagctgtttgcacacctgtaagaaattgtttccttccctctcaaaccttttgagcgtaggcctagaagtaaagtaccccgtccaaaaagcgtgtggatcggacgcataagggaagaagtcatcttgcttaacataccatttcttctttcccttagtttcatcatatatggctttgacataacaagatggtgtagagtaaataagattatatctggagccattagattgacggagatttgcgtaggaaatcaatttatctaagtttttgaaccaagttgcagcgtcttggtaattgaagtcttcacccatggttataattaggttgtgagtgtcgtacacgcttgtcatattatcgagaactcgaaagaattcgttaaccctttcatcaacgttgtaatctggactttttttgtcgtcgataattggctcgtctgaacataacaaatcaaaacagaatcctctgggaggtgaataaacattaaacatggatccagtaaatatgttacttttttctcctaaattttggctagacctccaaactacttctgcagtttttgtcgataatctaaaatctttttcttggtaatcgattctgcccaataataaaccgtcgaaacccaattgagcaaatattgaggccatctctctactatgaccaaatggatcgatctgccatcccatttttggcctaccacattctccaaaagaatcatttaattttctcaaaccccaggtcatttgatcaataattgactggtagtgtgtggcagcttcgtcgttcatgctccatccaccacttatgaattccagttgtccattgtttacgaatttcctaacttgagatttaacagtatcgtgttgttttatccaccatttccaaaagaaggccgtttcgacgtaaataaatcttctatttggatcctttcgcaaagaatctatgactgaatccaaaatgtattgcacacctgcattctgtatcaacgttttgctgccgtagaagtattgatcaacagtcttcagccagccgacatcatcgtgagtgtgaggaacaatgtggacgtttataaaatctccaccctttacgggatggcatgaatcatatccgcaattactaactgcaggcgcaggttttgtagaagttgcaggaggatgagatgtgacatatgttgttaaaagtgtcaaaaggatcactagctccttcttcatcataacagcatctgacaatgtaataaagccagaaataactcaatatcgaccggcacaataatgtaatcactgcctataaaacaacgacaccggacgacctatcgtctccaactgtgataacgtttaatttaactagtttgttttcattgtccactgcgtcggtcagtcaca

SEQ ID NO: 4073 - DNA, 3167 bp, Diabrotica virgifera
  SmartBlast Evalue=1E-100; Info=Glucosidase 2 subunit beta n=1 Tax=Camponotus floridanus RepID=E2AQZ0_9HYME
cttgtcgcatgcgcattcgtcgtcttaaacttgtgaatttgtgaagtgcatttgggaactgtaccggttaaaatgagttcaatttttttcaaaaatacaacttttatgaacactttattagttatagtcgtatttatctgtgaaatactgtcatcagaagttcctagacccagaggagtgtccctatcccgtgcctctttgtacccagcagacaaagacttcacctgtttcgatgggagcaagactatcccatttacgagagtaaatgacgattattgcgactgtttggacgccagtgacgagccaggaacatcggcttgtccccacgggatattccattgtacgaatgcggggcacagacccttaaatttgccttcgaatagggtcaacgatggtatctgtgattgctgtgatggcactgatgagtatgcatccgaaacgtcgtgtcagaataattgtattgagctggggcgaagcgccagagatgctgcggttcgtaaggctgaattggtaaaggctggcaaacagatcaggaccgagatgagtgaaaagggtattcagttgaaacaggaaaagcaagccaaactcacagaactgcagaagaacaaagaagaagcagaaaaactgaagttagagaaggaagctttgaaaaaagaaatcgaagaactagaaagcacagcattggaatactacagaaaattggaagacgaagaaaaacagaagagggaagaagaagaagctcaagctcaaaaaggcgaggccatcgagtatttcaataaatatgatgcaaatcaagatggatggttagaagtggttgaagtgaaatctaggatagctttcgacagagataataatggcgaagttactgacgaggaagccaaattttacttaaatatgcaagaatctgtggacttagaaaccttcataaacaaatgttggaagaatctaagaccttttgtaatgatagaaaccggtcggttaaaggaacatgagaaagaagaagaaaaaagtgaagccgaagacatgcaagagagcgatgaacatgaaactgatgaggataatgaagaccacgattatgaagacgaggaagaacaagagcaccaagaaccagagccaccaacaaccaccgcagccccaccagccatcaagtacgacgatgagacccaacaactcgtagaccgagcaacagccgcgcgcaatgaataccacgaagccaacagagccgtcggcgatatcgaacgggaaataaccagaatagaagaatatttggaaaaagattttggcgcagaagaagaattcgcagcgctagaaggccagtgcttcgattacgaagaccacgaatacatctacaagttgtgcccgttcgacaaaacgacccaacagccaaaatcgggggcgtcagacgttcgactaggcacctggggccattggtccggcgcagagcccaacaagtacgagcaaatgacctacgacaagggtcagacgtgctggaacggtccccaacgatccaccgtagtcaaagtgtcttgcagcggtgaaaataaagttattagtgtatcggaacctaatagatgtgagtacttcttcgaattcaacactccggccgcatgttacgaagcccctccatcagacaacgaagacttgcatgacgaattgtgagacttagtgaaatttttatacgatagggccaagtcttttgttggtattttgtttattcctgatattttattgtgatcataatacgtaaacagttcttctgtaatgattttcacttttctaagcgtatttatagcgttggaaatgtaacacagctcgtttttttcggaaaattattgatgctacgtatattcattcatctacgattaaatttttgccacaaatactggtttctatggaagaaactaaaatatgacatatcatttggcccattttctcttaattattggtcattggtcaaagttcctctagctgttatagtttatgagtcaatgcctttttttctagttttctcacaaccaaaagtataaagtttaaattttctacacactttataacctaacaattatagggcgttccaacatgctgtcaaaattaaatcaatatggcagctgggaggcaaacagaaatgttattctgttagttcttaatgtgttttagataacgtttcgttgtaattttgttttgtacaaggaataatttaacatttgcactggaaggactaattttaaaagataatgcctcatttctgttgtgtatggaagtgtggaatgtgaagtaaccgtgataaaggtcagttttgtcgattaccatcaatgctacattttaagcataaaactgaactaaataagttatcatctaagagacaaaaacaatggttaaatgctataaaatttcctataaaaatgctaaataactatgtccatattacttacgcttggaaaactgtctctactgtaggttaactcggactccttgggggaaaatgaatctatattatttattttgccaatcttttgcttgtacctacttactagcaaaatctgtattgtctaccaacaactttcgaaaatattcactcatacgtatttatttactggttaaaattaataaaattgtgcaagtatttctacaactaaaaactacacaaaatcaacaacaaagtgttcggaaaatagaaacacaaactattaaaggtaaaaaacttaaaaaacacaatgtggtacaaatgtaaataaatactatgtttatcccccagcagtgtcataaatagcctaataaaataaaaaaaaatcaaaatgtaattccgtacaggttggaataattttatatcggggtttgggagagtacaaaggatattttcaagaaagtgtccaaagttatatgaggggatcattgtttgaatgattgaaagggtgtcatttttgcaaaatatttacttttttaactgctgaggtgatttacattttgatgaagatctttaggattttttctacaggactgaaggataaatcttttatctagacttacttaattgaatttgaccccctatttatttaaataattgtgtataaggtttgaagatcagatttgcaagaatattttttgcctcttggtaagaactataaattattttatttaataggagaggttgcgctacgttgaaagta

SEQ ID NO: 4074 - DNA, 3167 bp, Diabrotica virgifera
  SmartBlast Evalue=1E-102; Info=Glucosidase 2 subunit beta n=1 Tax=Camponotus floridanus RepID=E2AQZ0_9HYME
cttgtcgcatgcgcattcgtcgtcttaaacttgtgaatttgtgaagtgcatttgggaactgtaccggttaaaatgagttcaatttttttcaaaaatacaacttttatgaacactttattagttatagtcgtatttatctgtgaaatactgtcatcagaagttcctagacccagaggagtgtccctatcccgtgcctctttgtacccagcagacaaagacttcacctgtttcgatgggagcaagactatcccatttacgagagtaaatgacgattattgcgactgtttggacgccagtgacgagccaggaacatcggcttgtccccacgggatattccattgtacgaatgcggggcacagacccttaaatttgccttcgaatagggtcaacgatggtatctgtgattgctgtgatggcactgatgagtatgcatccgaaacgtcgtgtcagaataattgtattgagctggggcgaagcgccagagatgctgcggttcgtaaggctgaattggtaaaggctggcaaacagatcaggaccgagatgagtgaaaagggtattcagttgaaacaggaaaagcaagccaaactcacagaactgcagaagaacaaagaagaagcagaaaaactgaagttagagaaggaagctttgaaaaaagaaatcgaagaactagaaagcacagcattggaatactacagaaaattggaagacgaagaaaaacagaagagggaagaagaagaagctcaagctcaaaaaggcgaggccatcgagtatttcaataaatatgatgcaaatcaagatggatggttagaagtggttgaagtgaaatctaggatagctttcgacagagataataatggcgaagttactgacgaggaagccaaattttacttaaatatgcaagaatctgtggacttagaaaccttcataaacaaatgttggaagaatctaagaccttttgtaatgctagaaaccggtcggttaaaggaacatgacaaagaagaagaaaaaagtgaagccgaagacatgcaagagagcgatgaacatgaaactgatgaggataatgaagaccacgattatgaagatgaggaagaacaagagcaccaagaaccggagccaccaacaaccaccgcagccccaccagccatcaagtacgacgatgagacccaacaactcgtagaccgagcaacagccgcgcgcaatgaataccacgaagccaacagagccgtcggcgatatcgaacgggaaataaccagaatagaagaatatttggaaaaagatttcggcgccgaagaagagttcgcagcgctagaaggccagtgcttcgattacgaagaccacgaatacatctacaagttgtgcccgttcgacaaaacgacccaacagccaaaatcgggggcgtcagacgtacggctaggcacctggggccattggtccggcgcagagcccaacaagtacgagcaaatgacctacgacaagggtcagacgtgctggaacggtccccaacgatccaccgtagtcaaagtgtcttgcagcggtgaaaataaagttattagtgtatcggaacctaatagatgtgagtacttcttcgaattcaacactccggccgcatgttacgaagcccctccatcagacaacgaagacttgcatgacgaattgtgagacttagtgaaatttttatacgatagggccaagtcttttgttggtattttgtttattcctgatattttattgtgatcataatacgtaaacagttcttctgtaatgattttcacttttctaagcgtatttatagcgttggaaatgtaacacagctcgtttttttcggaaaattattgatgctacgtatattcattcatctacgattaaatttttgccacaaatactggtttctatggaagaaactaaaatatgacatatcatttggcccattttctcttaattattggtcattggtcaaagttcctctagctgttatagtttatgagtcaatgcctttttttctagttttctcacaaccaaaagtataaagtttaaattttctacacactttataacctaacaattatagggcgttccaacatgctgtcaaaattaaatcaatatggcagctgggaggcaaacagaaatgttattctgttagttcttaatgtgttttagataacgtttcgttgtaattttgttttgtacaaggaataatttaacatttgcactggaaggactaattttaaaagataatgcctcatttctgttgtgtatggaagtgtggaatgtgaagtaaccgtgataaaggtcagttttgtcgattaccatcaatgctacattttaagcataaaactgaactaaataagttatcatctaagagacaaaaacaatggttaaatgctataaaatttcctataaaaatgctaaataactatgtccatattacttacgcttggaaaactgtctctactgtaggttaactcggactccttgggggaaaatgaatctatattatttattttgccaatcttttgcttgtacctacttactagcaaaatctgtattgtctaccaacaactttcgaaaatattcactcatacgtatttatttactggttaaaattaataaaattgtgcaagtatttctacaactaaaaactacacaaaatcaacaacaaagtgttcggaaaatagaaacacaaactattaaaggtaaaaaacttaaaaaacacaatgtggtacaaatgtaaataaatactatgtttatcccccagcagtgtcataaatagcctaataaaataaaaaaaaatcaaaatgtaattccgtacaggttggaataattttatatcggggtttgggagagtacaaaggatattttcaagaaagtgtccaaagttatatgaggggatcattgtttgaatgattgaaagggtgtcatttttgcaaaatatttacttttttaactgctgaggtgatttacattttgatgaagatctttaggattttttctacaggactgaaggataaatcttttatctagacttacttaattgaatttgaccccctatttatttaaataattgtgtataaggtttgaagatcagatttgcaagaatattttttgcctcttggtaagaactataaattattttatttaataggagaggttgcgctacgttgaaagta

SEQ ID NO: 4075 - DNA, 3088 bp, Diabrotica virgifera
aaccttctaatttagtcgcgccctcaggagatttatttggttcaggttctacgaaggggtttgtatttttgggtttatcgtctacatcatctacttgtttaatgtctgctttgctaactgtggatttaggagcagaatttaacacgtgataaaccttctctcgttccaaagtctgatattcgggaatattactactgttcggaaacatgctcttggttgcgtaatccagaggaacgaaatctatgatttttggcttagattgagaatctcctttcagcaagaatttgggatcttcatagctatccgtgtcgcttagttctcctaagtaagttacatcgtatccgattttcttgttcatttcctgtgtggtggatctgtaaagaccaacatcggtgccgtcaatgctggcagagtctataccttccaaattgaagaggtttagggttgaagcgtctgattcatggatcggatgcatttgagtttcggatggtattctaagatccaatttttctggtgtactggttaccgctattacagaatatgacgatgaggcttcaccgctatcttcccgttgatcctgaggcttctccatagaactccacagctgtgccttctccacagaacttaacagctgcggcttttctgtagtctcctcctgattctccgtttcaacttttgtaacttctgcaggctctgtattatcttcatctttcgcagaaactgttacaacatgactttgagattcttgtttttcttgtgtgctactttcagaagaaacctgggtagtaatgggaagacctttgacttttaaaacagtcgccaaagaactagcaacttcctcctcgacaaatggatttttggtttcactaaaatttttatgctccgacatattttttcatcacttcatgactgtcagttgaacgtctgtcacccaaactgtcaaaatctttgctgccatgatttctagagcgagggacaggtaaaggcttcttctcaatggactcagcgtgtcgtgacatcataaaacgttgattttttaaaacgtttatgttggcataaatcggttctttctttggtctttcttttgatagacgctcaaagtgctgtgcgaatgatttgacgcgtttgtcggttagattatctgattttggcctcgatcttactctttgtgaaacgttgctactagaaatatctccgtctttttccaaacttaaacttttcacttcttttctgtcgagatgttgatttcttaataaaatggtatgtctctctgttctcttttttatagtacccgattcagttattacatttttgaattgatttggctctaatacaccagaggtttctgacaaatatttcacttcatcattgtatgtttctccgtcgccacctggtaccaccttttgtgaaattggttgtatattttgatccatttcttgatttgcctggatcccagcacatgtattcgcattttcaatattaacatcttggtccacttgaacagtaactatttgaggcttgtcaaaatctagagggtttttagtagcctcagtattaatcaactctaacttcaccctattagtaccgctatcggtagagccatcaacaattattcgatgttttccaagatctgttttatctttaactgtatcgttaacttcatttaggctatcaatcattttagtggcagcaacctgagtgggaacctttttatcggacgaaggaatatccatttttacagtttcgtctatattttctaatgaagctttatttgtaccagtcttatccaacgttttctttggtgctttattccttgaaatgctaatagtacctagtaacgcttcaagatcatcggctgcatttgtcttagttactggaaaagcttctggtttacttggactgagtttatcttccttacttggtgacaaatgccgagtccttaaacctggcttcagcggtgtcttttccttatgtcctttcacaacccttgaagtactgatcgcacctagtaaagcttcaagatcatcagcggcctcgggattactagtcggtaaagcctttgattttcttggaacgattttatccttcttgagttgattacttgagtctggctttatacgtagctggtcgttaggaccgtgcccggttcttgatgtgctaatggtaccaaggaaagcttcaaggtcatcagctgcgtctggcttaaatattggtaatgttttagacttgtgcacactggttttatcatattcaaataaactgctggcatttgatttggaacccaggttctcttgaggatctgcatcaacagaagacctttcttttggcagattcttgggaatgacaggttcaactgtcacagttccagaagataaagtgtatattactttattatcatcatgactggtatcagaaataagcggatgaactttatcctctgttgtctttaataattcgttgtcatctttaactatttccggactttgtttagctttatctacttctgtagttacctgatcattatcagcgtcgttattataagtatgtactgattcattacctaagtaagtgagtgacaaggactgaatcagctccaaatcttgatcattgagccccgatactggtctggaaaccgcttgctttttagctcgacgtataatgttgagttcttcatcggttagctcaaattgttctggaggatgcggtaaatcttctcctggtgttatcttaaagtctggaatgggtgagattttgttatcgatctcttcacgtatttctccatgttggttatctgcactacttgtattacttgattctaaagataaagttgctgtttgaacatcattcaatataaagttagccaccaaaggtttgatatacttgatatctgtaatagtgtatattggtgatgaagctttatctttgtttttatctatatcatctacaataacttcgtttgtgggggtagtgtcgcatgtttgcggatcaaaagattctttttgaccttcatatgaaccatgctgtctcctaggatgttcttgaatgatgttaataatatctggaacattttccactaattcagcaaact

SEQ ID NO: 4076 - DNA, 3076 bp, Diabrotica virgifera
aaccttctaatttagtcgcgccctcaggagatttatttggttcaggttctacgaaggggtttgtatttttgggtttatcgtctacatcatctacttgtttaatgtctgctttgctaactgtggatttaggagcagaatttaacacgtgataaaccttctctcgttccaaagtctgatattcgggaatattactactgttcggaaacatgctcttggttgcgtaatccagaggaacgaaatctatgatttttggcttagattgagaatctcctttcagcaagaatttgggatcttcatagctatccgtgtcgcttagttctcctaagtaagttacatcgtatccgattttcttgttcatttcctgtgtggtggatctgtaaagaccaacatcggtgccgtcaatgctggcagagtctataccttccaaattgaagaggtttagggttgaagcgtctgattcatggatcggatgcatttgagtttcggatggtattctaagatccaatttttctggtgtactggttaccgctattacagaatatgacgatgaggcttcaccgctatcttcccgttgatcctgaggcttctccatagaactccacagctgtgccttctccacagaacttaacagctgcggcttttctgtagtctcctcctgattctccgtttcaacttttgtaacttctgcaggctctgtattatcttcatctttcgcagaaactgttacaacatgactttgagattcttgtttttcttgtgtgctactttcagaagaaacctgggtagtaatgggaagacctttgacttttaaaacagtcgccaaagaactagcaacttcctcctcgacaaatggatttttggtttcactaaaatttttatgctccgacatattttttcatcacttcatgactgtcagttgaacgtctgtcacccaaactgtcaaaatctttgctgccatgatttctagagcgagggacaggtaaaggcttcttctcaatggactcagcgtgtcgtgacatcataaaacgttgattttttaaaacgtttatgttggcataaatcggttctttctttggtctttcttttgatagacgctcaaagtgctgtgcgaatgatttgacgcgtttgtcggttagattatctgattttggcctcgatcttactctttgtgaaacgttgctactagaaatatctccgtctttttccaaacttaaacttttcacttcttttctgtcgagatgttgatttcttaataaaatggtatgtctctctgttctcttttttatagtacccgattcagttattacatttttgaactggtttggctctaatgcaccagaagtttgcgtctcatatttcacttcatagttgtgtgtttctccgtcaccacttggtaaaaccttttgagaagttggttgtatattttgattcatttcttcttttgccttgatccttgtatcttcaacattgacatcttcgtccacccgaacactaactaactgaggcttgtcagaatctagtaggtttttagtaggctcagtactaatcaggtctaagttagccttattagcaccgctatctgtagaaccatcaacagctattcgagatttttgaaaatctgctttatctgtaactgtatcattaactgcatttactccctcagtcatttcaggggcagaaacctgatcggaaatctttgtaacggacgaaggaatatccgttttcatattttcatctacattttctaatgttgtattatttattccggtcttattcaactttttatttggtgctttattccttgaaatgctaatggtacctagtaaagcttccaggtcatcggctgaacttgtcttagatactgggaaaacttgtggtttactaggactgattttatcttccttacttggtgacaaatgccgactccttaaaaccggcttcagctgtgtcttttccttatgtcctttcacaacccttgaagtactgatcgcacctagtaaagcttcaagatcatcagcggcctcgggattactagtcggtaaagcctttgattttcttggaacgattttatccttcttgagttgattacttgagtctggctttatacgtagctggtcgttaggaccgtgcccggttcttgatgtgctaatggtaccaaggaaagcttcaaggtcatcagctgcgtctggcttaaatattggtaatgttttagacttgtgcacactggttttatcatattcaaataaactgctggcatttgatttggaacccaggttctcttgaggatctgcatcaacagaagacctttcttttggcagattcttgggaatgacaggttcaactgtcacagttccagaagataaagtgtatattactttattatcatcatgactggtatcagaaataagcggatgaactttatcctctgttgtctttaataattcgttgtcatctttaactatttccggactttgtttagctttatctacttctgtagttacctgatcattatcagcgtcgttattataagtatgtactgattcattacctaagtaagtgagtgacaaggactgaatcagctccaaatcttgatcattgagccccgatactggtctggaaaccgcttgctttttagctcgacgtataatgttgagttcttcatcggttagctcaaattgttctggaggatgcggtaaatcttctcctggtgttatcttaaagtctggaatgggtgagattttgttatcgatctcttcacgtatttctccatgttggttatctgcactacttgtattacttgattctaaagataaagttgctgtttgaacatcattcaatataaagttagccaccaaaggtttgatatacttgatatctgtaatagtgtatattggtgatgaagctttatctttgtttttatctatatcatctacaataacttcgtttgtgggggtagtgtcgcatgtttgcggatcaaaagattctttttgaccttcatatgaaccatgctgtctcctaggatgttcttgaatgatgttaataatatctggaacattttccactaattcagcaaact

SEQ ID NO: 4077 - DNA, 3005 bp, Diabrotica virgifera
  SmartBlast Evalue=5E-43; Info="Pastrel, isoform E n=2 Tax= melanogaster subgroup RepID=Q8IQ82_DROME"
acttgtatataagtttaataaaatatatgaaatacatgttaataatgtttgttatgattgtgtaaaataacgtcctctacaaatagtgcaacaaacactattagtgtttctggacgaatgctggtcccttcttgcaatagcttcatctctgagctgtctggtatatattgtatttagtagccacgcttctaaatattccttgatattattaacagattcaccagcttcatgacaaattttaactattcggctcaaaaatccatgtatatctttcagatggttctacaggtacttctacgaagtaagactcgtagtgaataggattaccagtactgcgccatgtggagtatctctgaagaagggttgatgcttgtcctgcgaaatattccattacagcgatcattatttcttgatgtgcagagctaccaaatgtttcgttaattacatctctaaaatatctgaagagaaggtctatggccttttgtactaattccattatcataccttggatatcatttgagaatttgctaattaaggttaaggcaaatccagcgaatacttgaacattaggtatagaccaattgttcaaagagaaattatcaatcatagaattagtatcgctcattgttatgtgcgattctctaggcaaattggacaaaaaggcacttgcgtgttccctgttcattcctataaattcgttcatgttgataggttgaccatttagtgttatttctcctccatttgcggagaaacgaataccgtttctattcatcaacttattatttcttgtcagagctgcaaatacatcgtctttatttccaatatttcgtatcgtcttgataacttcggcccttccttgtacttgattaccgtcgttttgcctgattgtttctttcataagtttgttaaaggttttcctgtgtctgttagatctcaaagagtcatggtaatcttctaaaactctaccctgtgtttcatctatcatttgtccaacagttttgaagttgtatactgcattgccgaagaataatactgaagaagccaactgtaatattgtcaatgttgaaggcgcctgtttatggtttatccacatatcaaagacatcgtagctggagtttattataccaataccactaattcctatgtttgccatactaattgcattcactgccaatccaacaccctgaccaatattggctccacgtgaaatcatttgagacacagccatatttgctcctgcgccaacaaatcccaaagatccagccagaatattaatatatattcctcgcgcttctgagttgaaaatactcaaatcctcgtcatgggtatatttatcggccaaaccaaaagcacttctagtaatgctataaacaccagctgtagctcctacggcagctgcacccatcagaaggggagcaccaatgacacttgttacagcacctgcaaacataagagtaccagatccaagaccagcaaccgcactgcttatatcaccaactcttagaactgtgtttagtaccccacagctgggagtttcgtgtctttcgagtaataccctgtcatcctctacttggtatcttccatttaatggtaacaccattacactttcaggtaatttgttattttttaaaaaatcttgccaatccgaatacactctgccaccgtgatctataaaaattctgcaagcttcacctctttctactcgacactttcttaaaacaaatatcggaataggagatatatcagtacgtggattatagtttgggtcttgttttctacggtctgttgcttgtttatcagttggctctaagacgacgtagataaaagctagttcaacctgatcttggtattcggcatataaattattgtgttttaaaatagccttgaataaatgttcaatttgcgaattttgagcttcgtcatatccatttcctatttcttgaactggttgaccaaataatgcataaccaattttcttcttcaacagatcatgttggtcaaaagcgaaactatcgtagtctctatcgcctagtctgtctgccataattttttgaaaagcttccgaagtcatttcgttgctctgtgaagaattatctaatccatttgctaacatgcgatcgacaattaaatagtcgcgacaattttgtagatacaataaaactgagtcccggctcgaatccacatcatttattctccttaaaaatgaaatagtcctgagggagccgtttatattctgaataataaccgcagagcatgcttgagactgaactaatccgattagataatcgaagttagcatcttctaatgctccacaaagcgctgtgtgataattgctattttcaacgtcccaaccaataatataggaatggtctctcaaaagaccagcaagttcttcatcttgtaaatatcttgtcaaaaatgtagtcgaaaatctctccctcgaattgtgcatatataaaactacaaattttcgatttagaggaggggcaagaagtacagtatctttaatttcggaaagtctttttatattaaaccttatgcctgaggctgttatgtgggtattaatttttcttatacaactttttactgctctgatttccatacaatctctttcatattcctgagcattggagaagttgtcagttggaatagattcttcctgtctacatcttaaaaacaagtaatttgtgcgtcctaaatctgtgcatatttgtagtatagactgatcgttttcgggttcagttctccatccatcaattatttgtctatgcggtggaatgttaaaaatttgatggatactaatttttagattttctacagtatcatactctaactgttcaaattgttctgtaagaaaaccttctggtgttctatagcaaacagaaaaggtcagtgttgcttccatagtacaaaaaaataacttctatttacatccacctgaaactaatgggagtaatggacatcttttaaatagcaaaattatttttgcaaatatattagtaact

SEQ ID NO: 4078 - DNA, 2993 bp, Diabrotica virgifera
  SmartBlast Evalue=8E-38; Info=Pst n=1 Tax=Drosophila yakuba RepID=B4PK65_DROYA
acttgtatataagtttaataaaatatatgaaatacatgttaataatgtttgttatgattgtgtaaaataacgtcctctacaaatagtgcaacaaacactattagtgtttctggacgaatgctggtcccttcttgcaatagcttcatctctgagctgtctggtatatattgtatttagtagccacgcttctaaatattccttgatattattaacagattcaccagcttcatgacaaattttaactattcggctcaaaaatccatgtatatctttcagatggttctacaggtacttctacgaagtaagactcgtagtgaataggattaccagtactgcgccatgtggagtatctctgaagaagggttgatgcttgtcctgcgaaatattccattacagcgatcattatttcttgatgtgcagagctaccaaatgtttcgttaattacatctctaaaatatctgaagagaaggtctatggccttttgtactaattccattatcataccttggatatcatttgagaatttgctaattaaggttaaggcaaatccagcgaatacttgaacattaggtatagaccaattgttcaaagagaaattatcaatcatagaattagtatcgctcattgttatgtgcgattctctaggcaaattggacaaaaaggcacttgcgtgttccctgttcattcctataaattcgttcatgttgataggttgaccatttagtgttatttctcctccatttgcggagaaacgaataccgtttctattcatcaacttattatttcttgtcagagctgcaaatacatcgtctttatttccaatatttcgtatcgtcttgataacttcggcccttccttgtacttgattaccgtcgttttgcctgattgtttctttcataagtttgttaaaggttttcctgtgtctgttagatctcaaagagtcatggtaatcttctaaaactctaccctgtgtttcgtctatcatttgtccaacagttctgaagttgtatactgcattgccaaagaataatactgaagaggctaactgtaatatcgtcaatgcagaaggagcctgcttatgatttatccacatatcaaagacatcgtagctggagtttattataccaataccactgattcctatatttgccacactaagcgcattaactgctaatccaacaccctgaccaatattgactccacgtgaaattaattgagagacagccatatttgctccggctccaacaaatcccaaagatccagccagaatgttaatatagattcctcgtgcttctgagttgaaaatacttaaattctcatcgtgggtatatttatcggccaaaccaaaagcacttctagtaacactataaacaccagctgtaattcctgcaccaatcacaacgggaggtacaatagcactagctgcagcaccagcaagcataaaaaaaccagatccaagcccagcaaccatactacttatatcaccaactcttagcaccgtatttaatactccacagctaggagtttcatgtttttctagtaatactgtgccatcctctacttcgtatcttccatttaatggtaacaccattatactttcagataacttgttattttttaaataatcttgccaatttgaatacactcgtccattgtggtctataaaaattctgcaagcttcaccttcttcttgtcgacactttcttaaaacaaatatgggaataggagatctatcaatacgtggattataatttgggttttgtttcatacgatcagttgcttgtttttctgttggctctaagacgacataaataaaagctagttcaacctgatcttggtactcggcgtataaattattgtgttttaaaatagagttgaacaaatgttcgatctgcgaattttgagctttgtcatatccatttcctgtatcttgaccaggaggaccaaatattgcaaaaccaattttcttcttcaagagatcatgttcgtcaaaagcgaaactatcgtagtctctatcgccaagtctgtctgccataattttttgaaaagcttccgaagtcatttcgttgctctgtgaagaaccgtctaatccatttgctaacatgcgatcgacaattaaatagtcgcgacaattttgtagacataataaaaatgaatcacggctcgaatctacttcgtctccaattaaaaatgaaataatattggggaagccatttatattttgaataataactgctgcgcatgcttcagactgaatcaatgcagatagattaccgaagttagcatcttctacagctttacaaagcgccgagtgataagctctgttttctacatcccatccaataatacaaaagtagtcatttaaaatttttgaaatttcttcgtctcgcaaatatcttgtcaaaaatgtagttgaaaattcctccctcgaattgtgcatatataacactacaaactttcgatttagaggaggagcaagaagtacagtatctttaatattggatagttttcccatattaaaccttacgcttgacgcagttatgtgggtactaatttttcttatacaactttttactgctctgatttccatacaatctctttcattttcctgagcattgaaagagctgtcagttggaattgattcctcctgtctacatcttaaaaacaagtaatttgtgcgtcctaaatctgtgcatatttgtagtatagactgatcgttttcgggttcagttctccatccatcaattatttgtctatgcggtggaatgttaaaaatttgatggatactaatttttagattttctacagtatcatactctaactgttcaaattgttctgtaagaaaaccttctggtgttctatagcaaacagaaaaggtcagtgttgcttccatagtacaaaaaaataacttctatttacatccacctgaaactaatgggagtaatggacatcttttaaatagcaaaattatttttgcaaatatattagtaact

SEQ ID NO: 4079 - DNA, 3160 bp, Diabrotica virgifera
  SmartBlast Evalue=1E-16; Info="Nopp140, isoform B n=1 Tax= Drosophila melanogaster RepID=Q7KTV5_DROME"
tggcgaacctgaattttgtaaaccctttttggtgctcgaaatggcggagaacataaattcagtgcttaatgcgcttatttttgattttttaacaaaaaagaatatcaaacttgctccccagtttcaaaaagaactcaaaccggcatctttagtaaaaggatcaccagtacttgctgaaatagtgtcacattatttaaaatcaggtccaaaggcaaaacaattaaaagtgaatgcagaagacagtgacgaatccagcagcgaggaggaagaaacaccaaaaactaagccaattgtaaacggaaatgtaaaatcaaataaaaaagacagcagctctgaagattcttcagatgaggaagaacaacctaaaactgttaaaccatccattaaacctatacaaaagaaaccagaaagttctgatgattcctcttctgatgaggaggaagtaaaaaaaccatcagtgaaacctttacaaaagcaagcacagattccagtcaaagcagcagtaacaaaagatagttctgaagattcttcagaagattcatcagatgagccagaaaaggctcctgctaagccagttcaaaagaaagcaccaccagtacccaaacaagctacaaaaaatgttcaaaagaaagaaagtagttcagaagattcatccgaggaagaagttgccagtaaaccagtgccaaccaaacaaccacaaaataagcctcaaaaagaagaaagttctgatgaaagttcatccgaggaagaggctcctaagaaaccggctcctaagaaaccagctcctaaaccttcagtggttaccaaaaaagctgaatctagctcagaggattcctctgatgaggatgaacctgttaagaaacctgttgcaaaagcaacagcaacaaaagttataccaccaaaaatacaaaagaaacaagaaagcagtagtgaggatagttcatcagaagaagaagaagcacctaagaaaactgtaaatcccacaccagtaaaagcaaaaccagctcaaactggtgtgaagaggaaagctgaaagtagttcatctgaagaatcatcagatgaagaacctccagcgaaaaaacctgcagttgctcctgcaaaaaaaccagcagctgttataactcagaaaaagtcggttccaaagaaagagagcagttcagatgattcatccagtgaagaagaaacaccagcagtcaaaaaacttactccagctccacaaaacaaatctacagcaaagaaagaagaaagcagttctgaagattcatctgaagaggaaacgaaaaaacctgctcccaaaccacaacctgtaactaaaaaagctacatctaataaaaaggaaagttcatcagatgatgacagtgacgatgaagatgatgaagatgaaaaaccagctttaaaaaaagccgctgtcacctctacacttaaaaagcctgctaaaaaagagtcatcggatgatgacgatgacgacgaagaggaagaaacaaacacctcaaagcaacaggaagatgagaatgaagaaagtgaacttaaaattaaaaaacccaaatatgacaattttgttaaagcgggccaaaataaaagttttgatggaaatgacaagggcgatagaaattcgttcggtggccgtgggggtagaggtaggggaggccggggtggcttccgtggtggattcaacaacagaaattctgacggcgacgggggtgaaagaaatagctggggaggaggaaataatcgtggaggtggattccgcggaggcaggggaggaaaccgcggaagaggcgatggcggtttcagaaattcgtttggtaacgatagaggaggtggtaggggcggttttagaaaatcgtttggcgataatgatagaggcggtagaggtgggaggttcggtgataggggcggaagaggaggaggattcagaggtgataggaatggcaggggaggtggtttcaataacagtttcaatgagagagacagttttggtgctaagtctgcagaaaataagaaaattactttcgacgattaaatggacgaattttttatgttaaatgctaatgcaagaggatcctggggcgagaaggcaaattatgatttgaaacatactcgtggaaaatctttcagacatgagaaaacgaaaaagaagcggggatcctaccgcggaggcaccatcgatacttctattaattccattaagtttgactagattactctcaaattgtttctttatcatatttactgtaatttatatacctatagttatttaattaattttaaggtatctttaaactctttaattgagcggagaacacacatatactaaactgattgagaacagatttgttgaggtttggtttaaatatttctttgccatcgttgtgtcaattaaataactgctttgtcggtaacactcaaaagatatttcagatgtaatcgagatagaattgttcatttgagaatttaaattgatttaagaaaatgtatataaaataaatatattccgtctcaatatttatgattatcctaagacctatcacttgtgggctgttatattagtcccccttgctatttaatcatttaaattaacgttgttgtttgaactaagagctccttttaatctagtatacaaaaagttctcccgcacttccatagatttcttatttttaatcataactcaattttcatcaacgttatatctacacaggctacaatgttatcgtgcaatcaggaattacaatcaccatagattttttaaccacgtctggtttgtgattgtgatggcaaatgttttatccttgaactaatgaaaaaaaatttaagtttatacatattggcgaacagtttgataaatatagtaagtgtttttctcctgactcagattttgtatttttttacaaagacgttccatacaaaacgatacttttttgtggaaagttatcatggtagtatgttagaatggtgccttctcatttcataactatacttaagattttatgttacgtgtaaatagtatttctgtgatttggaccgactttttaaatcacttccaagtgctgcatattgtggtactttctgtgattcagaaacattgtaccggatttaaacataaaatgcgtctagaattgttgtatggatatttttattaaaacaataaatattataaaac

SEQ ID NO: 4080 - DNA, 2797 bp, Diabrotica virgifera
  SmartBlast Evalue=2E-29; Info="Nopp140, isoform B n=1 Tax= Drosophila melanogaster RepID=Q7KTV5_DROME"
tggcgaacctgaattttgtaaaccctttttggtgctcgaaatggcggagaacataaattcagtgcttaatgcgcttatttttgattttttaacaaaaaagaatatcaaacttgctccccagtttcaaaaagaactcaaaccggcatctttagtaaaaggatcaccagtacttgctgaaatagtgtcacattatttaaaatcaggtccaaaggcaaaacaattaaaagtgaatgcagaagacagtgacgaatccagcagcgaggaggaagaaacaccaaaaactaagccaattgtaaacggaaatgtaaaatcaaataaaaaagacagcagctctgaagattcttcagatgaggaagaacaacctaaaactgttaaaccatccattaaacctatacaaaagaaaccagaaagttctgatgattcctcttctgatgaggaggaagtaaaaaaaccatcagtgaaacctttacaaaagcaagcacagattccagtcaaagcagcagtaacaaaagatagttctgaagattcttcagaagattcatcagatgagccagaaaaggctcctgctaagccagttcaaaagaaagcaccaccagtacccaaacaagctacaaaaaatgttcaaaagaaagaaagtagttcagaagattcatccgaggaagaagttgccagtaaaccagtgccaaccaaacaaccacaaaataagcctcaaaaagaagaaagttctgatgaaagttcatccgaggaagaggctcctaagaaaccggctcctaagaaaccagctcctaaaccttcagtggttaccaaaaaagctgaatctagctcagaggattcctctgatgaggatgaacctgttaagaaacctgttgcaaaagcaacagcaacaaaagttataccaccaaaaatacaaaagaaacaagaaagcagtagtgaggatagttcatcagaagaagaagaagcacctaagaaaactgtaaatcccacaccagtaaaagcaaaaccagctcaaactggtgtgaagaggaaagctgaaagtagttcatctgaagaatcatcagatgaagaacctccagcgaaaaaacctgcagttgctcctgcaaaaaaaccagcagctgttataactcagaaaaagtcggttccaaagaaagagagcagttcagatgattcatccagtgaagaagaaacaccagcagtcaaaaaacttactccagctccacaaaacaaatctacagcaaagaaagaagaaagcagttctgaagattcatctgaagaggaaacgaaaaaacctgctcccaaaccacaacctgtaactaaaaaagctacatctaataaaaaggaaagttcatcagatgatgacagtgacgatgaagatgatgaagatgaaaaaccagctttaaaaaaagccgctgtcacctctacacttaaaaagcctgctaaaaaagagtcatcggatgatgacgatgacgacgaagaggaagaaacaaacacctcaaagcaacaggaagatgagaatgaagaaagtgaacttaaaattaaaaaacccaaatatgacaattttgttaaagcgggccaaaataaaagttttgatggaaatgacaagcaaaaaaatactccattccgtcgtgtcaaggatgaggagatatttgttgatccacgattgcaagataactcctttgaagctaaggctaatgcaagaggatcctggggcgagaaggcaaattatgatttgaaacatactcgtggaaaatctttcagacatgagaaaacgaaaaagaagcggggatcctaccgcggaggcaccatcgatacttctattaattccattaagtttgactagattactctcaaattgtttctttatcatatttactgtaatttatatacctatagttatttaattaattttaaggtatctttaaactctttaattgagcggagaacacacatatactaaactgattgagaacagatttgttgaggtttggtttaaatatttctttgccatcgttgtgtcaattaaataactgctttgtcggtaacactcaaaagatatttcagatgtaatcgagatagaattgttcatttgagaatttaaattgatttaagaaaatgtatataaaataaatatattccgtctcaatatttatgattatcctaagacctatcacttgtgggctgttatattagtcccccttgctatttaatcatttaaattaacgttgttgtttgaactaagagctccttttaatctagtatacaaaaagttctcccgcacttccatagatttcttatttttaatcataactcaattttcatcaacgttatatctacacaggctacaatgttatcgtgcaatcaggaattacaatcaccatagattttttaaccacgtctggtttgtgattgtgatggcaaatgttttatccttgaactaatgaaaaaaaatttaagtttatacatattggcgaacagtttgataaatatagtaagtgtttttctcctgactcagattttgtatttttttacaaagacgttccatacaaaacgatacttttttgtggaaagttatcatggtagtatgttagaatggtgccttctcatttcataactatacttaagattttatgttacgtgtaaatagtatttctgtgatttggaccgactttttaaatcacttccaagtgctgcatattgtggtactttctgtgattcagaaacattgtaccggatttaaacataaaatgcgtctagaattgttgtatggatatttttattaaaacaataaatattataaaac

SEQ ID NO: 4081 - DNA, 2939 bp, Diabrotica virgifera
  SmartBlast Evalue=3E-69; Info=Vacuolar H+ ATP synthase 16 kDa proteolipid subunit n=5 Tax=Endopterygota RepID=Q7YU97_APIME
agatataatggaatgtacaaattatttattttcaacataattttgctgttcccttcttacaacagaaccaatctacattataatataatactctacaacaataggacacaatgtctgcctatttcgatggaccgaatccaccgaaaaccggcagacacttgcccaacaagcttcgtgctgagatgatgattcatgactaaaataaaaaggagatactacagggttgactcgaaaagagaaaacttactagccttgtaacacaaaacagccaattcaattcatcgtttacttaaatagtgataaactcttaggactaacaagtagattacctatttagatggcatggtatttatatgatagcattgtccagtaattggaatgccaggataaaggctcagttacaccatgctagtaacacttgtgagtcactaaaaccgagtatgtactgacttttagtactctccttgtgtaaattggtgttttatattccagtaaaacaagttattagcatcgtgtaactgagctttaaagtattttgtgtgttacaggatatatcagacgtagtattctcatttttgttaaccctgtataacattcttatctgctaaagtcaaaaagcatcaccgtctgtctattaaatagaagtttcgtcagtgttgaaaacggggatgttttttgccaaagctatgactacactttaggctaacacgtacagctatggacatcaaaaaaaccatcgatacacataagttgtcatatttacaacaatgctgatataataaaaccgttttatattatttttggaaggtaatggaacatagattattttgaaatcatatttttgagagagaaaaaaaggtaagcaaaactgatgaggatgggaacaaataaaaattgactattaaaaaaatgtacagggtttacgaatgttatttagacagtacattgttagataaataaattaagacgatattatttagaaatgacggttttgcgatgtaatgtcccattaaccaaagttttttttattaaaaaagatgatgcattgaaaaaaaataccacagttttactggcttaaaacttgctattcaaaaaaattgtcaaaaataacattcccgaaccatttgttgtataaagagaccaagccttcgtaaggccatgaaaatgatatatcaagtataacacactaatgataaaacaaatgtacagtatttttgtgaaattaaaaataaattgtgctacttttttaactttattcaaatacttcctaggctcaatagagtctagcttttatattaaaagaaaaacggtaacctaaattctactaactatacaattaatttaataatagtggtgacccgccatgaaaatgaaatagaggcttctaagtatgtttaaaattatttacaatgatagcacaggtattgtaacgtacgaggcaaaataaatcaaaatttgttttccctcttctcttgtatattatactgcgactgatcaaatgaaaaggcacgaaacgtcgtaacaacttaaccgcaaacataattgcctatgccgttatgggataacgtagtgagacatccagggaggcaaatgtagccttcggattcgatcggggcattcccgggcgcccgcatgcgcaggagagaatagaggctcttataagagagccgtccaattgacgcgacagttcgtgtgagcacatcatggcgttcacattgcaaaattcgacgattgaggagcagcggggcgttatcaggtttctgacagcggaaggtgttaaaccagttgctattcaacgccggatgtatacggggaagactgttcatttccacaggagttctgggatcaatgaatccttcggctaatcaacggcatcgttgtgctcaggtaaatggtgaatactttgaataaagacttcatttatacccacagtgtcgtttcgtacattttcatttgaacaacctattagtaactaagacctttattttgcctaggaagaaaattcgttttaatacaaaaacctgtcaagaaaactcgaccggttccatgaatatggaaataaggaattattagtcgtgtgtgtggacacagcagcgatgaagaggcccagtcttttttactaaaattattaatttgttttgccccgtacgcgaaaaatacgggccccatcataactaaattatttacattgcccgcctcagtcactttcatcgcctgctaccatttatacagtttttatttttacatgtagacattaaaaacaaaatgatcggggcgagatgcgcaacttttggtacgctgtgtttaggagatgaaaatttaggggagctgggcgcttaagctctagtatagaggtaaatggcgacgatgagaccataaagacctaatacttcggcgaaaatgaggatcaagatcattcctacgaagagtcttggctgttgtgcggtacctcttacaccagcgtcacctacgataccaatagcgaaacctgccgccaatcctgaaaatcctactgaaagaccagcacccaaatggacaaaaccactgtacaatgaatatgtagagctgtcttggatgttaccagagatcagtacagctatgaccagaccgtagatggcaatgatacccgccatgacaactgggataatacatttcatgataagttccggcctcatgaccgacatagcggcaataccggttcctgattttgccgtaccataggcggcgcccagcgaactgaaaatgatagcagccgcggctcccatgactccaaagaagggtccatagacggggtgtttgtcatctgccattttttaagttattaggagtatttacaggccagaacgatgttaaatgtgcacaacacactacggaactagcgaacccactgacaaatatggcttacacgactgccaccagcaagaatgggtcatatgacg

SEQ ID NO: 4082 - DNA, 2928 bp, Diabrotica virgifera
  SmartBlast Evalue=3E-69; Info=Vacuolar H+ ATP synthase 16 kDa proteolipid subunit n=5 Tax=Endopterygota RepID=Q7YU97_APIME
agatataatggaatgtacaaattatttattttcaacataattttgctgttcccttcttacaacagaaccaatctacattataatataatactctacaacaataggacacaatgtctgcctatttcgatggaccgaatccaccgaaaaccggcagacacttgcccaacaagcttcgtgctgagatgatgattcatgactaaaataaaaaggagatactacagggttgactcgaaaagagaaaacttactagccttgtaacacaaaacagccaattcaattcatcgtttacttaaatagtgataaactcttaggactaacaagtagattacctatttagatggcatggtatttatatgatagcattgtccagtaattggaatgccaggataaaggctcagttacaccatgctagtaacacttgtgagtcactaaaaccgagtatgtactgacttttagtactctccttgtgtaaattggtgttttatattccagtaaaacaagttattagcatcgtgtaactgagctttaaagtattttgtgtgttacaggatatatcagacgtagtattctcatttttgttaaccctgtataacattcttatctgctaaagtcaaaaagcatcaccgtctgtctattaaatagaagtttcgtcagtgttgaaaacggggatgttttttgccaaagctatgactacactttaggctaacacgtacagctatggacatcaaaaaaaccatcgatacacataagttgtcatatttacaacaatgctgatataataaaaccgttttatattatttttggaaggtaatggaacatagattattttgaaatcatatttttgagagagaaaaaaaggtaagcaaaactgatgaggatgggaacaaataaaaattgactattaaaaaaatgtacagggtttacgaatgttatttagacagtacattgttagataaataaattaagacgatattatttagaaatgacggttttgcgatgtaatgtcccattaaccaaagttttttttattaaaaaagatgatgcattgaaaaaaaataccacagttttactggcttaaaacttgctattcaaaaaaattgtcaaaaataacattcccgaaccatttgttgtataaagagaccaagccttcgtaaggccatgaaaatgatatatcaagtataacacactaatgataaaacaaatgtacagtatttttgtgaaattaaaaataaattgtgctacttttttaactttattcaaatacttcctaggctcaatagagtctagcttttatattaaaagaaaaacggtaacctaaattctactaactatacaattaatttaataatagtggtgacccgccatgaaaatgaaatagaggcttctaagtatgtttaaaattatttacaatgatagcacaggtattgtaacgtacgaggcaaaataaatcaaaatttgttttccctcttctcttgtatattatactgcgactgatcaaatgaaaaggcacgaaacgtcgtaacaacttaaccgcaaacataattgcctatgccgttatgggataacgtagtgagacatccagggaggcaaatgtagccttcggattcgatcggggcattcccgggcgcccgcatgcgcaggagagaatagaggctcttataagagagccgtccaattgacgcgacagttcgtgtgggcacatcatggggttcatgttgcaaaattcgtgaggcgttatcaggtttctgacggcggaaggtgttagttaaaccagttgctattcaacgccggatgtatacggggaagactgttcatggtcacaggagttctgggatcaatgaatccttcggctaatcaacggcatcgttgtgctcaggtaaatggtgaatactttgaataaagacttcatttatacccacagtgtcgtttcgtacattttcatttgaacaacctattagtaactaagacctttattttgcctaggaagaaaattcgttttaatacaaaaacctgtcaagaaaactcgaccggttccatgaatatggaaataaggaattattagtcgtgtgtgtggacacagcagcgatgaagaggcccagtcttttttactaaaattattaatttgttttgccccgtacgcgaaaaatacgggccccatcataactaaattatttacattgcccgcctcagtcactttcatcgcctgctaccatttatacagtttttatttttacatgtagacattaaaaacaaaatgatcggggcgagatgcgcaacttttggtacgctgtgtttaggagatgaaaatttaggggagctgggcgcttaagctctagtatagaggtaaatggcgacgatgagaccataaagacctaatacttcggcgaaaatgaggatcaagatcattcctacgaagagtcttggctgttgtgcggtacctcttacaccagcgtcacctacgataccaatagcgaaacctgccgccaatcctgaaaatcctactgaaagaccagcacccaaatggacaaaaccactgtacaatgaatatgtagagctgtcttggatgttaccagagatcagtacagctatgaccagaccgtagatggcaatgatacccgccatgacaactgggataatacatttcatgataagttccggcctcatgaccgacatagcggcaataccggttcctgattttgccgtaccataggcggcgcccagcgaactgaaaatgatagcagccgcggctcccatgactccaaagaagggtccatagacggggtgtttgtcatctgccattttttaagttattaggagtatttacaggccagaacgatgttaaatgtgcacaacacactacggaactagcgaacccactgacaaatatggcttacacgactgccaccagcaagaatgggtcatatgacg

SEQ ID NO: 4083 - DNA, 2891 bp, Diabrotica virgifera
  SmartBlast Evalue=5E-32; Info="G-protein, gamma-subunit n=6 Tax= Endopterygota RepID=B0W030_CULQU"
atgatcaagaaggtataatataattttattatcaactggtacatttttcagcttataggtatagtatattttaattgaatactcatattgtttacagctagtaataaatatctggtcacccttcaaaagccgtggaaaatatcctcaaaataaaaagaaaattgtctttatcggtaaggtataatcgattatatcgattataatcgatatgatcggtataatcgttatatatcgattgccgttgaattgtttgtcgtcatagtctggtgcttggtacatacatgttatgttcaacttacttctagtctaaagaacacttaacctactgcaaaaacttgaattataataagttattgttaaaatcaaagcatgcattgactaacgctactataactttacaatgccttaaaaactagtaaaaagctttaggctgtcaagcccaatcaaatatcaatgtctcagcgtttgctgtcaagatgacaagtggacgacaccttattccttaagatagcgcccaccaaccagtggacagccggtcgaggtagtcttcctctggagttacgctgttttcggcggaagtgtcaattggtacatacgattttttgaaagtaatttgcacagcttttgaaatttgacttgtgactaggctaaagcttaatgtctgtttagaattctaccatgtatataaaaacctgtaatggcctcgattgggaggcaaatgtaccgtcatttaaaaaaggtactaaagtatttggtagggcttaaatattaccctgcttcaggcgctactgtaaagtacaggatgctttccgaaccaacaagcggacgatggtggagaatactgttcaaaaggcatcctcgttcgaattttataaaaattaaagctttttcagaagcagggtacgacattaaacgagaaatcaatgaatcttaccaagttttgtaacattcactgatcgaaaaaaacaaattttatcatatataaaaacattccgataatgaatgagtagtttaatattataatgcaacacatacagaaatgtagagaaataacaaatacacgtttaaattatctcacttatactgataaaaataaaaatttcgcagtttcttaaaaggtactcatgatggtaaaatttagatgcagtttgtttggagtatcttttaaaaaaataagaaatttttgtttccggtccctttaacaatacttttcccactcactactagatggcgctagttaaaataaagttacaacaatgtcttcttattttaccaaccaaaatcatatataactataatcttattattaattattttattttgactagattcactcatagtgatataacatagaaattaatgtttgacatttgttaagacagtaggactattcatcgctggatgacgtatgacaatgacgtatgacgtatatattattgtacgtcatatgtcgagtgtacctgaaaaatacctgcgatgaatagctctattgagcgccatctatcaatgagctgaaaaactaagaaatagctggtagtattaacagtttaggagtataagcaataacagtgttaatgtaaattgtcattttgtcataatgaactaactattcgtcttgtatttcaaaagggataaataagatacttttgcaatatcatacaataaatatttctacagctatgatagtaataaaagtacacaaacaagcattatttaaaatatgttatattttagagcggaatctttacttgtttaggtataaaacgaccaaaagaaaggatttttgcttgtttcgttgggggaggaacaaaatcttgaataactaccctacaaatacacacatagcatatatataagtgagtatcttaaaagtaataaaatttttaataattgctgggttacagctgggtcaccttagattacacttgccaacaaagctaatatcaagctagatacactcagtatataatatatttaatttgttgtttgttcctccccagcaaagctcctgggcgtattggatagaagatgaggtgagtaatctatcctccacgaggtttttgaccggcttatacgactggaaataaaaattccactccttagactacgtgtaataaaaaatagttaaaaatttcaaactggttatagttaaactacataacaatggcattcttggaaaatcttttagggtttttgttttggatgcactgtcagaatggactgctacgccgctggagcatattcttctaggattcggattcggatccggattcgaaactaataaaggactatcggattaagcaacaaactgttaatgttgggcaaaatcattatcagaaaggggaaaataataactaggaagccgaagatcagctgttgattctacatgatgacgcactttcctttctccgcccaagggttattctttttgtcgggggcgtggatgagagggtcgttcttttcgttttcttcgacatactcccgcattgctgcaatagattttgacagaggccaccgctccatagccgcctggtatttcatattctcgatctgcttcttcaaagcatccttgtccatagttgcgagagtactggcgtccatctgggctggcgctttcgacgcctggcgtcgcgcacgcgtccgattttagatggaaatgaggtaggtagatggcgctggtggggagagcgtcgctacggtcagtgaaacgtgggtggcgtgctcgatataccgggggagattggaaagttgtttacgtggttcaataattaacgaaactatgctaatagctgtaaaaagttggctggctaccgctaaaatcccttgattgtgttttaatttgagtcaaaagaatccaaacaagtatggtaaatacacgaaactaagccaat

SEQ ID NO: 4084 - DNA, 2884 bp, Diabrotica virgifera
  SmartBlast Evalue=5E-32; Info="G-protein, gamma-subunit n=6 Tax= Endopterygota RepID=B0W030_CULQU"
atgatcaagaaggtataatataattttattatcaactggtacatttttcagcttataggtatagtatattttaattgaatactcatattgtttacagctagtaataaatatctggtcacccttcaaaagccgtggaaaatatcctcaaaataaaaagaaaattgtctttatcggtaaggtataatcgattatatcgattataatcgatatgatcggtataatcgttatatatcgattgccgttgaattgtttgtcgtcatagtctggtgcttggtacatacatgttatgttcaacttacttctagtctaaagaacacttaacctactgcaaaaacttgaattataataagttattgttaaaatcaaagcatgcattgactaacgctactataactttacaatgccttaaaaactagtaaaaagctttaggctgtcaagcccaatcaaatatcaatgtctcagcgtttgctgtcaagatgacaagtggacgacaccttattccttaagatagcgcccaccaaccagtggacagccggtcgaggtagtcttcctctggagttacgctgttttcggcggaagtgtcaattggtacatacgattttttgaaagtaatttgcacagcttttgaaatttgacttgtgactaggctaaagcttaatgtctgtttagaattctaccatgtatataaaaacctgtaatggcctcgattgggaggcaaatgtaccgtcatttaaaaaaggtactaaagtatttggtagggcttaaatattaccctgcttcaggcgctactgtaaagtacaggatgctttccgaaccaacaagcggacgatggtggagaatactgttcaaaaggcatcctcgttcgaattttataaaaattaaagctttttcagaagcagggtacgacattaaacgagaaatcaatgaatcttaccaagttttgtaacattcactgatcgaaaaaaacaaattttatcatatataaaaacattccgataatgaatgagtagtttaatattataatgcaacacatacagaaatgtagagaaataacaaatacacgtttaaattatctcacttatactgataaaaataagaatttcgcagtttcttaaaaggtactcatgatggtaaaatttagatgcagtttgtttggagtatcttttaaaaaaataagaaatttttgtttccggtccctttaacaatacttttcccactcactactagatggcgctagttaaaataaagttacaacaatgtcttcttattttaccaaccaaaatcatatataactattatcttattattaattattttattttgactagattcactcatagtgatataacatagaaattaatgtttgacattcgttaagacagtaggactattcatcgccggatgacgtatgacgatgacgtatatattattgtacgtcatatgtcgaatgtaccagaaaagtggctgcgatgaatagctctattgagcgccatctatcaatgagctgaaaaactaagaaatagctggtagtattaacagtttaagagtataagcaataacagtgttaatgtaaattgtcattttgtcataatgaactaactattcgtcttgtatttcaaaagggataaataagatacttttgcaatatcatacaataaatatttctacagctatgatagtaataaaagtacacaaacaagcattatttaaaatatgttatattttagagcggaatctttacttgtttaggtataaaacgaccaaaagaaaggatttttgcttgtttcgttgggggaggaacaaaatcttgaataactaccctacaaatacacacatagcatatatataagtgagtatcttaaaagtaataaaatttttaataattgctgggttacagctgggtcaccttagattacacttgccaacaaagctaatatcaagctagatacactcagtatataatatatttaatttgttgtttgttcctccccagcaaagctcctgggcgtattggatagaagatgaggtgagtaatctatcctccacgaggtttttgaccggcttatacgactggaaataaaaattccactccttagactacgtgtaataaaaaatagttaaaaatttcaaactggttatagttaaactacataacaatggcattcttggaaaatcttttagggtttttgttttggatgcactgtcagaatggactgctacgccgctggagcatattcttctaggattcggattcggatccggattcgaaactaataaaggactatcggattaagcaacaaactgttaatgttgggcaaaatcattatcagaaaggggaaaataataactaggaagccgaagatcagctgttgattctacatgatgacgcactttcctttctccgcccaagggttattctttttgtcgggggcgtggatgagagggtcgttcttttcgttttcttcgacatactcccgcattgctgcaatagattttgacagaggccaccgctccatagccgcctggtatttcatattctcgatctgcttcttcaaagcatccttgtccatagttgcgagagtactggcgtccatctgggctggcgctttcgacgcctggcgtcgcgcacgcgtccgattttagatggaaatgaggtaggtagatggcgctggtggggagagcgtcgctacggtcagtgaaacgtgggtggcgtgctcgatataccgggggagattggaaagttgtttacgtggttcaataattaacgaaactatgctaatagctgtaaaaagttggctggctaccgctaaaatcccttgattgtgttttaatttgagtcaaaagaatccaaacaagtatggtaaatacacgaaactaagccaat

SEQ ID NO: 4085 - DNA, 2872 bp, Diabrotica virgifera
acggtctcagataagttaggaacccttcaaaacaattcctaccctacaaggactgtatatagtaaaaatactgtgtagttgtccactgaaacagaaaatacaatgtcagacgcagattatgcatctctcggtaaaagttttctgtttaagacgttaaatttttctatttggcatattgttatgttcaaattaaatggcaaatgaaggatcggttcgtttgttattgctacagccaatcagctcgcactgtaaaaccaagaatgaagcaaaattgcataaaatctctaatagtaacttcgaagttacggaaagaggaggaagaccaagaaataatgggtaagaataatcaagactgaaatttacaagaacagaaaggaaggaaaagaaataggtgtgaaaaggtaaggaggaagacagataaagagagggaaagacacacagagaggtccatcaagattgtagttattcaaaatgcagaccaattatactagtttggtacttgctttgaggatacgatttcttgtattacttgttggtcactaggaaagacagagagaaagaacagaaacaagaagagatgagagataggaaaaagggacagaataataaatttagacaaaaggtgacggaatttctcacacttacagaaacgtcttgtagagtaagtctcacatagaggattcttcccaaaatatattaagacttcctaggaaagaatatgtaagatatagagtgaaagaggcagtctccctctttgttctcaatttggcccgtgtgtgagaatgcgtgggggaaagaaagggtagtcaagaacggggaagggaaagacataaatggagaaaaaaaggacaaagagatagagagaaatcgagacagtgtgtcacacagaggaaacaacaggagaaacaaacagaagttattctctttttgtttccgtcttttctcacgtgtgacagaattctcccacaggttgtaaagagaggcgagtggaaagcgtagaagagataaatggggtgaaaaaatgaaagagacaaatgaagaaataaagagggaagtaaagacaagggaagaaagacagtcagacagagaaacttttctcagaaataaagagactttgccagtatatctgaaaaaattaacagagagaggggcaatgaaaaaagaagggagggaagaaacaaataaaaagggagattagattaaaaaaatagtgacgtttacgtatatgtggaacgaaggcaataaacgttgaacattaccagttattcaaaatggaaaatagttatggtaatatttttagttatcctctctttgtttcaaattgggaaggagaagggaacagagaacggaggaacatataaacaaacgggggaaaatgataacagtggaagaaagacaaaggtaaaccgtctcacactgagagaaatgtttcacaaataaacagagactgtaagagtctcttcagggtaaattaaaagagacaaaccaaggtctcacaaggagtgaattctctcagaaagacagaggggtattaagaaaagaagagggggaagaaacagtgaggatttgggaatttttggataagttattcaaaatgaagaccgtttattgatgtttttttgacttctcgacccatatttgccatttgagatgaaacgaacaatgttaacatatttgtttgcaatctgctgtggttctacttatttatacactatgtactaatgaccaaaactcgcatagataaatcacattcgatttgaaagcagttctggtcgggacctaataaatactaggtacttgttttcgagatttttacattccagaatatatttcatttaggtactgaaaaaattaaaaaaatatcaaaaatcttatataaaatcgtcgtacgttacaatgcaatggcgcaactttttgataacatcgtagaataatgaaataactttcttttgtgcatcttttccttttagtacttctgcacgcatttcccgattttagagaatcgctcttctattttgtattttttttgtttctaaacgaacaaaactataccacctacaaacaaatggttaggtttgaggattccatattgaccgaataatcaacaacacggtcggtcagtataaaaaaaatatagttatttcagtcttaattagaaaatatcacattccgtccaatgtagtcatacattgttttatttttgtatcgttttacggcattgaacatgcagcaaacggagctacagaagaatcttcacctctttcaagaatggagacaaatattcaacgtatagacatatagtttctacaccactaggtggtttagagtgcatcagacgcaaacatagacactacgcgtcagagaaaacgaaccacccacaaaattcagaaaattctatatttttttatatctctccatttttttaaaattttatttatgttatgagaagctagaccgaggcttcaaagagaataaacaaattcgcaaaacctattaaatcgtaaaattctcagaactcattatttacgaatcaacgaaattgattgttttgagcactaaatggacttcacaggattatcagcatccaaaataagagcaagacatattcatttaatttttaaatgtcttacaaaacaaacatcacgtttgttgttaaataattaggtgacaccgattacccaacacaagtgcactagttttcaataacgctttgtcagctattcaatattattaatatttaacggtcgagtcgtgtcaacaatctaaataacaacatttgcaagtttatttatagattcaggagaagcatcgccgatcattcttttatcattcattattcgtgattcattattcatcattcgatatttagacc

SEQ ID NO: 4086 - DNA, 2873 bp, Diabrotica virgifera
acggtctcagataagttaggaacccttcaaaacaattcctaccctacaaggactgtatatagtaaaaatactgtgtagttgtccactgaaacagaaaatacaatgtcagacgcagattatgcatctctcggtaaaagttttctgtttaagacgttaaatttttctatttggcatattgttatgttcaaattaaatggcaaatgaaggatcggttcgtttgttattgctacagccaatcagctcgcactgtaaaaccaagaatgaagcaaaattgcataaaatctctaatagtaacttcgaagttacggaaagaggaggaagaccaagaaataatgggtaagaataatcaagactgaaatttacaagaacagaaaggaaggaaaagaaataggtgtgaaaaggtaaggaggaagacagataaagagagggaaagacacacagagaggtccatcaagattgtagttattcaaaatgcagaccaattatactagtttggtacttgctttgaggatacgatttcttgtattacttgttggtcactaggaaagacagagagaaagaacagaaacaagaagagatgagagataggaaaaagggacagaataataaatttagacaaaaggtgacggaatttctcacacttacagaaacgtcttgtagagtaagtctcacatagaggattcttcccaaaatatattaagacttcctaggaaagaatatgtaagatatagagtgaaagaggcagtctccctctttgttctcaatttggcccgtgtgtgagaatgcgtgggagaaagaaagagtagtctagaacggggaagggaaagacataaatggagaaaaaaaggacaaagagatacagagaaatcgagacagtgtgtcacacagaggaaacaacaggagaaacaaacagaagttattctctttttgtttccgtcttttcccacgtgtgacagaattctcccactgttgtaaagagaggcgagtggaaagcgtagaagagataaatggggtgaaaaaatgaaagagacgaatgaagagataaagagggaagtaaagacaagggaaaaaagacagtctcagacagagaaacttttctcagaaataaagagactttgccagtatatctgaaaaaattaacagagagaggggcaatgaaaaaagaagggagggaagaaacaaataaaaagggagattagattaaaaaaatagtgacgtttacgtatatgtggaacgaaggcaataaacgttgaacattaccagttattcaaaatggaaaatagttatggtaatatttttagttatcctctctttgtttcaaattgggaaggagaagggaacagagaacggaggaacatataaacaaacgggggaaaatgataacagtggaagaaagacaaaggtaaaccgtctcacactgagagaaatgtttcacaaataaacagagactgtaagagtctcttcagggtaaattaaaagagacaaaccaaggtctcacaaggagtgaattctctcagaaagacagaggggtattaagaaaagaagagggggaagaaacagtgaggatttgggaatttttggataagttattcaaaatgaagaccgtttattgatgtttttttgacttctcgacccatatttgccatttgagatgaaacgaacaatgttaacatatttgtttgcaatctgctgtggttctacttatttatacactatgtactaatgaccaaaactcgcatagataaatcacattcgatttgaaagcagttctggtcgggacctaataaatactaggtacttgttttcgagatttttacattccagaatatatttcatttaggtactgaaaaaattaaaaaaatatcaaaaatcttatataaaatcgtcgtacgttacaatgcaatggcgcaactttttgataacatcgtagaataatgaaataactttcttttgtgcatcttttccttttagtacttctgcacgcatttcccgattttagagaatcgctcttctattttgtattttttttgtttctaaacgaacaaaactataccacctacaaacaaatggttaggtttgaggattccatattgaccgaataatcaacaacacggtcggtcagtataaaaaaaatatagttatttcagtcttaattagaaaatatcacattccgtccaatgtagtcatacattgttttatttttgtatcgttttacggcattgaacatgcagcaaacggagctacagaagaatcttcacctctttcaagaatggagacaaatattcaacgtatagacatatagtttctacaccactaggtggtttagagtgcatcagacgcaaacatagacactacgcgtcagagaaaacgaaccacccacaaaattcagaaaattctatatttttttatatctctccatttttttaaaattttatttatgttatgagaagctagaccgaggcttcaaagagaataaacaaattcgcaaaacctattaaatcgtaaaattctcagaactcattatttacgaatcaacgaaattgattgttttgagcactaaatggacttcacaggattatcagcatccaaaataagagcaagacatattcatttaatttttaaatgtcttacaaaacaaacatcacgtttgttgttaaataattaggtgacaccgattacccaacacaagtgcactagttttcaataacgctttgtcagctattcaatattattaatatttaacggtcgagtcgtgtcaacaatctaaataacaacatttgcaagtttatttatagattcaggagaagcatcgccgatcattcttttatcattcattattcgtgattcattattcatcattcgatatttagacc

SEQ ID NO: 4087 - DNA, 2873 bp, Diabrotica virgifera
  SmartBlast Evalue=1E-61; Info=Prominin-like protein n=1 Tax= Camponotus floridanus RepID=E2AWX0_9HYME
attacgaccatatactaatattaaaatataatataatactttgtttacgtataatttcatactttcatattgataatactacgtttcggtatttgttccaatgttatcttcacttttttcacttaaaaaaagtaactttgtttagaatcgcgtcgaagcttcatgttgtttattaaacttaggagccatatcataatacctcgaattcctgttatcgtttggtgcgctggaattgtagtaattgtgattgtcatcgttatgacttttacctaacgggttttcgtggtttctcggtggcatgttgtaataatcattgaagttgtcttttttgttctttttgcctcgatgttgaggttccctaattaagtgttgaccatcatctttgtagctcttatatatagatgcaagccaaatcgataagattagtattggtacaaacgttaccaaacaaacaaaaagagacgtccaaaaaccgttccaaggtagagctattttgtcacagaaagctgtaagaccaccatgtattgctacgtttaaaggtgtgcatttccccagttcgttctgtacttcacttgaaattctacctgtgtatccgtttataagattctctattaatttaccgaatgtgcgtgcaccctcttcaaaaatatctattgtggcctttgtgtcatttgtgaatttattttgcgccgtctcaatctgtccgatgaattcctgaatagcttcaggaaaattctgagaacccattttcaaatctttctgtagattatcttccatagctaaaattatgttaatatcttcaatgaatggttttagtttattagtattgaagtcttccaaatcctttatctggtttgtaagattagcagctaattcttggtccacattgtttaagttagcagcgatattatttaacgtatctactaactctttcaaatcaacatcgacaatattgttcttaagtatatcttgcattttttcgaagacagcgagtaagtctttaacatcgatattagtcaattcgttcaacttttcttcggtgtcagcctccaaaaagttaaaatttattttatctattgcatcgcctactttatccaccatgtcatctatattttgtgtaatgttaaactggcctatcgttttatcgatgtcgaattgtgatttcgttttcagatcaagcacctcataaatacttttattgttataacatttatccaaaatggttgtgatattaaaagaaaactcattgtcatctttaatatgtttatcaatgtacttatcgattacagtaataatagatgatttgtcaggattccttaatggatagcaaatgatccgatctgctgctataccaccaaccgacattactaacgtcataatacatataatgacggttatgatgaatatcagggcaacagcagtcattaagaatacacttcctgtacctttactgcagcaataactcttgtacttatcgggtctattgccaaacaaaccaaaaactaatccaaaaaatagaaacacaaggattaaaagcaaaacgcacgaaactactattcccacatagtaaaaatatggatagtacttttccagataatcattcctgtcgccgaaagaagaataaacacttttcatatgctcctttactttatctacgagatcatccatggtttttgtgttgtcctttatggttgctccagccttatctatctctgtatcaacttgagccgtaacagtttggatttgagaattgattgtatctggaactttttgtaccagatcattagcagaggtcgctgctttttgtatatctccaatgttacgccattaaatatgtctggaattgccggtatatcttttacatctatgatttttaaatcattgaccattttctctgcatcagcacaagatggaccacacttctctaatgtatcttttaaacctttttgaatgtccgccatttcactcgttaagttgcttcctgttgttttcagttgatcggtcttcctttgcaaattatctaggtcggttttcagatatgttaatttatcagcaaatgtagaaatagtcgttattatcgtaacatcgttccatagaggcaaattatttaatatatcctgtgtagaatctttcaacgtttgtttaaaggtgccactaaacttatcatagtccgcttcaagtaaaaagtgaacatgatccttgacatcctcaatataccctacgctatcgttgtagacttttctgccattttctcttaactgattgacgcccgtcttcattctgtgagtagtggcgaaagcactagcaattccaaataacagcactgcacagcaaattactagcaaaatacccaaaataatcttcaagcaaagatcctgtttcttctcgctgactctagctttggctccacacaatccacagcatcgacaacaggcaaaaattaaaccacataccggtattaatacaagtagtaaaagaataaaaccgaagaatgctatcaaacctgcatattgcattgccaaatctgcgtagctagtatttagagatggattgttatcgtcgtcccagctaaacaaatcttcacttaaaaaattggccggtagcaagctgtctacaaaactcctggtcatatcatacagccctttcattcctccaggactgaacgtaatactggcagcagtatactgattggtgtgagtgtagttatcataatcaggcagttgtgccttaagattatcgaagacactcatatcggctgccatttaggcacactatgaacttaatgaaaagtatactaatttatatatttataatagtaatttgatccgccatacgcaagttgcaatattactacaaaagagtcgttgataaac

SEQ ID NO: 4088 - DNA, 2873 bp, Diabrotica virgifera
  SmartBlast Evalue=5E-61; Info=Prominin-like protein n=1 Tax= Camponotus floridanus RepID=E2AWX0_9HYME
attacgaccatatactaatattaaaatataatataatactttgtttacgtataatttcatactttcatattgataatactacgtttcggtatttgttccaatgttatcttcacttttttcacttaaaaaaagtaactttgtttagaatcgcgtcgaagcttcatgttgtttattaaacttaggagccatatcataatacctcgaattcctgttatcgtttggtgcgctggaattgtagtaattgtgattgtcatcgttatgacttttacctaacgggttttcgtggtttctcggtggcatgttgtaataatcattgaagttgtcttttttgttctttttgcctcgatgttgaggttccctaattaagtgttgaccatcatctttgtagctcttatatatagatgcaagccaaatcgataagattagtattggtacaaacgttaccaaacaaacaaaaagagacgtccaaaaaccgttccaaggtagagctattttgtcacagaaagctgtaagaccaccatgtattgctacgtttaaaggtgtgcatttccccagttcgttctgtacttcacttgaaattctacctgtgtatccgtttataagattctctattaatttaccgaatgtgcgtgcaccctcttcaaaaatatctattgtggcctttgtgtcatttgtgaatttattttgcgccgtctcaatctgtccgatgaattcctgaatagcttcaggaaaattctgagaacccattttcaaatctttctgtagattttcttccatagttaatattatgttaatttcttcaatgaatggttttagtttcttagtattgaagtcttccaaatcctttatctggtttgtaagattagcagctaattcttggtccacattgtttaagttagcagcgatattatttaacgtatctactaactctttcaaatcagcatcgacaatattgttcttaagtatatcttgcatttttttgaagtcagcgagtaagtctttaacatcgattttagtcaattcgttcaacttttcttcggtgtcagcctccaaaaagttaaaatttattttatctattgcatcgcctactttatccaccatgtcatctatattttgtgtaatgttaaactggcctatcgttttatcgatgtcgaattgtgatttcgttttcagatcaagcacctcataaatacttttattgttataacatttatccaaaatggttgtgatattaaaagaaaactcattgtcatctttaatatgtttatcaatgtacttatcgattacagtaataatagatgatttgtcaggattccttaatggatagcaaatgatccgatctgctgctataccaccaaccgacattactaacgtcataatacatataatgacggttatgatgaatatcagggcaacagcagtcattaagaatacacttcctgtacctttactgcagcaataactcttgtacttatcgggtctattgccaaacaaaccaaaaactaatccaaaaaatagaaacacaaggattaaaagcaaaacgcacgaaactactattcccacatagtaaaaatatggatagtacttttccagataatcattcctgtcgccgaaagaagaataaacacttttcatatgctcctttactttatctacgagatcatccatggtttttgtgttgtcctttatggttgctccagccttatctatctctgtatcaacttgagccgtaacagtttggatttgagaattgattgtatctggaactttttgtaccagatcattagcagaggtcgctgctttttgtatatctccaatgttacgccattaaatatgtctggaattgccggtatatcttttacatctatgatttttaaatcattgaccattttctctgcatcagcacaagatggaccacacttctctaatgtatcttttaaacctttttgaatgtccgccatttcactcgttaagttgcttcctgttgttttcagttgatcggtcttcctttgcaaattatctaggtcggttttcagatatgttaatttatcagcaaatgtagaaatagtcgttattatcgtaacatcgttccatagaggcaaattatttaatatatcctgtgtagaatctttcaacgtttgtttaaaggtgccactaaacttatcatagtccgcttcaagtaaaaagtgaacatgatccttgacatcctcaatataccctacgctatcgttgtagacttttctgccattttctcttaactgattgacgcccgtcttcattctgtgagtagtggcgaaagcactagcaattccaaataacagcactgcacagcaaattactagcaaaatacccaaaataatcttcaagcaaagatcctgtttcttctcgctgactctagctttggctccacacaatccacagcatcgacaacaggcaaaaattaaaccacataccggtattaatacaagtagtaaaagaataaaaccgaagaatgctatcaaacctgcatattgcattgccaaatctgcgtagctagtatttagagatggattgttatcgtcgtcccagctaaacaaatcttcacttaaaaaattggccggtagcaagctgtctacaaaactcctggtcatatcatacagccctttcattcctccaggactgaacgtaatactggcagcagtatactgattggtgtgagtgtagttatcataatcaggcagttgtgccttaagattatcgaagacactcatatcggctgccatttaggcacactatgaacttaatgaaaagtatactaatttatatatttataatagtaatttgatccgccatacgcaagttgcaatattactacaaaagagtcgttgataaac

SEQ ID NO: 4089 - DNA, 2836 bp, Diabrotica virgifera
  SmartBlast Evalue=2E-15; Info=Pol protein n=2 Tax=Drosophila melanogaster RepID=Q8IT54_DROME
attgaacagtttttcagtgaaataaaaaaaatgacgatatttatattggtgtttttttttataaaggcacatagtcataacttgtataaaacagtaaattaaaactgcaaaataacataaacgtaaaaaatatgctttagaaagttgtcaagaactgaattgtctactttttgtataacataataaaatgaaaaaaaaaatccacgaggaaagtaaattcctgtataccataaatcacaaataatagttaaatgttaattaaattcctttataaaatgtatatttataaaaaaatccctaaaaagggctacatcacagaacgttttctgaataatgattccatcatcagtgcttattacaggtcaaaatacatgcccgagtcaccaagatatttgagtaaaaaccctttaaatgttataaagttttaaattgtttacattatgttattaaaaaaggtgtgatgtttaaaatattcctggatttaacctcacgacatcacaggacgctccccacgcgggttgcaatgttcagaggatacaacctcacataacgaacttcaaatggcaacttgtcattagcaaatttaagtctgttatgaggctggatcctctagacatctctggcatgtactttgacctgcacaagcactgatgatggaattgttttattccgaaaacgttctgatatacttagccatttttggggcccttcctcataaatataccttttacaaaggaatttaacgattttttttataataaaatgaatgatctattgaggccattcaactccataggctatttgatagaattcgcgagatttttgttatgttcaagctttaggcccatattattgaaacgatcatttgtctgggaacctaacattttcaggcactaaacgtttatatttcaacattttttatcttatgatttaataacagaaaacaattatatatttggcaaattacaacttaaaataacttaaaaatgcttactagaaagcaatcgataaaaaagtaacatttcatacaggcaataaacaaagtaaattgtttaatcgttatttataatgtactattctacagctttttaggttagatgcatacagtagggcattccaagacttttgacgtttatcacaccgctgggaggcaaactgccaaacattatatttgtttatatttgtaccacattgtgtttcttaagttttttacctttaataatgttttagttgtatttttcaaacattttgttgttaattttgtgtagttttttattgtagaagcacttgaacgactttatttagttttaagcaatgaataaataaacatgtgttactattttcgaaatttgttggtatacaatacagatgttgctagtagattatacaagcaaaagattagcaaagcaaataatatagattcatttccctcagggagtctgagttaacctacagtggagagttttccaagcgtaagtaacatggaaatagtaagttatttagcatttttataggacgttttatagcattttaccattgtttctgtatttagttcagttttatgcttcaaatgcactgttcagcactgatggtaatcgataaaactgaactttatcacggttacttcgcattcaacatttcaatactcaaaagaaatgaggtatattatctatttaaatgaattcttccagtgaaaatgttaaattaatccttgtacaaaataaaatgacaaagaaacgtaactaaaatgatctaaaacacattaagaactaacaaaataacatttgtttgcctcccagtgaccatattgacttaattttgacagcatgttggaatgccctatagtaaacgcaaattgttgtgaggttttccaaatccttcacattcattcagtggcgtatctgtgaaatattagtattatgattgtgtatgctgcatgtacgactctgctatataaatatatacaagtgcagatctgcaacaacataatttaatgtacgcatctacccagtgaattaaatttaaaacttaacaacaattacattagggcaaaatacaaatagtcttaatcaacttgggtattcttgttttaaaattaacaaacgattagtacttaataaagacgtcataaaaattatagtgtattttcaatttaacaattgtcgcattcaggagccgaaaaagtgacggagctgttccgcaactgttgggaattcgttttctgaatgtggcgctacttgaggaacgtgttacggaacggtcaccatgacagtgagctcattttaattccgctacctccgtctagcgtatgctacttttgtgaatttgtcaatagacttgttgaaagatggcgttatacaggaattatatttgcatcccaaaagcaccatacatatgtgaagtaccagaaacaatagaagatgacaaagaaaaacatagattaatagaggaatatcataatcacccgatgtttggaggacacgtagggaataatagactaataaagaagctaaaagcaagattcagatggagaaattcgtgatatcggacacttcttccaaaccatgggacatagtatacatagatacaagaggtccattcactaaaagtaatgaaggcaatagatactgtatcacaatgttgtgtgaacttacgaaatacgtggtaagtacacgtgtgcaataaagaagctgagacaatagcttttcacgaacaattttcacgatcattttataccaacatacgcactcatgaaacaaataagaacagaccaaggcacaaagtataaaaacgaagtaatgcaggaactaacaaagctgctaaaaatagagcacaa

SEQ ID NO: 4090 - DNA, 2815 bp, Diabrotica virgifera
  SmartBlast Evalue=2E-15; Info=Pol protein n=2 Tax=Drosophila melanogaster RepID=Q8IT54_DROME
attgaacagtttttcagtgaaataaaaaaaatgacgatatttatattggtgtttttttttataaaggcacatagtcataacttgtataaaacagtaaattaaaactgcaaaataacataaacgtaaaaaatatgctttagaaagttgtcaagaactgaattgtctactttttgtataacataataaaatgaaaaaaaaaatccacgaggaaagtaaattcctgtataccataaatcacaaataatagttaaatgttaattaaattcctttataaaatgtatatttataaaaaaatccctaaaaagggctacatcacagaacgttttctgaataatgattccatcatcagtgcttattacaggtcaaaatacatgcccgagtcaccaagatatttgagtaaaaaccctttaaatgttataaagttttaaattgtttacattatgttattaaaaaaggtgtgatgtttaaaatattcctggatttaacctcacgacatcacaggacgctccccacgcgggttgcaatgttcagaggatacaacctcacataacgaacttcaaatggcaacttgtcattagcaaatttaagtctgttatgaggctggatcctctagacatctctggcatgtactttgacctgcacaagcactgatgatggaattgttttattccgaaaacgttctgatatacttagccatttttggggcccttcctcataaatataccttttacaaaggaatttaacgattttttttataataaaatgaatgatctattgaggccattcaactccataggctatttgatagaattcgcgagatttttgttatgttcaagctttaggcccatattattgaaacgatcatttgtctgggaacctaacattttcaggcactaaacgtttatatttcaacattttttatcttatgatttaataacagaaaacaattatatatttggcaaattacaacttaaaataacttaaaaatgcttactagaaagcaatcgataaaaaagtaacatttcatacaggcaataaacaaagtaaattgtttaatcgttatttataatgtactattctacagctttttaggttagatgcatacagtagggcattccaagacttttgacgtttatcacaccgctgggaggcaaactgccaaacattatatttgtttatatttgtaccacattgtgtttcttaagttttttacctttaataatgttttagttgtatttttcaaacattttgttgttaattttgtgtagttttttattgtagaagcacttgaacgactttatttagttttaagcaatgaataaataaacatgtgttactattttcgaaatttgttggtatacaatacagatgttgctagtagattatacaagcaaaagattagcaaagcaaataatatagattcatttccctcagggagtctgagttaacctacagtggagagttttacaagcgtaagtaacatggacatagtaagttatttgtttctgtcccttagatgataacttatttagttcagttttatgcttcaaatcactgttcagcactgatggtaatcgagaaaactgaactttattacggttacttcgcattcaacatttcaatactcaaaagaaatgaggtatattatctatttaaatgaattcttccagtgaaaatgttaaattaatccttgtacaaaataaaatgacaaagaaacgtaactaaaatgatctaaaacacattaagaactaacaaaataacatttgtttgcctcccagtgaccatattgacttaattttgacagcatgttggaataccctatagtaaacgcaaattgttgtgaggttttccaaatccttcacattcattcagtggcgtatctgtgaaatattagtattatgattgtgtatgctgcatgtacgactctgctatataaatatatacaagtgcagatctgcaacaacataatttaatgtacgcatctacccagtgaattaaatttaaaacttaacaacaattacattagggcaaaatacaaatagtcttaatcaacttgggtattcttgttttaaaattaacaaacgattagtacttaataaagacgtcataaaaattatagtgtattttcaatttaacaattgtcgcattcaggagccgaaaaagtgacggagctgttccgcaactgttgggaattcgttttctgaatgtggcgctacttgaggaacgtgttacggaacggtcaccatgacagtgagctcattttaattccgctacctccgtctagcgtatgctacttttgtgaatttgtcaatagacttgttgaaagatggcgttatacaggaattatatttgcatcccaaaagcaccatacatatgtgaagtaccagaaacaatagaagatgacaaagaaaaacatagattaatagaggaatatcataatcacccgatgtttggaggacacgtagggaataatagactaataaagaagctaaaagcaagattcagatggagaaattcgtgatatcggacacttcttccaaaccatgggacatagtatacatagatacaagaggtccattcactaaaagtaatgaaggcaatagatactgtatcacaatgttgtgtgaacttacgaaatacgtggtaagtacacgtgtgcaataaagaagctgagacaatagcttttcacgaacaattttcacgatcattttataccaacatacgcactcatgaaacaaataagaacagaccaaggcacaaagtataaaaacgaagtaatgcaggaactaacaaagctgctaaaaatagagcacaa

SEQ ID NO: 4091 - DNA, 2817 bp, Diabrotica virgifera
  SmartBlast Evalue=0; Info=Malic enzyme n=1 Tax=Aedes aegypti RepID=Q17M99_AEDAE
gccgtgtttcttctagaatagatcctttgattttttttcaagaacaaaatatctgcttctcccccttcccttaatctttcattttattgtaacttgtcaacaggttctcctttttgtaactttagtagcgtcatctaaccatcgagtttaggactagaaggctttttgtttatttgaatttgcgtactgatgattggcaacgtgagtttgcgcggaagtgatggttcttaaattgagaaatgtgggataatataaaggaggggtaccagaatctaacacctttcgtcctcaatgagtatttattgtttgttttattattctttattaaaaacttattttagttcatgtttttatgatgactgaatttacaatatttattaggatggtgtgaaaatttaaaaatagcttttttccataatatttcagcatttttagacagaatgtttgttataattgacaatcaaaaatactgtaggcctacacacaatttgaaactattctcttgcccttcacaataattacagtacttgacacatccactgacagatgacgcgacttacagtacttgaagtatccagtgacaactgacagatgacgtgactgaatccacgtcatactccttaattttccgtcatgaccccgctaaaaatttcgagtgtgtcttaagatttcggccagacttcatcatacataacattatgtacaatcgccaacaaaataaataatctcttaaatataaaacaattaatttatacataaaaaagaaaataatttatcttatatctataatggtggaggatttctatctaaaattttgactaggctttcaatttcgtcggttccattggtctggttttgatgtaaggggggttgggccagggccagatttggggtagggatggttcgtagttgtagttgtattggtggctctcgatatattttctcatgtcttttggtttgggatatactgatgcgatacgttcttggtaggcatattccaatacttcacaagctatctgcatggaacactccttgatcgaacttaggggtggatacaaactacctctcttaaggtcttcatctgaaacgtttttggccactgtttctgaggctatcaagaaaatttgttcgttaatatggtggattcccgcgaggattactcctaaagctactcctgggaagatgtaggcgttgttgccttgacccggttggaaaactttgtccccatagtggactttgccgaagggggaaccactagagaatatcgcacggccctctgtattaacgtacgcctgttcggctgtacattcagctttacttgtcggattactgagagcaaaaataattggtctttcattaaacgcagccatattctttaaaatttccggtgtaaatgcacctgcagcagcagaagcgcctattaatattgacggtttaatttcgttaacaatggcggcaaaatctttgatgggagcgtgatttttggcgtaatacttcttgtggccatccaaaccgccttcgggcctttccaacgctaacaatccgtcgatgtcaaccatccaaattttgtctctggcttcttgttcacttaatccttcattttctaaagctttaaccgtcaaatcggcaatacctatagccgcttctccagctcccaggaacaagaatttgttgtcactgagttttttgtttgtaagtcttttggaagccaataatccagatactgctacactggcagtaccctgaatatcgtcattgaaagtacaatactgttctcggtatttgtaaaggaatctgaaggcattgtggttaccaaaatcttcaaattgaattaaagtgttctgaccataacgtgtcacgattgcttccatgaattcgtccaaaaagtcgtcgtacagtttaccggttgatctcttctggcgaagtccaacatacagaggatcttcaaggagagcctgattattggtgccgacgtctaatactactggtaagcattcatgaggtttaattccagctaaagctgtatataaggccagctttcctacaggaatacccatgccgcaagcaccaagatctccaagacctaagattctttcaccgtctgtgacgactacagctttaacatctggttcgggccaattcttaacaacatcgtacacgtgaccaatgtcattaatcgtaatgaacaaccctctgggtcttctgtaaatcaacccgaacttctggcacgccaacccgacagtaggagtataaacgatgggcatcaatgtttcaatattttcagataacagcctaaaaaacagtttttcgttcctatcctgcaattccgtgaggtagatgtatttgtttagatcttcttggtatctttcgactgatatcctacatagttctagttgctgttcttgggtcttaaaacgggctggctgtagaccgtgtatacctagtgcttgacgttcttctaatgtaaatcctaaccccttattcaaacgtggatcccttagatgttcaattcccatgacttgaccaggagaaataacgtctcctgtgagatgcctcttgtgttggtcttctgcatttatagttcttggtatttggttgagaattgtcttgtgaccagcatttgctgtcactgatctgagtgaccgtggtataaaagacaacatttttaacaagccgacaaaagattcatatgattttttcggagttttaaataaaatttattaacacggttagaagcacaccaaacactggatattttaacacagaattttattggcacaggtagttcgatcgttacgattacatcaccgatcaccg

SEQ ID NO: 4092 - DNA, 2817 bp, Diabrotica virgifera
  SmartBlast Evalue=0; Info=Malic enzyme n=1 Tax=Aedes aegypti RepID=Q17M99_AEDAE
gccgtgtttcttctagaatagatcctttgattttttttcaagaacaaaatatctgcttctcccccttcccttaatctttcattttattgtaacttgtcaacaggttctcctttttgtaactttagtagcgtcatctaaccatcgagtttaggactagaaggctttttgtttatttgaatttgcgtactgatgattggcaacgtgagtttgcgcggaagtgatggttcttaaattgagaaatgtgggataatataaaggaggggtaccagaatctaacacctttcgtcctcaatgagtatttattgtttgttttattattctttattaaaaacttattttagttcatgtttttatgatgactgaatttacaatatttattaggatggtgtgaaaatttaaaaatagcttttttccataatatttcagcatttttagacagaatgtttgttataattgacaatcaaaaatactgtaggcctacacacaatttgaaactattctcttgcccttcacaataattacagtacttgacacatccactgacagatgacgcgacttacagtacttgaagtatccagtgacaactgacagatgacgtgactgaatccacgtcatactccttaattttccgtcatgaccccgctaaaaatttcgagtgtgtcttaagatttcggccagacttcatcatacataacattatgtacaatcgccaacaaaataaataatctcttaaatataaaacaattaatttatacataaaaaagaaaataatttatcttatatctataatggtggaggatttctatctaaaattttgactaggctttcaatttcgtcggttccattggtctggttttgatgtaaggggggttgggccagggccagatttggggtagggatggttcgtagttgtagttgtattggtggctctcgatatattttctcatgtcttttggtttgggatatactgatgcgatacgttcttggtaggcatattccaatacttcacaagctatctgcatggaacactccttgatcgaacttaggggtggatacaaactacctctcttaaggtcttcatctgaaacgtttttggccactgtttctgaggctatcaagaaaatttgttcgttaatatggtggattcccgcgaggattactcctaaagctactcctgggaagatgtaggcgttgttgccttgacccggttggaaaactttgtccccatagtggactttgccgaagggggaaccactagagaatatcgcacggccctctgtattaacgtacgcctgttcggctgtacattcagctttacttgtcggattactgagagcaaaaataattggtctttcattaaacgcagccatattctttaaaatttccggtgtaaatgcacctgcagcagcagaagcgcctattaatattgacggtttaatttcgttaacaatggcggcaaaatctttgatgggagcgtgatttttggcgtaatacttcttgtggccatccaaaccgccttcgggcctttccaacgctaacaatccgtcgatgtcaaccatccaaattttgtctctggcttcttgttcacttaatccttcattttctaaagctttaaccgtcaaatcggcaatacctatagccgcttctccagctcccaggaacaagaatttgttgtcactgagttttttgtttgtaagtcttttggaagccaataatccagatactgctacactggcagtaccctgaatatcgtcattgaaagtacaatactgttctcggtatttgtaaaggaatctgaaggcattgtggttaccaaaatcttcaaattgaattaaagtgttttgaccataacgcgtcacgattgcttccatgaattcgtccaggaagtcgtcgtacagtttaccggttgatcttttctggcgaagtccaacatacagaggatcttcaaggagagcctgattattggtgccgacgtctaatactactggtaagcattcatgaggtttaattccagctaaagctgtatataaggccagctttcctacaggaatacccattccgcaagcaccaagatctccaagacctaagattctttcaccgtctgtgacgactacagctttaacatctggttcgggccaattcttaacaacatcgtacacgtgcccaatgtcattaatcgtaatgaacaaccctctgggtcttctgtaaatcaacccgaacttctggcacgccaacccgacagtaggagtataaacgatgggcatcaatgtttcaatattttcagataacagtctaaagaaaagtttttcgttcctatcctgcaattccgtgaggtagatgtatttgtttagatcttcttggtatctttcgactgatatcctacatagttctagttgctgttcttgggtcttaaaacgggctggctgtagaccgtgtatacctagtgcttgacgttcttctaatgtaaatcctaaccccttattcaaacgtggatcccttagatgttcaattcccatgacttgaccaggagaaataacgtctcctgtgagatgcctcttgtgttggtcttctgcatttatagttcttggtatttggttgagaattgtcttgtgaccagcatttgctgtcactgatctgagtgaccgtggtataaaagacaacatttttaacaagccgacaaaagattcatatgattttttcggagttttaaataaaatttattaacacggttagaagcacaccaaacactggatattttaacacagaattttattggcacaggtagttcgatcgttacgattacatcaccgatcaccg

SEQ ID NO: 4093 - DNA, 3315 bp, Diabrotica virgifera
  SmartBlast Evalue=3E-68; Info=Dak1 protein n=4 Tax=melanogaster group RepID=Q9TW62_DROME
cgtagaaaatttctttattaactgtttttacattttcaatattttaatctgctagttctatcttataacacttttaaaatgatccttaccagtaagtattgctgaaatggtataccattgcaaagtataaaataaactaaaaatttataaaagtgaacatagcagatcaaaactaaaatctacgaacataccactagatagaacacatgaacagttttggaatcttaacattaaatgctaaatgtattcatagtttcatttgcactgtgattaaacattttaattcgacagggaatgctttttccgtataacaaaattacctatacagactagacaaaacatttaccacataaaagtcataaagaaagtaatgacgtaatgctcctatgattatataatgtgaaattgataaacgaatgcgtagatgccagttttgagtagttggtaacctcagttacatacgttcagtacttagttattatacctcgttttttaaataggagcagtaattcaaatttaccgcgccgtaaagcatgtttgtaattggtccatccacaggcaagtttactccactaaattataaaaatttgtcactattgatatttatgaaattttgacattaatgacatttaaaattcataggttaattaagtaatacagtcgaacccgcttattagaatagccttcgtgccaagcaaaaatattcctataaccgggatattctaataaccgatcagtggtggctagcagaaatatatgtaccgaatatacgtcgtaatagtacaacacactttgtagaggtacttactgtatgtacatgtacatagttatacatacatagtatacatacgttatgtacatatattatgtatatggttctatttctttttatgtcaataatacagtacctagtgtaactattacttattttattaaaacaccaaactacattatctgtgcatgcatacctacacaaataagtatgaaatgtatgcaatatgtagatatacgtatacatattattatatattttcttatttacatatatccaacagacttactttttttctggaaaaataatcggtaatctgagactatttgttttgttacataagatattagcgttgattgaaatattaatatgggtccaatacctcaatcaacgatattagtcacttgttgctctaaaattataataaataaaaaattgacattggttttaccctccagaaaatttcagcggttattatattacaaggggttatttatgacttccaactgttaaaattctaaacagacaacgacgtggtggtgagtgagcaataagaatgtttttacacaattgaaaaattaggtacctactttacgatcggtaaatgtttggcggaaggtagaattggtacccataataaagtaagaaataaaatattatcgacaggtcctataaaaccagaaaacataaaaatttttgggaaattgtacctaaaaagtttttggtaacttaggattattagataaagcgggattcttttactaaaacgtatcactataaacggttaaatttattaaggagtaaatggaaatgttccgggatctcaaaattctattccttaaaccgggatattcctataagcggtactctaataagcgggttcgactgtatcggcgatttttttgtgttttctgccattttctttaagttttagatttttagtctgcgtttatttaaaaaacagttgattttagaactttttaccgatgtattagtataatataatatttatggattaccatcgaagacagacatgatcaaccaaaaaaagaagatggatctggttatttttttagtgacattattgggtgtgaatctgtcatttaagattactcctcctatttaaaaaatgaaccatagtatagtacagcaaacgccaaaattatggtgagctatgtgaaataagtttttttcgaatactgaactgtatcgaatgcttggtattcattagtgacgtatctgggagttgttatctcatttgcactcgtcactatgtcattgcaatatatattataagaaataccacataagaaaagtaaaaaatatggaaaatataactcaagagagatagtattttgtaaatagtctaaactaaaaaaatatgactacttcgctttataagggcacactttttattagtcactaaacaagctctatgaagcctacaatatttgacatataaaatacgttataaaaattttataaaaatcattgatgtataaaaaaataagtacaaataatcatgatatttattaataaaaataatatattccacttaagtttaagtaaattgtaaaaaggtttttgcgtacgaattaaataacaaaaatgcccccaattaagtacaacttgagacaacttatatgacagcaaagaattgcattaaaccaaatatgttttgactagtctgaccaacgttttacttattgcaattacacctagtggtctccactgtctcgaaaaagctttttaacttcgtcaaatactttatcttcattttgagtagcatctattttcttcactaagttgaattcatcgtaatggtcgataattggtttactttcattaaggtacacattaaccctcttcttcaaactttcttcgttatcatccgatcgaccactacctgatgctcctcttgcaagacatctgttgaggcatatttccaaaggacagtcgaagaacaaaacaaattctaagtttactttatcggccacctgcctattccaaccatctaggttgtctttgttcctagggaaaccgtcgataagaaatttttccttgcctgatttttccatggctttttctaagaggctgcaagttatctcaacaggaacaattttaccttctttaatgtaactctctatgagttccccatactgtgatccagggttgtttctttcttcccttaacagatcgccggcagataaatgggtatagccgaaagtctcgactattttctggctttgggtgccttttccggcccctgggccccctaatacgaacacaactttaggtttcatggtatgaaatccaactgaagcaaatgttctcactgctagagtaccaatgccaaataatgacataaacataacctcacattgtaatcgactttttaagattgatgatttggcggttacgtaattaaatgaaattgtctcagtgataacgatttccgatattgagagtcatgtacttttatgtcttccaatgaaaatttatattttccatacacctttttaaaaacacgttttccgatttat

SEQ ID NO: 4094 - DNA, 2290 bp, Diabrotica virgifera
  SmartBlast Evalue=2E-68; Info=Dak1 protein n=4 Tax=melanogaster group RepID=Q9TW62_DROME
cgtagaaaatttctttattaactgtttttacattttcaatattttaatctgctagttctatcttataacacttttaaaatgatccttaccagtaagtattgctgaaatggtataccattgcaaagtataaaataaactaaaaatttataaaagtgaacatagcagatcaaaactaaaatctacgaacataccactagatagaacacatgaacagttttggaatcttaacattaaatgctaaatgtattcatagtttcatttgcactgtgattaaacattttaattcgacagggaatgctttttccgtataacaaaattacctatacagactagacaaaacatttaccacataaaagtcataaagaaagtaatgacgtaatgctcctatgattatataatgtgaaattgataaacgaatgcgtagatgccagttttgagtagttggtaacctcagttacatacgttcagtacttagttattatacctcgttttttaaataggagcagtaattcaaatttaccgcgccgtaaagcatgtttgtaattggtccatccacaggcaagtttactccactaaattataaaaatttgtcactattgatatttatgaaattttgacattaatgacatttaaaattcataggttaattaagtaatatcggcgatttttttgtgttttctgccgtttttctttaatttttagatttttagtctgcgtttatttaaaaaacagttgattttagaactttttaccgatgtattagtataatataatatttatggattaccatcgaagaccgacatgatcaaccaaaaaagaagatgatctggttattttgtagtgacattattgggtgtgaatctgtcgtttaagattactcctcctatttaaaaaatgaaccatagtatagtacagcaaacgccaaaattatggtgagctatgtgaaattactttttttcgcatactgaactgtatcgaatgcttggtattatctcattatctcatttgcactcgtcactatgtcattgcaatatatattataagaaataccacataagaaaagtaaaaaatatggaaaatataactcaagagagatagtattttgtaaatagtctaaactaaaaaaatatgactacttcgctttataagggcacactttttattagtcactaaacaagctctatgaagcctacaatatttgacatataaaatacgttataaaaattttataaaaatcattgatgtataaaaaaataagtacaaataatcatgatatttattaataaaaataatatattccacttaagtttaagtaaattgtaaaaaggtttttgcgtacgaattaaataacaaaaatgcccccaattaagtacaacttgagacaacttatatgacagcaaagaattgcattaaaccaaatatgttttgactagtctgaccaacgttttacttattgcaattacacctagtggtctccactgtctcgaaaaagctttttaacttcgtcaaatactttatcttcattttgagtagcatctattttcttcactaagttgaattcatcgtaatggtcgataattggtttactttcattaaggtacacattaaccctcttcttcaaactttcttcgttatcatccgatcgaccactacctgatgctcctcttgcaagacatctgttgaggcatatttccaaaggacagtcgaagaacaaaacaaattctaagtttactttatcggccacctgcctattccaaccatctaggttgtctttgttcctagggaaaccgtcgataagaaatttttccttgcctgatttttccatggctttttctaagaggctgcaagttatctcaacaggaacaattttaccttctttaatgtaactctctatgagttccccatactgtgatccagggttgtttctttcttcccttaacagatcgccggcagataaatgggtatagccgaaagtctcgactattttctggctttgggtgccttttccggcccctgggccccctaatacgaacacaactttaggtttcatggtatgaaatccaactgaagcaaatgttctcactgctagagtaccaatgccaaataatgacataaacataacctcacattgtaatcgactttttaagattgatgatttggcggttacgtaattaaatgaaattgtctcagtgataacgatttccgatattgagagtcatgtacttttatgtcttccaatgaaaatttatattttccatacacctttttaaaaacacgttttccgatttat

SEQ ID NO: 4095 - DNA, 2708 bp, Diabrotica virgifera
  SmartBlast Evalue=0; Info="Aconitase, mitochondrial n=4 Tax= Culicidae RepID=Q17EL3_AEDAE"
agcgcagtttgcaaaatcgggcaaattccaaaaaaaaattggaggttatttattaagtgattatcagcaattcaaaccacttgatcgcggctagagaggcccgagcagtggaaagttcaaattttgtatttttataaaaaaagttcgtcgtgaatatataaccatggcctcctgtattcgaattataagtcgaacgagtaactccaaaagtctcatgttcagtgagatccaatcaagatgttttcacgtttcacccctggctgctgctgcagctaaggttgcgatgagcaaattggatactgatccaattccatacgagaaattaaacaaaactcttggggtagtcaagaagaggttaggaagaccattaactctttctgaaaaagtcttatactcccacattgatcaaccagagtcccaggatattcaacgaggtacctcttacttaaggttacgtcctgaccgtgttgctatgcaagatgccaccgcccaaatggctatgttgcaattcatctccagtggtctgaagagagtcgccgttcctagcaccatccactgtgaccatcttatcgaagcacaaattggtggacctcaggatcttgctagagctaaagatatcaataaagaagtatacaactttttggcctcggctggaaacaagtatggtgttggtttctggaagccaggatcaggtattatccatcaaatcatcttggaaaactatgccttccccggacttttgatgatcggtactgactcccacacaccaaatggaggtggtcttggtggactctgcattggtgttggaggagctgacgctgttgatgtcatggcaaacatcccttgggaattgaaatgtccaaaagttattggtgtcaaactaactggtaaactttctggttggacttcccccaaggacatcattttgaaggtagctgacattttaactgtcaaaggtggtactggagccatcatcgaataccacggtcctggatgtgagtcggtatcttgtactggtatggcaactatctgcaacatgggtgctgaaatcggtgctactacatctctattccccttcaacaatagaatggctgattatctgtctgctactcgcagaggagacatcgccaatgaagctcagaaatacaaggaatccttactatcacctgacaaaggtgccgaatacgacgaactcatcgaaatcaacctcgacaccttggaaccccacgtcaacggtcccttcactcctgatctagccagtccaatcagcaaactcggagccaacgccaacaagaacggttggccagtagacatcagagttggcttgatcggttcctgtaccaacagctcatacgaagacatgggaagatgtgccagcatcgccaaagaagctatgaaacacggcatcaaatccaaaattccattcaatgtcactcctggatcagaacagattcgagctactatcgaaagagacggaatttctaagactcttaccgaatttggaggcactgtactagctaacgcttgtggaccttgtattggtcaatgggacagaaaagatgttaagaaaggagagaaaaataccatcgtaacatcatacaatcgtaactttacgggacgtaacgatgctaaccccgcaactcactgctttgttacatctccagaacttgtaactgccttaagtatcgctggaagactcgacttcaaccccttaaccgactcactaaaaggttctgatggcaagagcttcaaactgactgcaccattcggggacgaactccccagcaaaggattcgaccccggccaggacacctacgcagccccagttgccgacggttccaacgtaaaggtcgacgttgatgtcaaatctcagaggctacaattgttggaacccttcgataaatgggacggaaaagatttggatgacatgaccattctgattaaagtcaaaggaaagtgcacaaccgatcacatctcagcagctggaccttggttgaaataccgtggtcatcttgataacatctcaaacaatatgttcattacagcaacaaatgccgagaacggtgaactaaacaaaatcaagaaccaaacgaccggtcaatggggcgctgtaccagacgtagcccgtgattataaagccaaaggtattagatgggtaaccattggagacgaaaactacggagaaggtagctccagagagcacgccgctttggaaccaaggcatctgggtggccgcgccatcatcgtcaaatccttcgcccgtatccacgaaaccaaccttaagaaacagggtatgttacctctcaccttcgccaacgccagcgactacgataagattcagcccacagataaaatcagcttgaaagatcttaagaatcttagccctggaaaacccgtagactgcgaagttaagcatgcagatggatcagttgataaaattaagctaaatcactcaatgaacgatcttcagattagttggtttagagcaggtagtgcattgaatcgtatgaaggagattgctgcaggaaagtgaagagaatcaccataatttttaattgtatttaatattatttatacatgtaggtagaagaaacatcgtcatcgaacggttgcatgtaagctgaaaactgtgtttgttattatgtaaaaagtatttttatgtagatgctaaatattccttctaataaatatagacaataattcttaaa

SEQ ID NO: 4096 - DNA, 2708 bp, Diabrotica virgifera
  SmartBlast Evalue=0; Info="Aconitase, mitochondrial n=4 Tax= Culicidae RepID=Q17EL3_AEDAE"
agcgcagtttgcaaaatcgggcaaattccaaaaaaaaattggaggttatttattaagtgattatcagcaattcaaaccacttgatcgcggctagagaggcccgagcagtggaaagttcaaattttgtatttttataaaaaaagttcgtcgtgaatatataaccatggcctcctgtattcgaattataagtcgaacgagtaactccaaaagtctcatgttcagtgagatccaatcaagatgttttcacgtttcacccctggctgctgctgcagctaaggttgcgatgagcaaattggatactgatccaattccatacgagaaattaaacaaaactcttggggtagtcaagaagaggttaggaagaccattaactctttctgaaaaagtcttatactcccacattgatcaaccagagtcccaggatattcaacgaggtacctcttacttaaggttacgtcctgaccgtgttgctatgcaagatgccaccgcccaaatggctatgttgcaattcatctccagtggtctgaagagagtcgccgttcctagcaccatccactgtgaccatcttatcgaagcacaaattggtggacctcaggatcttgctagagctaaagatatcaataaagaagtatacaactttttggcctcggctggaaacaagtatggtgttggtttctggaagccaggatcaggtattatccatcaaatcatcttggaaaactatgccttccccggacttttgatgatcggtactgactcccacacaccaaatggaggtggtcttggtggactctgcattggtgttggaggagctgacgctgttgatgtcatggcaaacatcccttgggaattgaaatgtccaaaagttattggtgtcaaactaactggtaaactttctggttggacttcccccaaggacatcattttgaaggtagctgacattttaactgtcaaaggtggtactggagccatcatcgaataccacggtcctggatgtgagtcggtatcttgtactggtatggcaactatctgcaacatgggtgctgaaatcggtgctactacatctctattccccttcaacaatagaatggctgattatctgtctgctactcgcagaggagacatcgccaatgaagctcagaaatacaaggaatccttactatcacctgacaaaggtgccgaatacgacgaactcatcgaaatcaacctcgacaccttggaaccccacgtcaacggtcccttcactcctgatctagccagtccaatcagcaaactcggagccaacgccaacaagaacggttggccagtagacatcagagttggcttgatcggttcctgtaccaacagctcatacgaagacatgggaagatgtgccagcatcgccaaagaagctatgaaacacggcatcaaatccaaaattccattcaatgtcactcctggatcagaacagattcgagctactatcgaaagagacggaatttctaagactcttaccgaatttggaggcactgtactagctaacgcttgtggaccttgtattggtcaatgggacagaaaagatgttaagaaaggagagaaaaataccatcgtaacatcatacaatcgtaactttacgggacgtaacgatgctaaccccgcaactcactgctttgttacatctccagaacttgtaactgccttaagtatcgctggaagactcgacttcaaccccttaaccgactcactaaaaggttctgatggcaagagcttcaaactgactgcaccattcggggacgaactccccagcaaaggattcgaccccggccaggacacctacgcagccccagttgccgacggttccaacgtaaaggtcgacgttgatgtcaaatctcagaggctacaattgttggaacccttcgataaatgggacggaaaagatttggatgacatgaccattctgattaaagtcaaaggaaagtgcacaaccgatcacatctcagcagctggaccttggttgaaataccgtggtcatcttgataacatctcaaacaatatgttcattacagcaacaaatgccgagaacggtgaactaaacaaaatcaagaaccaaacgaccggtcaatggggcgctgtaccagacgtagcccgtgattataaagccaaaggtattagatgggtaaccattggagacgaaaactacggagaaggtagctccagagagcacgccgctttggagccaaggcatctgggtggccgcgccatcatcgtcaaatccttcgcccgtatccacgaaaccaaccttaagaaacagggtatgttacctctcaccttcgccaacgccagtgactacgataagatccagcccacagataaaatcagcttgaaagatcttaagaatcttagccctggaaaacctgtagactgcgaggttaaacatgccgatggttcagttgataaaattaagctaaatcactcaatgaacgatcttcagattagttggtttagagcaggtagtgcattgaatcgtatgaaggagattgctgcaggaaagtgaagagaatcaccataatttttaattgtatttaatattatttatacatgtaggtagaagaaacatcgtcatcgaacggttgcatgtaagctgaaaactgtgtttgttattatgtaaaaagtatttttatgtagatgctaaatattccttctaataaatatagacaataattcttaaa

SEQ ID NO: 4097 - DNA, 2702 bp, Diabrotica virgifera
  SmartBlast Evalue=4E-86; Info=Mitochondrial carrier protein n=1 Tax=Aedes aegypti RepID=Q17MG7_AEDAE
gatgattatttatttttacaagatgggtaaccttaaattaaatgttaacttaaattaacactatcttaggtacaacaaaagtatggttaagtaaaaaagaacgatttgaaatttgcaaatttggtgatccaatatgaatgggggagtactttctcacaggagtatcaactggaaagagtttgcttgtggatggggagcagcccttataaatgtatccgtcacttatccaatcaataaattaatctttagacagatcctccatggcacaaaaatatacccagctttcttacaactacgaagcgaaggtatccactacctctacagagggatccttccaccactatgtcaaaaaacattatccttgtcgataatgttcggagtatacgaggaagtcaaaagacctttgatacagctaggattcaatccgtacggtgctaaagctataggcgcactagtatcaggaacaacagaagtcatactgatgccctttgaacgagtacaaaccattttagcagattctaaacatcacacagactttaggaacactttacacgtatttagggaattaggcaaattcgggatcagggaatactatcggggattagtgccgatcatacttagaaacgggccttcaaatgtgggcttttttatattacgggaagagatgcaagaacggttcccgaagtaccaaaacgagtttttaaggacatctttagaatttttatgtggtgcaatgattggggtgatactctccacggtgttttatcctttaaacgtattaaaaattagaatgcagagcaaaataggcggctcgttcgagaatccttggagggtactcttagatatttacaacgaaagaggcgggaaagttagatatatttactacggggtgcaggcgaactataccagggcctttattagttggggggtcatgaatactgcctacgaacacctcaaatctatggttaatgaagtttaagattataaacgtttttgtgatgtgataaaatttttaaaagacgcattaaatgaagtattttttcgctgatcgaacaacaatattaacaaaacgaaaataactggaaatatttatttctgcgttttgtggaaataaacagttcctaattaatatcccagtggagtttgttacgaataacttgtaaaactaaataaggtgaacatagtatgtatttttcaatggaacaatcgatcagcgaaaaaataatatgtatatctcgtggtaaatacaacatttctgaagatctggtccttggttctgagtaatcttcttgtcacagaacgtacagtgcaccacgtcatggatcaaggggattccatcccaaaaagagatcccaaagacaccgtagaatggcaaagacttttccaaaagatgatccttcaaaatatgtcaactaacggcgttcataggttacaatgcagttatgactcacctggtaagaatggcagagagcctcattataatctaaaacattttcggtcgcattcaggaactcatagactccagagaaccaccttcgggggcattcttcaacaatgtgacgagacagtctgttgttgcgcaccacattcagaagtaagggcttttccccatctgtgtaagctgttagcacttctatcagtgtttattcttattatgttcagagttggcatgtattgcgaggcagttcgaagacagacagtttgtgatcaatacaggccatttggtgtacttcctgtggtgagacacaatcccattgtcttctccaggcgttggtgaggctgaaacgttgctaatttgaagaggtgtcctttaacaatggaggatatctggaactaagtcttcgtttcgatatcaagcttgtcatggtggatgggtatcccaccgctgccaccatgttctgttaaataaaagggttcttagactttatcaggtttattgaactcaatataaaacagtcaggttaggagagatgagatctgccatcggcgtattagtgactgacttggcgtattagtgactgactttactacttacagagttgccagattgtgccgatagtagaatagttagcttggatttttctgtataagagaatggcttcttcgtagtttcggaggtaggatatgactcagaatatgaagccaatagttagttgttaatctaattatacctgaaatcattcgcattgtctggtttaattggatggcaacaatcttcgtgtgtttgttgttgagccatactggggaagctgtctagactgtctagaaatcatccagctatttcctagcatatttgccacactgaggtaaacattctaaatggattttatcggaaccgggtgcctgtccagacttaatttctgatattgctgacgtgatttcttcttgagtaaactagccagagtattcagatatgggtgggtgtgcagacttttcagttcttattatacttaaggacgatgcttttcttctcgatttacttaagtttagtttttccacagtctgtagataacaaaactgtctttagataacaaaaaaccgaagaaaattaatttcacagttttttgttttgttggcagaaaatacaaattatatgcaaggacgcatacaaaaaccacttaatattctgaatcagattgttctctttattcctcgcttccctttgatatatgggacattaaatttgcaaactaatacgtgga

SEQ ID NO: 4098 - DNA, 2688 bp, Diabrotica virgifera
  SmartBlast Evalue=4E-86; Info=Mitochondrial carrier protein n=1 Tax=Aedes aegypti RepID=Q17MG7_AEDAE
gatgattatttatttttacaagatgggtaaccttaaattaaatgttaacttaaattaacactatcttaggtacaacaaaagtatggttaagtaaaaaagaacgatttgaaatttgcaaatttggtgatccaatatgaatgggggagtactttctcacaggagtatcaactggaaagagtttgcttgtggatggggagcagcccttataaatgtatccgtcacttatccaatcaataaattaatctttagacagatcctccatggcacaaaaatatacccagctttcttacaactacgaagcgaaggtatccactacctctacagagggatccttccaccactatgtcaaaaaacattatccttgtcgataatgttcggagtatacgaggaagtcaaaagacctttgatacagctaggattcaatccgtacggtgctaaagctataggcgcactagtatcaggaacaacagaagtcatactgatgccctttgaacgagtacaaaccattttagcagattctaaacatcacacagactttaggaacactttacacgtatttagggaattaggcaaattcgggatcagggaatactatcggggattagtgccgatcatacttagaaacgggccttcaaatgtgggcttttttatattacgggaagagatgcaagaacggttcccgaagtaccaaaacgagtttttaaggacatctttagaatttttatgtggtgcaatgattggggtgatactctccacggtgttttatcctttaaacgtattaaaaattagaatgcagagcaaaataggcggctcgttcgagaatccttggagggtactcttagatatttacaacgaaagaggcgggaaagttagatatatttactacggggtgcaggcgaactataccagggcctttattagttggggggtcatgaatactgcctacgaacacctcaaatctatggttaatgaagtttaagattataaacgtttttgtgatgtgataaaatttttaaaagacgcattaaatgaagtattttttcgctgatcgaacaacaatattaacaaaacgaaaataactggaaatatttatttctgcgttttgtggaaataaacagttcctaattaatatcccagtggagtttgttacgaataacttgtaaaactaaataaggtgaacatagtatgtatttttcaatggaacaatcgatcagcgaaaaaataatatgtatatctcgtggtaaatacaacatttctgaagatctggtccttggttctgagtaatcttcttgtcacagaacgtacagtgcaccacgtcatggatcaaggggattccatcccaaaaagagatcccaaagacaccgtagaatggcaaagacttttccaaaagatgatccttcaaaatatgtcaactaacggcgttcataggttacaatgcagttatgactcacctggtaagaatggcagagagcctcattataatctaaaacattttcggtcgcattcaggaactcatagactccagagaaccaccttcgggggcattcttcaacaatgtgacgagacagtctgttgttgcgcaccacattcagaagtaagggcttttccccatctgtgtaagctgttagcacttctatcagtgtttattcttattatgttcagagttggcatgtattgcgaggcagttcgaagacagacagtttgtgatcaatacaggccatttggtgtacttcctgtggtgagacacaatcccattgtcttctccaggcgttggtgaggctgaaacgttgctaatttgaagaggtgtcctttaacaatggaggatatctggaactaagtcttcgtttcgatatcaagcttgtcatggtggatgggtatcccaccgctgccaccatgttctgttaaataaaagggttcttagactttatcaggtttattgaactcaatataaaacagtcaggttaggagagatgagatctgccatcggccttgacgtattagtgactgactttactacttacagagttgccagattgtgccgatagtagaatagttagcttggatttttctgtataagagaatggcttcttcgtagtttcggaggtaggatatgactcagaatatgaagccaatagttagttgttaatctaattatacctgaaatcattcgcattgtctggtttaattggatggcaacaatcttcgtgtgtttgttgttgagccatactggggaagctgtctagactgtctagaaatcatccagctatttcctagcatatttgccacactgaggtaaacattctaaatggattttatcggaaccgggtgcctgtccagacttaatttctgatattgctgacgtgatttcttcttgagtaaactagccagagtattcagatatgggtgggtgtgcagacttttcagttcttattatacttaaggacgatgcttttcttctcgatttacttaagtttagtttttccacagtctgtagataacaaaactgtctttagataacaaaaaaccgaagaaaattaatttcacagttttttgttttgttggcagaaaatacaaattatatgcaaggacgcatacaaaaaccacttaatattctgaatcagattgttctctttattcctcgcttccctttgatatatgggacattaaatttgcaaactaatacgtgga

SEQ ID NO: 4099 - DNA, 2671 bp, Diabrotica virgifera
  SmartBlast Evalue=1E-137; Info=Toll-like protein n=1 Tax= Tribolium castaneum RepID=D6WCW7_TRICA
gaactgagcatcaactccatcagtgatatagaagaagactgttttgcagatctcaccgaacttaaaactataaatctgggacataacaagctaagtaaccttcatccatcgatttttaaatataacacaaaattggccagtatccgattggaacataatccgttcttgattctaccagaacggatatttgcaggttttccagatctatccaacattagtataaggaatacgggtacagctattcttactgaagatatttttgcaaattcgtctcaaataaccgtactgggtttgcatgagaacaaacttcaagagttatcacctaatgtattcaagggcttaaagaaattgaagacattggatttaagcaaaaatcaaatcaagtctttgcccgatagtttgttttcggattcacttgcattagatatgctcaatctggactttaatagcattactaaaatttccaatgaattattttcgacaacaaagaatttatcgacacttacgataagacataataatctaaactatatcgaaacacgcgcatttgttcaattggaccaactgagaaccctggatttgtcatacaatcaattgactctagtttatatacccgggcagtcacctatacctgctttgctctcactagaatcactcattttaaggaacaaccaaattaaagattttcccgatcttgggcatttgcaatatcttcagaatgtagatgtgagtttcaatcaactgcaaattcttaggattgaagaccttgtcgtgaacacaaggcaatcgctaggtttcgttgatttacaaaacaacaaaattcaagaagtagattttggaacattgaatattacgatgagtaatactgaattacaatacaagttaattgaaagattttctcccaataataagtaccttcaaatgaaagtagatttgagaaagaatcctatattgtgtgactgctcagtctacaatttagttcgatattaccaaaatgacatgtatccagctgtacgctcacgaatagatctcaacataaacggaatcgtttgtgacaaatctaccttattccaagacgttctggtgactcacctgaaaccagatgatatatcgtgtgaggtttctagcatcagttgtccaaagaagtgtttctgtttgtggcattatcattcagattctgttcatgtcaattgttcaaacaggaatttgacgcagttcccaacgttaacaatcagggataacaaaatcaagcttgatttggatggcaactacattgaaggtggccttaattccagtatgggatatgaaaatgttacggaattaattttatcaaataatcgtatacacgacttaaaatggataccaatgggaattgagaaactcaacttacaacacaatagcctgactcacattgactctgaacttttcaaaattattaatagcacaaagagtctaaataaattggaattggcgtataatccttggtcatgtggatgctctgcttttgatctacaactgtttctacaaaatcgctacacaattgtaaattcaacagacgttttttgtcagaaggaaaagcagtatctagttaaaaaagctgacctgtgtaaaacatcttcagctctcattctgtcgatagtattcccgattgtagccttcctgattttaacaatagtaacgcttgtattatacatctattacaggcaggaagttaaagtttggttatatgccaagaatatctgtttatggtttgttactgaagaagagcttgacgaagataaagaatatgatgtctttttaagttacgcacaccaagatgaagaatttgtcctccacaatctacttccagttcttcaaccactcagaacttgcattcacatcagagattggaaacccggtgagacgatattgacgaatgttgagtattccgttatgaattctagaagaaccttggtggttctctcgaataacttcttagacagcgtttggggcatacaagaatttaaaactgcacatactcaagctatcaaggaaggacgtgctagagtgatcgtagtgaaatatggcgaacttgataaaagcaggttggatgtagatataggggcatatctaataccaacacctacgtagaatggggaaagccgtggttctggaataagcttaattacgctttacctcaccgccgagaaaatgaatcctgtaagtcaaatcaaaataacactagtatcatgttgaaaattgatgacaaatttttactgaataatcctcctgtgaaccatgctgaaagtactgctcccgttataactttggacccggctgtactaaacgttcaaaacggtagtgacttgcacatttcttcttctaaaactccactagttggtagtggggttttattcggttggtatctatctatttttatcttatatttttatctagttttgtaccaatcgaataaataggatatataaagactacactcaatataaagatgaattcagacagatggtgtaaatatgatgaaaagttgctcatttcctctcattgtaaaaaaatgtaatcatgataaatgtacaaatttattgcataaatattgataagctgactgtatcgtagttaagtaaattgtgttttatatgcaccaattttatatttttgcttgtccgtttataca

SEQ ID NO: 4100 - DNA, 2656 bp, Diabrotica virgifera
  SmartBlast Evalue=1E-142; Info=Toll-like protein n=1 Tax= Tribolium castaneum RepID=D6WCW7_TRICA
gaactgagcatcaactccatcagtgatatagaagaagactgttttgcagatctcaccgaacttaaaactataaatctgggacataacaagctaagtaaccttcatccatcgatttttaaatataacacaaaattggccagtatccgattggaacataatccgttcttgattctaccagaacggatatttgcaggttttccagatctatccaacattagtataaggaatacgggtacagctattcttactgaagatatttttgcaaattcgtctcaaataaccgtactgggtttgcatgagaacaaacttcaagagttatcacctaatgtattcaagggcttaaagaaattgaagacattggatttaagcaaaaatcaaatcaagtctttgcccgatagtttgttttcggattcacttgcattagatatgctcaatctggactttaatagcattactaaaatttccaatgaattattttcgacaacaaagaatttatcgacacttacgataagacataataatctaaactatatcgaaacacgcgcatttgttcaattggaccaactgagaaccctggatttgtcatacaatcaattgactctagtttatatacccgggcagtcacctatacctgctttgctctcactagaatcactcattttaaggaacaaccaaattaaagattttcccgatcttgggcatttgcaatatcttcagaatgtagatgtgagtttcaatcaactgcaaattcttaggattgaagaccttgtcgtgaacacaaggcaatcgctaggtttcgttgatttacaaaacaacaaaattcaagaagtagattttggaacattgaatattacgatgagtaatactgaattacaatacaagttaattgaaagattttctcccaataataagtaccttcaaatgaaagtagatttgagaaagaatcctatattgtgtgactgctcagtctacaatttagttcgatattaccaaaatgacatgtatccagctgtacgctcacgaatagatctcaacataaacggaatcgtttgtgacaaatctaccttattccaagacgttctggtgactcacctgaaaccagatgatatatcgtgtgaggtttctagcatcagttgtccaaagaagtgtttctgtttgtggcattatcattcagattctgttcatgtcaattgttcaaacaggaatttgacgcagttcccaacgttaacaatcagggataacaaaatcaagcttgatttggatggcaactacattgaaggtggccttaattccagtatgggatatgaaaatgttacggaattaattttatcaaataatcgtatacacgacttaaaatggataccaatgggaattgagaaactcaacttacaacacaatagcctgactcacattgactctgaacttttcaaaattattaatagcacaaagagtctaaataaattggaattggcgtataatccttggtcatgtggatgctctgcttttgatctacaactgtttctacaaaatcgctacacaattgtaaattcaacagacgttttttgtcagaaggaaaagcagtatctagttaaaaaagctgacctgtgtaaaacatcttcagctctcattctgtcgatagtattcccgattgtagccttcctgattttaacaatagtaacgcttgtattatacatctattacaggcaggaagttaaagtttggttatatgccaagaatatctgtttatggtttgttactgaagaagagcttgacgaagataaagaatatgatgtctttttaagttacgcacaccaagatgaagaatttgtcctccacaatctacttccagttcttcaaccactcagaacttgcattcacatcagagattggaaacccggtgagacgatattgacgaatgttgagtattccgttatgaattctagaagaaccttggtggttctctcgaataacttcttagacagcgtttggggcatacaagaatttaaaactgcacatactcaagctatcaaggaaggacgtgctagagtgatcgtagtgaaatatggcgaacttgataaaagcaggttggatgtagatataggggcatatctaataccaacacctacgtagaatggggaaagccgtggttctggaataagcttaattacgctttacctcaccgccgagaaaatggattctgcaagtcaaatcaaaaacacgctagtatcatgttgaagattgatgacaaattcgtgctgactagtcctcctgtgaaccacgctgagagtactcctcccgttataactctggacccggccgtgcttaaaaatcatcctttgaactttcaaaaaggtagtgacttgcatatttcttcctctgaaactccactagttgttagtgtgtgattgatttttatctagttttgtaccaatcgaataaataggatatataaagactacactcaatataaagatgaattcagacagatggtgtaaatatgatgaaaagttgctcatttcctctcattgtaaaaaaatgtcaatcatgataaatgtacaaatttattgcataaatattgataagctgactgtatcgtagttaagtaaattgtgttttatatgcaccaattttatatttttgcttgtccgtttataca

SEQ ID NO: 4101 - DNA, 2639 bp, Diabrotica virgifera
  SmartBlast Evalue=1E-33; Info="Leucine-rich transmembrane protein, putative n=1 Tax=Aedes aegypti RepID=Q17K70_AEDAE"
tgataacataatttttatttaataaaaaacaaaaacaacatattatttttaaactaatagatatgtaacaactgtttataaatatctacgagataattacatatataaaatttccaattaaacacattgaatacataatctgtgggacttttagaggtcaacaataattatttacaaatctttatttatttatatttacgtgctcggcaactatggctactcgcacagggcgattataaacaagattacaagaggtataatagcattaacaagtaatgtctaaacaaatttaaagtttatgatacaatgatatattttttgaaaaactgattaaccctgtcaaactggttggcatcacttagaatatcacatagctgcatacattaaaataaagacaacgagactatttgtatatacataacaacagacaaataaatttctgaaaaatacattttgcaggcaaatcaaaaaatttttcttatttgaaaaaaaaaaggaaatctacaacaatttaaaaagttaaaacaatattattaatatttatctaataatttaaaaatactacgtttttacagtaaaaatgtacaaaaatgtttaatatacatgcagtcttaaatttatagttttgtacttaatattcgacttgacctccatatgttgacctaaccaaattgtttaaagtttcactattatatctgtttaagtcagctccagcagtgacgtataaattgatatgttttgaattggaactaactggcacatgtagattgttaaagcttaaatcaatcaaattcagccccttaacatcttcaaaagcgttttcttctacgctggaaatctggtttttgggcaaaccaatgaaaccgatttctgcgcccttaaatgtatctcttttaatggccgttaaggagttattgtgaagtttcaatgaaagtaagataactttactgaatgagttaggtgcaatattagaaatcccgttattgtcaagacttagttctaaatatttgttgtttagtgttcccaaagaagtaggtgttaaatcgccaattttgttgcttccaagtttcaggttacgaagctcttctgtatcatcaaaactgccttcttcgattttagagatcaagttaccagtaagggagatagttgtgaatgagagaccattgaaaactcccttgccgatttgaaccaactgattgttattaatggaaagagcagatattttagagcctgcaaaattgtttgggttgagtgctttaattaagttgttgtccaagttaagatcgtacaaatgatctaagtggctaaacagatttgtaatatcttcaattcggttattactgaggtctagactagtcaagccattaatttgatggaaagtagtatcttcaattttacttatttggtttttatctaatttaacattactgatattagccccaaagaacatttcttctgtaagagtactcagagaattttcggaaagcgtaagactgtttaaaaccagatcttcaagtgccccatcttcaattttagaaattttgttttttgctaaatttatggagttgaaattctttttgtttaggactccttttttaataatttcaattttattttcttgtaactctaatccattaataacaatttcgtcaaatgctccaggctctacattatcgatgttgttattgtctaaagacaaagttgtttgttgtgagttgatacctttaaggaattttggtttcaaattgccaatcttgttgtgtgagagaataatcgagtaaagtccgggttgatcagcaaaagcgtcactagcaattaccgaaatgtcattgttgctaagattcaaataattcaaatttaagccattaaaagaatttggttttaactcttttatatagttatcttgaagatgtaatgagtttagcctggaaccagcaaaactatttgattcaataacttcaattttattgttgcccaagttaaggtcaattacagtatccaacttagagaaacttcctccaagatctttaataagattgttacttaattgaacgtaaaataaacttggtatctgatttaaagcattaacttcaattttttgaattttgttattgttcaaatctaagcttgtcactttagtattatgaaatgtacctgcagtaattttttcaagattgttgtcgctcaggtggagagaattcacatccaatgtgtcgaaagcatcatcctcgatggtagaaatctggttgttggatagatcaagctcccataatgacctgtcgttgaagacgccttttttaatagtttcaatgtcattgttgggaaactcaattcggttgatgtgggctccctgtagcgcaccgggctcgatgtcttttaattcgtcatgtttgagttttagttcgctgatagtcacaccatctaacgctccactaggtagtttaggtatggtctggttttcaatttctaccctgtaggttgtattagcgataacactctttaggttttcgattgatggaataactgcttcttctgattcccaataactagagtaaacatttaccgtaatttcactttgcacgtaggcaaaaaatgccactaacaccaaaaataacagtttcgacaccattgttactgac

SEQ ID NO: 4102 - DNA, 2635 bp, Diabrotica virgifera
  SmartBlast Evalue=6E-32; Info="Leucine-rich transmembrane protein, putative n=1 Tax=Aedes aegypti RepID=Q17K70_AEDAE"
tgataacataatttttatttaataaaaaacaaaaacaacatattatttttaaactaatagatatgtaacaactgtttataaatatctacgagataattacataaataaaatttccaattaaacacattgaataaataatctgtgggacttttagaggtcaacaataattatttacaaatctttatttatttatatttacgtgctcggcaactatggctactcgcacagggcgattataaacaagattacaagaggtataatagcattaacaagtaatgtctaaaaaatttaaagtttatgatacaatgatattttcaaaaactgattaaccctgtcaaactggttggcatcacttagaatatcacatagctgcatacattaaaataaagacaacgagactatttttatatacataacaacagacaaataactttctgaaaaatacattttgcaggcaaatttaaaaatttttcttatttgaaaaaataagaaaatctacaataatttaaaaaaataaaacagtattattaatattcatctaataatttaaaaatactacgtttttacagaaaaatatacaaaaatgtttaatatacaagcagtcttaaatttatagttttgtacttatcattcgacgacttgacctccatatgttgacctaaccaaattgtttaaagtttcactattatatctgtttaagtcagctccaacagtgacgtataaattgatatgtcttgaattggaactaactggcacatgtagtttgttaaagcttaagtcaatcaaattcagccctttaacatcttcaaaagcgttttcttctacgctggaaatctggtttttgggcaaaccaatgaaaccaatttcggcacccttaaatgtatctcttttaatggccgttaaggagttattgtgaagtttcaatgaaagtaatgtaactttactgaatgagttgggtgcaatattagaaatctcgttatcgtcaagacttagttctaaatctttgttgtttagtgttcccaaagaagtaggagttaaatcgccaattttgttgcttccaagtttcaggttacgaagcgcttctgtatcatcaaaactgccttcttcgattttagagatcaagttaccagtaagggagatagttgtaaatgagagaccattgaagactcctttgccgatttgaaccaactgattgttattaatggaaagagcagatattttagagcctgcaaagttgtttgggttaagtgctttaattaagttattatccaagttaagatcgtacaaatgatctaaatggctaaacagatttgtaatatcttcaattcggttattactgaggtctagactagtcaagccattaatttgatggaaagtagtatcttcaattttacttagttggtttttgtctaatttaacattactgatattagctccaaagaacatttcttctgtaagagcagtcagtgaattttcggaaagtgtaagactgtttaaaaccagatcttcaagtgccccatcttcaattttagaaattttgttctttgctaaatttatggagttgaaattctttttgttaaagactccttttttgattatttcaattttattttcttgtaactctaatccactaataacaatttcgtcaaatgatgcaggctctacattatcgatgttgttattgtctaaagacaaagttgtttgttgtgagttgatacctttaaggaattttggtttcaaaccgccaatattgttgtgtgagagaataatcgagtaaagtcctggttgatcagcaaaagcgtcactagctattaccgaaatatcattgttgctaagattcaaataattcaaatttaagccattaaaagaatttggttttaactcttttatatagttatcttgaagatgtaatgagtttagccttgaaccagcaaaactatttgattcaataacttcaattttattgttacccaagttaaggtcaattacagtatccaacttagagaaacttcctccaagatctttaataagattgttacttagttgaacgtaaaataaacttggtatctgatttaaagcattaacttcaattttttgaattttgttattgttcaaatctaagcttgtcactttagtattatgaaatgtacctgctgtaattttttcaagattgttgtcgttcaagtgtagggaattcacatccaatgtgtcaaaagcatcatcgtcgatggtagaaatctggttgttggatagatcaagctcccataatgacctgtcgttgaagacgccttttttaatagtttcaatgtcattgttgggaaactcaattctgttgatgtgggctccctgtagcgcaccgggctcgatgtcttttaattcgtcatgtttgagttttagttcgctgatagtcacaccatctaacgctccactaggtagtttaggtatggtctggttttcaatttctaccctgtaggttgtattagcgataacactctttaggttttcgattgatggaataactgcttcttctgattcccaataactagagtaaacatttaccgtaatttcactttgcacgtaggcaaaaaatgccactaacaccaaaaataacagtttcgacaccattgttactgac

SEQ ID NO: 4103 - DNA, 2601 bp, Diabrotica virgifera
  SmartBlast Evalue=2E-95; Info=Otopetrin n=1 Tax=Aedes aegypti RepID=Q0IFL4_AEDAE
tttctaaattttattttcttaacaaaaaataatacatattacataaatatcatctaatggccagaaggaacataggcgtacttccaaacatccacgaagcaaacagatgcgtggaaccgataaaacatcattaatggtaaacacatgtgacccaagatcgtccacaattcctttccatagaaatcgtatctgttgtcttgaagaccatgtgccttaacttcaaatgtttgtaatatccacaatgatatattggcgagaatcagaaaagatactagctctcttccaggtttggtttttcgtaattcttttgtgttactcgaacgtcgtacgccgtcctgcagaaatgctgtctgtactaatacttgtaaaatctctaatattatggaaacggtactcattgcatttttgttgataattgcaggtattatactaaagacgccattgaggaagaatgcaggaatacagacaaataataaaacaatgtctagtacattgtgactcgctgtattaaaatccaattttgtgatctgtctgtaagcaaaaatgcatgccaaaaacattacgcttaagatagcaattgatgtcactaggttaattgtcaatccaataacagcatccttatcttcgtcgtagacagcgataaaaaacaatatactactgacaactgtcaataccaaaacgacaaacccaccaaagagacccttgttactggaatgacaatcggcatgtatgactacatttccttccttatcaggcaacggcaattctgaaaggatgctgcatggcaatgtcgacaagtcttcattctcggcgtcctcacactgctctatgttctgccaaatcacgaataatacgccaacaactagaatactgaattctacgctgaatggatataagtatggagaaatatttttgtatattaccgccataaaggaatcgttgtccacgcatattttggtaaagcgtctaagcgagaagtccggagattgtcttaagagttctagaccatttagggcgaacgatgataatggtagtgcaaaaggttcagataattttgaagtcgtttcttcgctatccatttcttccgtgactgcagttatttttttactggcaatggcctctagtgtttccctcattattgtccaaatccaaaaacaaatactggatgacagtaagtgcatcataccaaaccttgctaataccgtgtatttgtttataacgatgttcgagtacttaaaaatgaaaaatagtacaaaaaaagagtaaattgggtaaagtagatccagcagaagtgtgggaattgatccgcattcataaaacattgcgctgtcttctgttataaatactagttgatatccaaccagaattccagcatgaataagatgtccgaagcaaaaggctgctgcaccaattttcaaataaaaattcgtactatgcctatcttttttaaaacaatagctatgttggacggattttccaccttttagtagttctggtaaatttatctcaaactcaaattctccatcttcagtttgtgtggcttttaaattctcgccacacaaatttttttccaccgcgttttcgtattttttctttttacttgagaaaatcgaaatatcgattattaaaaacgagatataaagaaatgatactattaccagatatacactaaaaatctctgctgttggattggagggatctaaagtatctgttacataaagtgcaaggccaactgttacattaaacaaggcataaaatatactgaaggtggtaactaatattcccgaaaatgtccttttcttttcctcatgtggagtgggattgtccggtataaatgcagagggtgttcgaggtgtaagaggagaccctgctagatcagacgcagagtatccgcggtttatataagctccattagtgtccggatttacaacatttaatcttggaggtttaagcctctccttgaagtggccattccccaacatctgctctatcgaacatgctgaatagtattgattattgtggaaacttggaataggactggcacttctactatttccaggaactaccaatttcagaaccattttatccgattttttcggttcagatttctgatatttgtagtttctaaaatctgatgtggagttaattcttcttggtagaaaataagcagatggaacatcattagttgatatggcgtgtctgactcgtatattattttttgatctttctaagatgtcctctgagctggctagtgataagtcatctcctttaattctaataggtacagttcttattgagggtgtcccttcactgtcggaaatatcttcaattgtgaatattttctcaggtctttcggaagcagcattatttgtaggtgggttatttaaattgaactcatccctttctgagttttccggcaatgtgacattttctggcatcttgccagtaactcccaattaaatgtatcaaaaaaaaactattttgttaacaaaattatgttcttaacaagctacgaataaatttatcaaaagaaaactggcgacactgatattcctgttaaaattttacacaaccaaatgatcctacaaagctaccgattcc

SEQ ID NO: 4104 - DNA, 2601 bp, Diabrotica virgifera
  SmartBlast Evalue=2E-96; Info=Otopetrin n=1 Tax=Aedes aegypti RepID=Q0IFL4_AEDAE
tttctaaattttattttcttaacaaaaaataatacatattacataaatatcatctaatggccagaaggaacataggcgtacttccaaacatccacgaagcaaacagatgcgtggaaccgataaaacatcattaatggtaaacacatgtgacccaagatcgtccacaattcctttccatagaaatcgtatctgttgtcttgaagaccatgtgccttaacttcaaatgtttgtaatatccacaatgatatattggcgagaatcagaaaagatactagctctcttccaggtttggtttttcgtaattcttttgtgttactcgaacgtcgtacgccgtcctgcagaaatgctgtctgtactaatacttgtaaaatctctaatattatggaaacggtactcattgcatttttgttgataattgcaggtattatactaaagacgccattgaggaagaatgcaggaatacagacaaataataaaacaatgtctagtacattgtgactcgctgtattaaaatccaattttgtgatctgtctgtaagcaaaaatgcatgccaaaaacattacgcttaagatagcaattgatgtcactaggttaattgtcaatccaataacagcatccttatcttcgtcgtagacagcgataaaaaacaatatactactgacaactgtcaataccaaaacgacaaacccaccaaagagacccttgttactggaatgacaatcggcatgtatgactacatttccttccttatcaggcaacggcaattctgaaaggatgctgcatggcaatgtcgacaagtcttcattctcggcgtcctcacactgctctatgttctgccaaatcacgaataatacgccaacaactagaatactgaattctacgctgaatggatataagtatggagaaatatttttgtatattaccgccataaaggaatcgttgtccacgcatattttggtaaagcgtctaagcgagaagtccggagattgtcttaagagttctagaccatttagggcgaacgatgataatggtagtgcaaaaggttcagataattttgaagtcgtttcttcgctatccatttcttccgtgactgcagttatttttttactggcaatggcctctagtgtttccctcattattgtccaaatccaaaaacaaatactggatgacagtaagtgcatcataccaaaccttgctaataccgtgtatttgtttataacgatgttcgagtacttaaaaatgaaaaatagtacaaaaaaagagtaaattgggtaaagtagatccagcagaagtgtgggaattgatccgcattcataaaacattgcgctgtcttctgttataaatactagttgatatccaaccagaattccagcatgaataagatgtccgaagcaaaaggctgctgcaccaattttcaaataaaaattcgtactatgcctatcttttttaaaacaatagctatgttggacggattttccaccttttagtagttctggtacatttatttcaaactcaaattctccatcttcagtttgtgtggcttttaaattctcgccacacaaatttttctccacggcgttttcgtattttttctttttatttgagaaaatcgaaatatcgattattaaaaacgagatataaaaaaaagatactattaccagatatacactaaaaatctctgccgttggattggagggatctaaaatatctgttacatatagtgcaagacccactgttacattaaacaaagcgtaaaatatactgaaggtggtaactagtattcccgaaaatgtccttttcttttcctcatgtggagtgggattgtccggtataaatgcagagggtgttcgaggtgtaagaggagaccctgctagatcagacgcagagtatccgcggtttatataagctccattagtgtccggatttacaacatttaatcttggaggtttaagcctctccttgaagtggccattccccaacatctgctctatcgaacatgctgaatagtattgattattgtggaaacttggaataggactggcacttctactatttccaggaactaccaatttcagaaccattttatccgattttttcggttcagatttctgatatttgtagtttctaaaatctgatgtggagttaattcttcttggtagaaaataagcagatggaacatcattagttgatatggcgtgtctgactcgtatattattttttgatctttctaagatgtcctctgagctggctagtgataagtcatctcctttaattctaataggtacagttcttattgagggtgtcccttcactgtcggaaatatcttcaattgtgaatattttctcaggtctttcggaagcagcattatttgtaggtgggttatttaaattgaactcatccctttctgagttttccggcaatgtgacattttctggcatcttgccagtaactcccaattaaatgtatcaaaaaaaaactattttgttaacaaaattatgttcttaacaagctacgaataaatttatcaaaagaaaactggcgacactgatattcctgttaaaattttacacaaccaaatgatcctacaaagctaccgattcc

SEQ ID NO: 4105 - DNA, 2609 bp, Diabrotica virgifera
  SmartBlast Evalue=1E-127; Info=Putative inorganic phosphate cotransporter n=1 Tax=Camponotus floridanus RepID=E2AUI9_9HYME
aataaagtcagtcgtttttctactactaaacattgcagataaacggagattaaacattacatttcaacacgtaaaagagttcaagatattagttccaatagtgatcaaaattactggagaacaagaaacaaaatgactaataaaatattggacgttatacctcaaaggtatgttcttggagttatgggtttcttggcaaccactaacacatatgcgcttagggttgtgatgaatattgccattacacaaatgactcttcaacaagcagctacacaggtggatcctaatgcatgtcccggtgatgacggaagtacaagtggtaatagtacaactcaaataaatgatccggtatatgactggagcgaaagtaccaaagggctaattcttagttcatttttctatggctacataattactcatttacctggtggaatgttagctgaaaagtttggtggtaaacatattttaggtgtcggaattttaataggagcaataatgacagtcttaacaccttggattctcactgcaactgatggtaattggaaagtattgatccttacaagaatttttgttggatttggacagggtaccagtaatccagcaattaattcacttctcgcaaatgggttccattacaagaaagagcaacaattggtaccttggtgtatggtgggagtcaaatgggtacaattatttgtagtgccatatgtggtgcgttaatacacgttacaaaatcatgggcgtcggtgttctatctctttggaggattaggtattttatggtatatattgtggcagattctttgttattcctcaccggaacaacatccattcattggagaaaaggaaaaaatctatctgaaaaaggaaatagagggaatatcaacaacaagacctcccactccatggaaagcaatgttgacatctgcaccagtgtgggcattagtagctgctcaagccgggcacgattggggcttctttacaatcttaatagaattgccaacttatatgagcgaggtattgaaatttaatattaaagataacggactatggaactccttaccatacatcgtgatgtgggtatgctctttgagttctggaaaattgtgtgattggatggtagctaaggggtacattaaggttacatttgcaagaaaagtcttcacaacattagctgctgttggaccaagtatattcatcatggccgcttcttatgcaggatgtgacagagctcttactgttggcatgtttacgatatccttatttttaaccggaccgttctattgcggttttaaagttaacgccctggatattgctcccaatcatgccggtattcttatggccattgtaaatggtattggatctataaccggatgtgtagtaccttatttggcaggcgctttgactgaagatcacacattgctgcaatggcgtctagtattttggatcaccggggcggtttacgtcgtaaccagcattatattctgcatttggggtagtggagagttgcagccatggaatgatctttcgagttgtggttcagatgaaaagtgtcctacaaagagctctaatgatgatctaaagaaagaatctgtttaaatagatatattaaaatgcatcgctcgtatcaagcgattttaaaataataagatcaacatattttatctttaagtttttataattttaattttatttaatatgtaaataatttaaaaatattctagaattaaaatttaaaatacacacaaatatttatacatttaaaaacattgtatttcactggttttcatcgatgaaaaaactcgaggtgttcgaaatattaacgatttctcggatagacagagtttttattgaagaagttttgacacgaacgataaaatatcggtaaataagcataaccataatttgtcacaaactagaatatctaggtcatttaacgtgctatgaagaaagataaaagattcttcaaatcataaatactagaaggcaagcaataaagacaaataggtccaaaaaaaagatcgatatcccgatttcacaatcaataatctacaacaatagaaaagcgccattacaacaatttaagtccgtaccattaaaagtgtcgagataaaaaaataaaagagataaattgtataaaatataattctctccatttttatttatgtataaataaatatatattataaatatattttcatgtcataaagttaagagcaaacagtagcgatcaacaggtagcaacaaacgcgttcgaagattgcggctctaattttgaatattttgtcgagatatttaggacacatattcgtaatataataaagaatggcggtacagagcccaatttcagaaatatgttagtatccgagagatagatatatgttagctccaaaaaaggagcctgtaccgccattaagaaagacaaaaaatacactttcttcaaataaacttttgtatcccgtgcctagattttgtgtcaaattggaaatactaaaaatcgattttttataacaagaaatcgaacgtcattgagttggcaacatttcgcgcctatgtgtataaaattattgttttgatagtataaacgtcactgtcagtgtcgaattaccg

SEQ ID NO: 4106 - DNA, 2584 bp, Diabrotica virgifera
  SmartBlast Evalue=1E-127; Info=Putative inorganic phosphate cotransporter n=1 Tax=Camponotus floridanus RepID=E2AUI9_9HYME
aataaagtcagtcgtttttctactactaaacattgcagataaacggagattaaacattacatttcaacacgtaaaagagttcaagatattagttccaatagtgatcaaaattactggagaacaagaaacaaaatgactaataaaatattggacgttatacctcaaaggtatgttcttggagttatgggtttcttggcaaccactaacacatatgcgcttagggttgtgatgaatattgccattacacaaatgactcttcaacaagcagctacacaggtggatcctaatgcatgtcccggtgatgacggaagtacaagtggtaatagtacaactcaaataaatgatccggtatatgactggagcgaaagtaccaaagggctaattcttagttcatttttctatggctacataattactcatttacctggtggaatgttagctgaaaagtttggtggtaaacatattttaggtgtcggaattttaataggagcaataatgacagtcttaacaccttggattctcactgcaactgatggtaattggaaagtattgatccttacaagaatttttgttggatttggacagggtaccagtaatccagcaattaattcacttctcgcaaatgggttccattacaagaaagagcaacaattggtaccttggtgtatggtgggagtcaaatgggtacaattatttgtagtgccatatgtggtgcgttaatacacgttacaaaatcatgggcgtcggtgttctatctctttggaggattaggtattttatggtatatattgtggcagattctttgttattcctcaccggaacaacatccattcattggagaaaaggaaaaaatctatctgaaaaaggaaatagagggaatatcaacaacaagacctcccactccatggaaagcaatgttgacatctgcaccagtgtgggcattagtagctgctcaagccgggcacgattggggcttctttacaatcttaatagaattgccaacttatatgagcgaggtattgaaatttaatattaaagataacggactatggaactccttaccatacatcgtgatgtgggtatgctctttgagttctggaaaattgtgtgattggatggtagctaaggggtacattaaggttacatttgcaagaaaagtcttcacaacattagctgctgttggaccaagtatattcatcatggccgcttcttatgcaggatgtgacagagctcttactgttggcatgtttacgatatccttatttttaaccggaccgttctattgcggttttaaagttaacgccctggatattgctcccaatcatgccggtattcttatggccattgtaaatggtattggatctataaccggatgtgtagtaccttatttggcaggcgctttgactgaagatcacacattgctgcaatggcgtctagtattttggatcaccggggcggtttacgtcgtaaccagcattatattctgcatttggggtagtggagagttgcagccatggaatgatctttcgagttgtggttcagatgaaaagtgtcctacaaagagctctaatgatgatctaaagaaagaatctgtttaaatagatatattaaaatgcatcgctcgtatcaagcgattttaaaataataagatcaacatattttatctttaagtttttataattttaattttatttaatatgtaaataatttaaaaatattctagaattaaaatttaaaatacacacaaatatttatacatttaaaaacattgtatttcactggttttcatcgatgaaaaaactcgaggtgttcgaaatattaacgatttctcggatagacagagtttttattgaagaagttttgacacgaacgataaaatatcggtaaataagcataaccataatttgtcacaaactagaatatctaggtcatttaacgtgctatgaagaaagataaaagattcttcaaatcataaatactagaaggcaagcaataaagacaaataggtccaaaaaaaagatcgatatcccgatttcacaatcaataatctacaacaatagaaaagcgccattacaacaatttaagtccgtaccattaaaagtgtcgagataaaaaaataaaagagataaattgtataaaatataattctctccatttttatttatgtgaattcatgtcataaagttaagagcaaacagtagcgatcaacaggtagcaacaaacgcgttcgaagattgcggctctaattttgaatattttgtcgagatatttaggacacatattcgtaatataataaagaatggcggtacagagcccaatttcagaaatatgttagtatccgagagatagatatatgttagctccaaaaaaggagcctgtaccgccattaagaaagacaaaaaatacactttcttcaaataaacttttgtatcccgtgcctagattttgtgtcaaattggaaatactaaaaatcgattttttataacaagaaatcgaacgtcattgagttggcaacatttcgcgcctatgtgtataaaattattgttttgatagtataaacgtcactgtcagtgtcgaattaccg

SEQ ID NO: 4107 - DNA, 2601 bp, Diabrotica virgifera
  SmartBlast Evalue=1E-124; Info="Ankyrin repeat-containing protein, putative n=1 Tax=Pediculus humanus corporis RepID= E0VZ49_PEDHC"
ctatgtcatatctaaactccagtccgacgatcaaggaaactaacgaaaatggttactcttggtattcatgtggttgctgtccctatggctaccacatcgatctggatttcgtacggtactgcgagtccatcagcaaagagccagaaagtcgcaccggatcgatcaaaagaagaaaagatagaagaaaacagaggcactcgatggaagttttactgggactcattcctcctgtaacggcatcggttgaccaaacttataagactattcaagagcaaacaactccatcgccgaattacttgagaactacagcaaataaattcccatttccaacagatggcttcgatgatgctgtgtccgatttcgaaaggacattacaacgatccaagaaaaaagtttccagtaacctaccagatgttaccgctgtctcagaacattcacgaagggttgcttcagcttccggtcagaccatgcccgtcttacccacgacccacgatgaggtagcaagacatgatttcgacaccgtcaccatcgattcatatggaatgagccccttggccttgcagaaaattagggagcagatggctttgagcctggagcgaaccaagcagttggaggaccagatcaagagcatgcacaaattggaggaggaggtcaacttcctgaaggatgaaaattgtaggttacgaaacagtttgaaatcagaaaacggaaaaaaccaagccacaataaatgacaattatatcgaacattacaaacgacagaggtctcaatcattcacaaacgtaaacaatttggagatctcaatgcgaaaagaatcatccccaccacctccaccaccacgaaaagattttggagtgatgtgtggggtgttgacgaggaacataggagtaggcaatcagacacctaacacaaagaatgtttctacggctacttttgaaaatgaattcgctgataagtggctgccagaaaaggtcaaatttcttaacaatcagaacttgaagtcatctagtaaaatcacgatatcaaaagaaacgcaaaccctaggacaaaagtcaagctcagataaaggtgtccagttccaaacaaagagtcctacagtgcctaagttcagcacctacacgcaaactacaacaactaaaaaacaactagtggataaagggatcttagcaactgtcaaagtatctcatatttctgtccagaaatgtgttgaatgttactctattggcacttcagatgacacagtaaatggtatcatttgcgaaaaatgcaatgctcaaaaaagatctatagcaataggtcctgaatctaatgaagatagccatacgtcgcctatatccttagcgtcccttaacttaagaagcaaatcgttcaatatgggcgaagatcgacttaaccttaccactagaacccgttccatagcatcacagtacgaatctagtagcatcagcagagcttgtcaggcgaaacttaagaaggattcttctacgaaatcttgccaagctgaaacgaaaatgactgacaaaaacacccagtacgtaaattacactgtctcaaggcataccgacactcaagactttataacaccaaagaaaaacgtcagttgcgaagcagttgaacaaaaaccggaaaccattgaggtggcttgtaataccgcgactgatttgctgacctgcgtcaaatgtgaaaaagaaaaagaaaaggaggcgctgaagaaagacggaggcagccccactccatctagaataccgcgaccacaaattccgactactcccgtagaaaatagaaagtttaggagacaagatacttatactaaagtatattcaccaactgagaaagctacatcacctactagtccaagattgtctggtttagatctatcacctaaagtcatatcaaacgattcaaatcccttagataaagttaaaagtaacctcaaactagtagaaccaataccacatgctcaaaatggtgtcaatttcacagcgcctattaccaaagttcaaattcaagaaattacactgccaacttcagaatctgttttccaacccattacacaaaatcaaaataggaaaaaagtcatgccaagtaaggaaatgcagggtgcaatgaaagtcctgaacgatcatcttatgaagaacccttccaaaaacatcaagaacccaactgctgaaaatattattcaaacagaatggttcaaaatctcgagctcagtaacagccaatccattggaagtggaggattacctggatgctttcgaagacgtgtccagcttgttactggaatacatagtaaacatgagtgattatagtgggaacacagccatgcactatgctgtttcccatggcaactttgatgtcgtatccattttgttagattctaaagtttgtgatatcaataaacaaaataaggctggatatacaagtgttatgttagtttccttggcggaagttcggtcccaaacacatgccaacgttgtccgaagactgttccagttagctgatgtgaatattagagcgaaagagcatggtcaaacagcactgatgttagcagtaagccacaataggttgaacatggtcaagatgttgttggaagcaggtgcag

SEQ ID NO: 4108 - DNA, 2577 bp, Diabrotica virgifera
  SmartBlast Evalue=1E-123; Info="Ankyrin repeat-containing protein, putative n=1 Tax=Pediculus humanus corporis RepID= E0VZ49_PEDHC"
ctatgtcatatctaaactccagtccgacgatcaaggaaactaacgaaaatggttactcttggtattcatgtggttgctgtccctatggctaccacatcgatctggatttcgtacggtactgcgagtccatcagcaaagagccagaaagtcgcaccggatcgatcaaaagaagaaaagatagaagaaaacagaggcactcgatggaagttttactgggactcattcctcctgtaacggcatcggttgaccaaacttataagactattcaagagcaaacaactccatcgccgaattacttgagaactacagcaaataaattcccatttccaacagatggcttcgatgatgctgtgtccgatttcgaaaggacattacaacgatccaagaaaaaagtttccagtaacctaccagatgttaccgctgtctcagcttccggtcagaccatgcccgtcttacccacgacccacgatgaggtagcaagacatgatttcgacaccgtcaccatcgattcatatggaatgagccccttggccttgcagaaaattagggagcagatggctttgagcctggagcgaaccaagcagttggaggaccagatcaagagcatgcacaaattggaggaggaggtcaacttcctgaaggatgaaaattgtaggttacgaaacagtttgaaatcagaaaacggaaaaaaccaagccacaataaatgacaattatatcgaacattacaaacgacagaggtctcaatcattcacaaacgtaaacaatttggagatctcaatgcgaaaagaatcatccccaccacctccaccaccacgaaaagattttggagtgatgtgtggggtgttgacgaggaacataggagtaggcaatcagacacctaacacaaagaatgtttctacggctacttttgaaaatgaattcgctgataagtggctgccagaaaaggtcaaatttcttaacaatcagaacttgaagtcatctagtaaaatcacgatatcaaaagaaacgcaaaccctaggacaaaagtcaagctcagataaaggtgtccagttccaaacaaagagtcctacagtgcctaagttcagcacctacacgcaaactacaacaactaaaaaacaactagtggataaagggatcttagcaactgtcaaagtatctcatatttctgtccagaaatgtgttgaatgttactctattggcacttcagatgacacagtaaatggtatcatttgcgaaaaatgcaatgctcaaaaaagatctatagcaataggtcctgaatctaatgaagatagccatacgtcgcctatatccttagcgtcccttaacttaagaagcaaatcgttcaatatgggcgaagatcgacttaaccttaccactagaacccgttccatagcatcacagtacgaatctagtagcatcagcagagcttgtcaggcgaaacttaagaaggattcttctacgaaatcttgccaagctgaaacgaaaatgactgacaaaaacacccagtacgtaaattacactgtctcaaggcataccgacactcaagactttataacaccaaagaaaaacgtcagttgcgaagcagttgaacaaaaaccggaaaccattgaggtggcttgtaataccgcgactgatttgctgacctgcgtcaaatgtgaaaaagaaaaagaaaaggaggcgctgaagaaagacggaggcagccccactccatctagaataccgcgaccacaaattccgactactcccgtagaaaatagaaagtttaggagacaagatacttatactaaagtatattcaccaactgagaaagctacatcacctactagtccaagattgtctggtttagatctatcacctaaagtcatatcaaacgattcaaatcccttagataaagttaaaagtaacctcaaactagtagaaccaataccacatgctcaaaatggtgtcaatttcacagcgcctattaccaaagttcaaattcaagaaattacactgccaacttcagaatctgttttccaacccattacacaaaatcaaaataggaaaaaagtcatgccaagtaaggaaatgcagggtgcaatgaaagtcctgaacgatcatcttatgaagaacccttccaaaaacatcaagaacccaactgctgaaaatattattcaaacagaatggttcaaaatctcgagctcagtaacagccaatccattggaagtggaggattacctggatgctttcgaagacgtgtccagcttgttactggaatacatagtaaacatgagtgattatagtgggaacacagccatgcactatgctgtttcccatggcaactttgatgtcgtatccattttgttagattctaaagtttgtgatatcaataaacaaaataaggctggatatacaagtgttatgttagtttccttggcggaagttcggtcccaaacacatgccaacgttgtccgaagactgttccagttagctgatgtgaatattagagcgaaagagcatggtcaaacagcactgatgttagcagtaagccacaataggttgaacatggtcaagatgttgttggaagcaggtgcag

SEQ ID NO: 4109 - DNA, 2623 bp, Diabrotica virgifera
  SmartBlast Evalue=1E-135; Info=Coiled-coil and C2 domain- containing protein 1-like n=4 Tax=melanogaster subgroup RepID= C2D1_DROME
ccgttctcgagaaaatgaattcattccaacctcacgcgctcactgtataaaagttaaagctatacattataatatgataaataatttcatagcaactctaaatatcaacaataagcgattactggtcgaccactaaccacctctcttgaatttgctcgacctgttgagtctgaattggtgttcttaacttcacttgaatctccagcttacctcccaccttctttcgaccttccaatagatcaaatgtgtcgtggatttcacactgcgtttcgagaggttgtagtttcagattcacggttccaacgagtgcatcgctcctgaagaagccgaaaaaacatggtaatcctcccaaaaacgaacagcagccgggacaggtaactggagagccacagcaggcgcatcctttagaaaacaactcaaacttcagactgtgcctcttgaaagttctttgacatactctggaattcctctgtatcggtacaacaaaggttttttgaaagtcagggttgtttgtgttcttcattgttgaagttctatcattatatggagtttcctgcggaaaagggaattccattttcacataagtatctatgtccttgtcggtgctgatattgagccctctgtgaacggtcacctccatttggttgtcttcgatttcgggacagcacttaacaatagcaaattctttcgtctcgtagtggaatttaggaatccgtccctcttttcgagccgcgcgaaccacgtccatgtctttagtgacgtttagagcaaacctttcaaatctattcattcctgcaacatcaccaatagctttgttgtgatctctagtagtaaggcacatttttaattgtttctgtaactgtgtttccaatcttgcgaagaggtcaccatctattccagcagaatcgtcactctcggctgacatggctatatcgtattcattgtccaactgcgactttgcttccggagaaacaggaatagaagaccaatccacaggtagacctgctatagaagcttctatcagcttatcgaaccctttggcctgacgtaaaaactctttggcttgggccatctctcctctctttttagcttccaacgccgccagtttgaactgcttttgtttagctaccagtatcaccatttgcttatctgcttgggtttgcttaggtatcattcttgctggtttactttcgggactaggtagactgggcttgctttccccactattgctcggttgtggagctggtcgtctaggtggtgcagctggagctggatcagcaggttcagcagctggctgttgtactccaggaatcggtccatatcctgggggagtcggcagttcttcatatgcaaacggtttgcctgctttattagccttgatagcctgttcaaactgcttgatgatccttccatatcgtctggctttactggaattattttcttcctttgccttcgcttcctgttccttataaagacccagtctttgttgcagagcttccatagtggatgaggcagttattaaagcaggaggagctgcagcaggttcctcttcagcaggtgctggactattttgctgaacttcactttcttgggtagggggttcgggcatactaaaggtctctggtggacctggcatatcactcaagtctacaggctggccacttttaagagcgccaattacaatatcaaattgtttagaaacttttaaaaataaaacagctttctgtgcatttccttcgtgtttagccttcaatgcagcaaccttatactgcttttgaccttgtagaagagtgttcaacttttcttggtcataagcgggtgcttcaggttgaatactgaccaaatcttctgtaggaggctcttgtggtgaatctgtggttgtaggagagagtggttcaggaggtgttggcctttgtggtactggtggagcaggacgtgctggagctgcagtacttggatgaatatcaggagggatactgtcatcatttaaatctataggtgaacctgactttgctctcttgataaggtcttttaatgtcttaatagctctgccatatcgtctagctttcgttgtttctccagattctttagcctttacttcgcatatttcatagtttttaagcctttctactaatatatttacaatatcagaactactggcaggtggtggggcctcttgagaaggggatgagtcttcttctggctcatcttcaccaacaatatcattcaattcactaagcaactcaggatcattttcatcaatagacacatcatcatcatctacatccttcattgattctgaaaccattgaatctaactccctctgaggaattatttttctgggaggcctctttggttttgatgctccacctcctccagccaaggcggccaattcagcctccaaatcttcatcgtcatcatcatcatcctcatttcctagtcctgtatcaaagtctgagggtacttcaaataatccatactgagacaatgattttcctgcgtggttcctctttggtttttcttttttcgaaaacattctgaatttttgtaaattgtgtatctatctagtgccaaaatattattttagactcagtaaaaaactatggaaaatacaaccataacc

SEQ ID NO: 4110 - DNA, 2552 bp, Diabrotica virgifera
  SmartBlast Evalue=1E-134; Info=Coiled-coil and C2 domain- containing protein 1-like n=1 Tax=Drosophila pseudoobscura pseudoobscura RepID=C2D1_DROPS
ccgttctcgagaaaatgaattcattccaacctcacgcgctcactgtataaaagttaaagctatacattataatatgataaataatttcatagcaactctaaatatcaacaataagcgattactggtcgaccactaaccacctctcttgaatttgctcgacctgttgagtctgaattggtgttcttaacttcacttgaatctccagcttacctcccaccttctttcgaccttccaatagatcaaatgtgtcgtggatttcacactgcgtttcgagaggttgtagtttcagattcacggttccaacgagtgcatcgctcctgaagaagccgcctttagaaaaacaactcaaacttcagactgtgcctcttgaaagttctttgacatactctggaattcctctgtatcggtacaacaaaggttttttgaaagtcagggttgtttgtgttcttcattgttgaagttctatcattatatggagtttcctgcggaaaagggaattccattttcacataagtatctatgtccttgtcggtgctgatattgagccctctgtgaacggtcacctccatttggttgtcttcgatttcgggacagcacttaacaatagcaaattctttcgtctcgtagtggaatttaggaatccgtccctcttttcgagccgcgcgaaccacgtccatgtctttagtgacgtttagagcaaacctttcaaatctattcattcctgcaacatcaccaatagctttgttgtgatctctagtagtaaggcacatttttaattgtttctgtaactgtgtttccaatcttgcgaagaggtcaccatctattccagcagaatcgtcactctcggctgacatggctatatcgtattcattgtccaactgcgactttgcttccggagaaacaggaatagaagaccaatccacaggtagacctgctatagaagcttctatcagcttatcgaaccctttggcctgacgtaaaaactctttggcttgggccatctctcctctctttttagcttccaacgccgccagtttgaactgcttttgtttagctaccagtatcaccatttgcttatctgcttgggtttgcttaggtatcattcttgctggtttactttcgggactaggtagactgggcttgctttccccactattgctcggttgtggagctggtcgtctaggtggtgcagctggagctggatcagcaggttcagcagctggctgttgtactccaggaatcggtccatatcctgggggagtcggcagttcttcatatgcaaacggtttgcctgctttattagccttgatagcctgttcaaactgcttgatgatccttccatatcgtctggctttactggaattattttcttcctttgccttcgcttcctgttccttataaagacccagtctttgttgcagagcttccatagtggatgaggcagttattaaagcaggaggagctgcagcaggttcctcttcagcaggtgctggactattttgctgaacttcactttcttgggtagggggttcgggcatactaaaggtctctggtggacctggcatatcactcaagtctacaggctggccacttttaagagcgccaattacaatatcaaattgtttagaaacttttaaaaataaaacagctttctgtgcatttccttcgtgtttagccttcaatgcagcaaccttatactgcttttgaccttgtagaagagtgttcaacttttcttggtcataagcgggtgcttcaggttgaatactgaccaaatcttctgtaggaggctcttgtggtgaatctgtggttgtaggagagagtggttcaggaggtgttggcctttgtggtactggtggagcaggacgtgctggagctgcagtacttggatgaatatcaggagggatactgtcatcatttaaatctataggtgaacctgactttgctctcttgataaggtcttttaatgtcttaatagctctgccatatcgtctagctttcgttgtttctccagattctttagcctttacttcgcatatttcatagtttttaagcctttctactaatatatttacaatatcagaactactggcaggtggtggggcctcttgagaaggggatgagtcttcttctggctcatcttcaccaacaatatcattcaattcactaagcaactcaggatcattttcatcaatagacacatcatcatcatctacatccttcattgattctgaaaccattgaatctaactccctctgaggaattatttttctgggaggcctctttggttttgatgctccacctcctccagccaaggcggccaattcagcctccaaatcttcatcgtcatcatcatcatcctcatttcctagtcctgtatcaaagtctgagggtacttcaaataatccatactgagacaatgattttcctgcgtggttcctctttggtttttcttttttcgaaaacattctgaatttttgtaaattgtgtatctatctagtgccaaaatattattttagactcagtaaaaaactatggaaaatacaaccataacc

SEQ ID NO: 4111 - DNA, 2578 bp, Diabrotica virgifera
  SmartBlast Evalue=8E-54; Info=Transposase n=1 Tax=Danio rerio RepID=A9X5I0_DANRE
cggacattacgaatgattacgaaccattacgatcttgccggtctccagttacgtcacgacttccggatgtgcaatatattatcttgttatttatagtatcatgcagaaaaccattgtttaatttaaaaatatgattaaaataccggcgttttgttcagacacagaagcgaatctgactgtcgtttccattgattttgttgggaccgaaatatttgaccttgtgcaccagttacagaatagaacttgatgttctaaggcaggggttcccaaacttttttgtaccacgcccccttttgttgaaatgaaagcttctcgcgccccccccccctcctctttacaataaattgtatgcgcctaaataggaacaaaacaaaaacaaataagtattcgcttgaaaacaaaacatttatttattctgccataagatacaacaatatcagtttccataaactacaaaaattattaataaaagaaaaatagattaggttggttagtgagatggatgtgcttgcattttatttactagtatgcctattcgtggctgagttttagtaagtgcacagcacaagtcactagcaacatcaagtttattccgatattttgttttaattgccaaaagtgttgaaaaaggcaaatataaatgaagagcttcccgtgatacactaagatacactttgaaatattttaaccaaaatgaaggtttgtccattataacaaagtatttggcggaggaatcatgcaaaaaatcatttggatttatttgcaaagcatcttcttgaagtgattcaggcagggagtctatgtttacatggaatggatcagttgacattctgtaaataaaattgtcacaaatgtttgggaagtatttctggaactcttcaattatgctctccaaatggtttgatatttggattttcaaaatttgatccttcataaaaatgtccttgaagcgtgtttcttctgagattggctctactttagagaaatttgaataatttcaggggtttgctgatattttacgcctccaaagttgagtaactaagcctccatcacaatgagtaactactatatttgagtctccaccctgcagttttaggttaaggctgttcaacgagtcaaagatgtctgacaaataagcaatattacttggatacaatgtttttttgaaggccatatttagctcattttgcttttgatgttccaaggtgattacttcatctcaaaggtcaaataatcttgccaacatgtttccttttgagagccatcgtacttctgtatgatgtggcagtgttgtgtgatcactttctaaatcttcacaaagagttttaaacagtcgagtatttaacgcactgtttttttatgtacttcactattttaatacacaactttaagacagccagaagttcatttggaaggggttttgctgccaaggcttgtcgatgtataaaacagtgtatcccaatcacatcagcatttttctcgattactaattgcaaatagcctgagcgaaaaccaagcattgaaggtgcgccatctgtacataaactgatcagtttttgctaagagagttcatgtttgtcaaaaaactctcacactgctttcataacattaatagcttttgtcgtggtctccagtctccaactctgtagaaaagagtagctcgtctttcattctttcgttttgaatataccgaacataaacaattaactgataacattgtgctatgtcagtactctcgtctagctgaatagcaaaaaatggcaattattttactgcatcagctacctgtttttgtatgtctcagtattttcaaaaagagataagtatttgagataacttttgcttactctgcgttaccagacacagtttaacaagcggtttattttgaattctagaaaaataactaaatttaatttaatgttcaacttatctcgcgccccccctgatatgtcctcacgccccccagtttgggaacccctgttctaaggaatagaccattccaaattaggtaatatttttgacaagtagttattaattaaatatgaaatataaaatttaactataaaatataaaataaaacatatataaatataaaatttaactataaacaactgtcacgtcagtcgcaaaagtgaggttgcaccagttacgttgacacatgagcatgaaaattatgttaccgttttcggcaggagtttcgcttctggtggttcagttgtaaagtgttccagtaaaggtaaaagagataaagtgagtttttttagaataccggcggcatttcaagatcgagtaattttaaattcaacagaacaacgggaattgtgggtcaagaatactgattttctgattatgccgggtttttgcttcccctgtgaaggtgttataatatccaatatttgacatttttgtagtaaaaaccacagaatttttataataaaacgagaaaatacctggaatggtcaattcggatttttcagagctaaaaagtgtatgtaatatgtataaaacttataaaaacgtaaataatattattatatcatctgtatattgtcatatcctttgtatatatggaaaaagt

SEQ ID NO: 4112 - DNA, 2544 bp, Diabrotica virgifera
  SmartBlast Evalue=1E-43; Info=Protein FAM200A n=7 Tax=Eutheria RepID=F200A_HUMAN
cggacattacgaatgattacgaaccattacgatcttgccggtctccagttacgtcacgacttccggatgtgcaatatattatcttgttatttatagtatcatgcagaaaaccattgtttaatttaaaaatatgattaaaataccggcgttttgttcagacacagaagcgaatctgactgtcgtttccattgattttgttgggaccgaaatatttgaccttgtgcaccagttacagaatagaacttgatgttctaaggcaggggttcccaaacttttttgtaccacgcccccttttgttgaaatgaaagcttctcgcgccccccccccctcctctttacaataaattgtatgcgcctaaataggaacaaaacaaaaacaaataagtattcgcttgaaaacaaaacatttatttattctgccataagatacaacaatatcagtttccataaactacaaaaattattaataaaagaaaaatagattaggttggttagtgagatggatgtgcttgcattttatttactagtatgcctattcgtggctgagttttagtaagtgcacagcacaagtcactagcaacatcaagtttattccgatattttgttttaattgccaaaagtgttgaaaaaggcaaatataaatgaagagcttcccgtgatacactaagatacactttgaaatattttaaccaaaatgaaggtttgtccattataacaaagtatttggcggaggaatcatgcaaaaaatcatttggatttatttgcaaagcatcttcttgaagtgattcaggcagggagtctatgtttacatggaatggatcagttgacattctgtaaataaaattgtcacaaatgtttgggaagtatttctggaactcttcaattatgctctccaaatggtttgatatttggattttcaaaatttgatccttcataaaaatgtccttgaagcgtgtttcttctgagattggctctactttagagaaatttgaataatttcaggggtttgctgatattttacgcctccaaagttgagtaactaagcctccatcacaatgagtaactactatatttgagtctccaccctgcagttttaggttaaggctgttcaacgagtcaaagatgtctgacaaataagcaatattacttggatacaatgtttttttgaaggccatatttagctcattttgcttttgatgttccaaggtgattacttcatctcaaaggtcaaataatcttgccaacatgtttccttttgagagccatcgtacttctgtatgatgtggcagtgttgtgtgatcactttctaaatcttcacaaagagttttaaacagtcgagtatttaacgcactgtttttttatgtacttcactattttaatacacaactttaagacagccagaagttcatttggaaaggtttttgttgccaaggcttgtcgatgtatcaaacaatgtagtgcaaatagcctgagctaaaaccaagcattgaaggtgcgccatctgtacataaactgatcagtttttgctaagagagttcatgtttgtcaaaaaactctcacactgctttcataacattaatagcttttgtcgtggtctccagtctccaactctgtagaaaagagtagctcgtctttcattctttcgttttgaatataccgaacataaacaattaactgataacattgtgctatgtcagtactctcgtctagctgaatagcaaaaaatggcaattattttactgcatcagctacctgtttttgtatgtctcagtattttcaaaaagagataagtatttgagataacttttgcttactctgcgttaccagacacagtttaacaagcggtttattttgaattctagaaaaataactaaatttaatttaatgttcaacttatctcgcgccccccctgatatgtcctcacgccccccagtttgggaacccctgttctaaggaatagaccattccaaattaggtaatatttttgacaagtagttattaattaaatatgaaatataaaatttaactataaaatataaaataaaacatatataaatataaaatttaactataaacaactgtcacgtcagtcgcaaaagtgaggttgcaccagttacgttgacacatgagcatgaaaattatgttaccgttttcggcaggagtttcgcttctggtggttcagttgtaaagtgttccagtaaaggtaaaagagataaagtgagtttttttagaataccggcggcatttcaagatcgagtaattttaaattcaacagaacaacgggaattgtgggtcaagaatactgattttctgattatgccgggtttttgcttcccctgtgaaggtgttataatatccaatatttgacatttttgtagtaaaaaccacagaatttttataataaaacgagaaaatacctggaatggtcaattcggatttttcagagctaaaaagtgtatgtaatatgtataaaacttataaaaacgtaaataatattattatatcatctgtatattgtcatatcctttgtatatatggaaaaagt

SEQ ID NO: 4113 - DNA, 2566 bp, Diabrotica virgifera
cttttgtgctattttgccggttattagcgcgctcatcacagtgtagaatgagaaatacataaaatattaagcaaaattataaaacaataagatacaaacgtaattgtgttgataaactatataagtcacgataatgagacgagtgttgctggaaaaacaatatttttgtaaattttccagaattttggcctagtgtaggtatatatacgaaagatggaatgtaactaaatatatgagagactgcccccaattaaaaatgtcactgcaatatttttataccgatcatatagcatgagtaattagtgcattttattgttagtggagttttcctggaaaacacagttgatcttaaaacaacataactcataatctcgcagatcaagaatatttaattttttttctaaatgaaatatttagctaacagtattgtgcagaaatttctggaagtaggggttaacagtaatttcaaaattcttgaaaacattcgtgtagaaaactttcgacacagctaaagtgtcccacttggaataccaaactgtataaccattagagggaagttctttgacaggagagaacatttttgcaacactgattctttctgatttttctgatgttcctcaccgattggtaggtttagagggtagatttaataagcttaacgttaaaaaaagttacggctgttcctgattcagttgctcaagtctttgtcaactcagactggacttaaacgtaagtcagtgagtttagagcatttccattttttagaatctttctagcaagctgtacatacaactttacgaaacatatcatttcctttgttttgatctgccttttcatattcttagtcagtggttaaaattttgacttctgatattttgcatatcttcaatagattcaaaatcaacacactctgaagatcggaatcaactgaatatgatgagtcctgtttccaatcctatgagtacctccattttgacactactattacatcgtatattgtaatgattagaaaaatcagctaagagtcgtttaagtttatattgcatgttaaacaaaatgaacattcgaacgaatctaaaccaagcgacaaagaatattgaaaacactcttattagcttttaaataaaatttcacatttttggatcctctatggcagatcaaaacgttaaaaatattcaatcatcatcacttcaagctttctgctacattctgttgtcccttgcttgaaacagcagatgtaacaatcctatgttacaccgtctatccatcttagctttggtctgtaccgtcttcgtattcacactggttgcgctgttaaagaaagtggctatataagaatctcatgctagaatttaatctctctttaagtttaaacgttgctgatgtggccattgtaagacgtcgacgtatttgtccattgtttgtaataacggagaccaagtaattgaaacgcagccttggtcctttcttcccttctttcactttggccttctgtgcattaatttttagttcacatttatgatgactaatggtatctagtttgtttataaaactttatctgttgatgatgttagtattaaattctagtactaagattgctggtttttggacttccacccgttgttcctccttcatccattgagtatgcctgcttttaattgcttttgtaggtgtattagatggtcgggggtaccgaagtctgggggagtgtacgactaaaattgatgtcatgtgaaatctgacaacgactgcaaatggttatattttgtttacacttgcaaaaataaaaaacgtacatataattttgtatatgtgaaattaccgatcccctctttctctttttgaagtaaacacgtaaggattatatgcacgtgaattcattccatcgtttttgaatttttccgaggtatccattgtttagttgaatattattcaggtcttgcaataattaaaagttatgcacagttagttaaaaaattgcatattctgcatctgataaattaatataattaaatatttgctttttttctagagaatttattagttccaaattatatttttatttacggcatataattctgaagtcaaaataaatttttaaaatattattatctccaagttgaatggctcttaaaagactattctcaatttgaaaatgcatgatagcacagtttgtatgacagaagattacaacgatctttatatagaacttaccaaagcaaaaaaaatatacaacggataacttcttgcctttgttatgtacccctgtacatgacataaacataaacctatatatgtaaataatctgagcaccctgataaacttcgaatacataaattgcaaaggagctgtcataaaaactgctatcaataatttttaacggagtatgatgtatattcgcacaacaaaattccaatttaaggttaaaaagacttatggtttacactacgatcacactgagaaccgaatggatgcttttgcattagcagtgttaataattcagtaaaaataatactaagaatattttggaatttaaatcactattagtattagtccaagaggcagc

SEQ ID NO: 4114 - DNA, 2545 bp, Diabrotica virgifera
cttttgtgctattttgccggttattagcgcgctcatcacagtgtagaatgagaaatacataaaatattaagcaaaattataaaacaataagatacaaacgtaattgtgttgataaactatataagtcacgataatgagacgagtgttgctggaaaaacaatatttttgtaaattttccagaattttggcctagtgtaggtatatatacgaaagatggaatgtaactaaatatatgagagactgcccccaattaaaaatgtcactgcaatatttttataccgatcatatagcatgagtaattagtgcattttattgttagtggagttttcctggaaaacacagttgatcttaaaacaacataactcataatctcgcagatcaagaatatttaattttttttctaaatgaaatatttagctaacagtattgtgcagaaatttctggaagtaggggttaacagtaatttcaaaattcttgaaaacattcgtgtagaaaactttcgacacagctaaagtgtcccacttggaataccaaactgtataaccattagagggaagttctttgacaggagagaacatttttgcaacactgattctttctgatttttctgatgttcctcaccgattggtaggtttagagggtagatttaataagcttaacgttaaaaaaagttacggctgttcctgattcagttgctcaagtctttgtcaactcagactggacttaaacgtaagtcagtgagtttagagcatttccattttttagaatctttctagcaagctgtacatacaactttacgaaacatatcatttcctttgttttgatctgccttttcatattcttagtcagtggttaaaattttgacttctgatattttgcatatcttcaatagattcaaaatcaacacactctgaagatcggaatcaactgaatatgatgagtcctgtttccaatcctatgagtacctccattttgacactactattacatcgtatattgtaatgattagaaaaatcagctaagagtcgtttaagtttatattgcatgttaaacaaaatgaacattcgaacgaatctaaaccaagcgacaaagaatattgaaaacactcttattagcttttaaataaaatttcacatttttggatcctctatggcagatcaaaacgttaaaaatattcaatcatcatcacttcaagctttctgctacattctgttgtcccttgcttgaaacagcagatgtaacaatcctatgttacaccgtctatccatcttagctttggtctgtaccgtcttcgtattcacactggttgcgctgttaaagaaagtggctatataagaatctcatgctagaatttaatctctctttaagtttaaacgttgctgatgtggccattgtaagacgtcgacgtatttgtccattgtttgtaataacggagaccaagtaattgaaacgcagccttggtcctttcttcccttctttcactttggccttctgtgcattaatttttagttcacatttatgatgactaatggtatctagtttgtttataaaactttatctgttgatgatgttagtattaaattctagtactaagattgctggtttttggacttccacccgttgttcctccttcatccattgagtatgcctgcttttaattgcttttgtaggtgtattagatggtcgggggtaccgaagtctgggggagtgtacgactaaaattgatgtcatgtgaaatctgacaacgactgcaaatggttatattttgtttacacttgcaaaaataaaaaacgtacatataattttgtatatgtgaaattaccgatcccctctttctctttttgaagtaaacacgtaaggattatatgcacgtgaattcattccatcgtttttgaatttttccgaggtatccattgtttagttgaatattattcaggtcttgcaataattaaaagttatgcacagttagttaaaaaattgcatattctgcatctgataaattaatataattaaatatttgctttttttctagagaatttattagttccaaattatatttttatttacggcatataattctgaagtcaaaataaatttttaaaatattattatctccaagttgaatggctcttaaaagactattctcaatttgaaaatgcatgatagcacagtttgtatgacagaagattacaacgatctttatatagaacttaacaaagcaaaaaaagcctttgttatgtacccctgtacatgacataaacataaacctatatatgtaaataatctgagcaccctgataaacttcgaatacataaattgcaaaggagctgtcataaaaactgctatcaataatttttaacggagtatgatgtatattcgcacaacaaaattccaatttaaggttaaaaagacttatggtttacactacgatcacactgagaaccgaatggatgcttttgcattagcagtgttaataattcagtaaaaataatactaagaatattttggaatttaaatcactattagtattagtccaagaggcagc

SEQ ID NO: 4115 - DNA, 2552 bp, Diabrotica virgifera
  SmartBlast Evalue=4E-94; Info=Putative sugar transporter n=1 Tax=Lutzomyia longipalpis RepID=A8CWB1_LUTLO
gtgctctgtttgctttggtagatattaggtactacctataagtaatttgccgccgaggattatagagcaataaaattttattgttttataataacgtacatttatcagaaaaatggaaaacaaggaggatcgtggttacaaaaaagtaccagtccacgaagagggcgtagttgaagcagcgtatgcggctgaaagagacagtgtatatgtgaccaccactcttcctgggcctaccagtagaaatttcctttacatagcggcaagtgcagctaacatagcatcatttgtttgcggcacagcttttggatggacatctccagaaattccaaaactaaacaatttaacaacaactccactggcagaggttttaactccttcccaacaaggttgggtcggctcattcttaccattagcagcagctattggaccaattggaggaggaattatggcagacatgattggaagaaaaaaatcgttgctggtggctacactacctttcctactagcctttttattgaatgttatggccagcacagttttctatttttatgtttctagattcttgtgtggtttgggagtgggtatgatttttactgtcttgccgatgtatattggggaaatatctgatgatgaggtcagaggctcactagggtcatttatgcaactgttcatagtaattggactgctgttttcttatgcgcttggaccttatttaccagtaaaaacatttaatattatattactattccctccagtgatatttatagttctatttttcttgttcatacctgatagtccttactacctcatacagagtgatgatagcgaagctgcattagaagctctcattaaattaagaggtggaaataaatctttagctcaaaaagaattagaagtgatcaaacttcaagtagaggaagatcttaaaagtaaaggtagttttacaggtacttttaagacaatttttgattcgaaatcattaaaaatggctttgtttttagctcttgctttagtaagttggcaacagctttctggaattaacgtggtgttgttttacagtcaaaacatttttacagatgcaggcgtgtctatagctccagaaatatgtacaattatcataggagttgttcaagttctagcaagcggtgctactcctcttcttgtagagaagtggggtaagaggttcctattgatgttttctggtataggcatgttcatatctcagggtgtattaacatacttcttttatcttaaagataaccagcacaaagatgtctctaacatagggtgggtgccaattttaagtcttgtagtcttcattattacgtattgtcttggtttcggacctctaccatgggcagttatgggagaattgttcccaggaaatgtcaaatctgtagcctctacagctacggcttcattttgctggatccttggcttcttgctaactaactactttggtgcagttgcaggagttataggaaaatctggatcttttggtttcttcacaatttgctgccttttgtcggctatttttaccttcaaatttttacctgagactgcgggaaagagtcttaacgaaattcaggctcttctggccggaaaaaaataaatgacaattattaaatgttgttatattttgatttctattttttcaataggctgtccaggttaagactgctaatcattccaaaaacgttacttactataccgaaaagaggttatcctttttaggtgcaaataaattaacattactttatacaagtgctttaagaaagtcttataaataaaaataaataattttgtatccaaccagtacctcaatgtttatgacttgtggtagacaaggaaatgaatgcaggatttcagaaataataaaaggtctgtgccaaaagtatctgactttccatcataatttcaaactttccactatgcttttactgagtcacccagctcggggtatagttaatatttcccaataagctgaacaacacttcaccttcaaggtatttaatttgatcgtagcattttttaataacgatgaaaaacgatgaaaacagaaactgtttggcgcgaaattataaacgaaggtcagataattttggaatggcgcagtctgtgtgtctcttacctcatcaccaatattgggagtattttttcaatgcactatagcaatattttaagattacgatattaacaatcgagaagtttatctgtatcaactactataaaagtgctttgaagaaatgcctttatttttataaccacaatattttatattttctatagtcatccttcttatacattacttttgttttatttttattaacacatttgcgttaaaacgttcaaatatgaagactgaaaaaatgtttacttatttattcatttcatttaacgtaaatcactatgttacttacatcaaagtatttatttatttattacctatttgtaaccctttgtacatactgtacagacacaaagaactgattattgtagtcgatgatgatttgtaaatatgtatgttttattacaataaattttgtaaccac

SEQ ID NO: 4116 - DNA, 2538 bp, Diabrotica virgifera
  SmartBlast Evalue=4E-94; Info=Putative sugar transporter n=1 Tax=Lutzomyia longipalpis RepID=A8CWB1_LUTLO
gtgctctgtttgctttggtagatattaggtactacctataagtaatttgccgccgaggattatagagcaataaaattttattgttttataataacgtacatttatcagaaaaatggaaaacaaggaggatcgtggttacaaaaaagtaccagtccacgaagagggcgtagttgaagcagcgtatgcggctgaaagagacagtgtatatgtgaccaccactcttcctgggcctaccagtagaaatttcctttacatagcggcaagtgcagctaacatagcatcatttgtttgcggcacagcttttggatggacatctccagaaattccaaaactaaacaatttaacaacaactccactggcagaggttttaactccttcccaacaaggttgggtcggctcattcttaccattagcagcagctattggaccaattggaggaggaattatggcagacatgattggaagaaaaaaatcgttgctggtggctacactacctttcctactagcctttttattgaatgttatggccagcacagttttctatttttatgtttctagattcttgtgtggtttgggagtgggtatgatttttactgtcttgccgatgtatattggggaaatatctgatgatgaggtcagaggctcactagggtcatttatgcaactgttcatagtaattggactgctgttttcttatgcgcttggaccttatttaccagtaaaaacatttaatattatattactattccctccagtgatatttatagttctatttttcttgttcatacctgatagtccttactacctcatacagagtgatgatagcgaagctgcattagaagctctcattaaattaagaggtggaaataaatctttagctcaaaaagaattagaagtgatcaaacttcaagtagaggaagatcttaaaagtaaaggtagttttacaggtacttttaagacaatttttgattcgaaatcattaaaaatggctttgtttttagctcttgctttagtaagttggcaacagctttctggaattaacgtggtgttgttttacagtcaaaacatttttacagatgcaggcgtgtctatagctccagaaatatgtacaattatcataggagttgttcaagttctagcaagcggtgctactcctcttcttgtagagaagtggggtaagaggttcctattgatgttttctggtataggcatgttcatatctcagggtgtattaacatacttcttttatcttaaagataaccagcacaaagatgtctctaacatagggtgggtgccaattttaagtcttgtagtcttcattattacgtattgtcttggtttcggacctctaccatgggcagttatgggagaattgttcccaggaaatgtcaaatctgtagcctctacagctacggcttcattttgctggatccttggcttcttgctaactaactactttggtgcagttgcaggagttataggaaaatctggatcttttggtttcttcacaatttgctgccttttgtcggctatttttaccttcaaatttttacctgagactgcgggaaagagtcttaacgaaattcaggctcttctggccggaaaaaaataaatgacaattattaaatgttgttatattttgatttctattttttcaataggctgtccaggttaagactgctaatcattccaaaaacgttacttactataccgaaaagaggttatcctttttaggtgcaaataaattaacattactttatacaagtgctttaagaaagtcttataaataaaaataaataattttgtatccaaccagtacctcaatgtttatgacttgtggtagacaaggaaatgaatgcaggatttcagaaataataaaaggtctgtgccaaaagtatctgactttccaattccactatgcttttactgagtcacccagctcggggtatagttaatatttcccaataagctgaacaacacttcaccttcaagatatataatttcatcgtagcatttttgaataacgatgaaaaacgatgaaaacagaaactgtttggcgcgaaattataaacgaaggtcagataattttggaatggcgcagtctgtgtgtctcttacctcatcaccaatattgggagtattttttcaatgcactatagcaatattttaagattacgatattaacaatcgagaagtttatctgtatcaactactataaaagtgctttgaagaaatgcctttatttttataaccacaatattttatattttctatagtcatccttcttatacattacttttgttttatttttattaacacatttgcgttaaaacgttcaaatatgaagactgaaaaaatgtttacttatttattcatttcatttaacgtaaatcactatgttacttacatcaaagtatttatttatttattacctatttgtaaccctttgtacatactgtacagacacaaagaactgattattgtagtcgatgatgatttgtaaatatgtatgttttattacaataaattttgtaaccac

SEQ ID NO: 4117 - DNA, 2488 bp, Diabrotica virgifera
  SmartBlast Evalue=2E-64; Info=Chondroitin 4-sulfotransferase n= 1 Tax=Aedes aegypti RepID=Q17NH2_AEDAE
ataaaaccgaaagcaactattagtgaaggtgtcctgtatggtcaataataaaatatcccacagaaaggtactacagttttagatcttaagaaagcaatacggcgttcttttacactaaagcagcagcgacaaagaattaaaacgaaaattagttggagatacgtatggaaaacattttaccttcaaaatatccagaatggacaggtgatgaaaaatgataaaaaggaagtatctgcatatggaatagtaaataaatcccaaataagatttgttaaacgattacgaaaggaagcttcaaaaagtgagtcatgctgactcaatatgccaagaaaaattgtaaatttaaaatggagtccacttctagccttagttattatccctttagcagctctcgaaagtgacagatatccctggctggaccaaattgccagacaggagcaagtattagaaggctgtgataatatgggtttaaggtttaaaattaaaaatacatttaatgtaaataagctagatcatattttagttgatcataatcataaactactttattgctacgttccaaaggttgcctgtacgaactggaaaagggtgatgatggttctaactggggaatcaaataccacaaatccaatacaaatttcagcaagtgctgcacatttggataattcaacgttaaaactatctcagctaaatttgatggaagtaaaagaatgtcttagagactatacgttatttttggttgctagacatccttttgaaagattgttgtcagcttaccagaataaatttttggacaattcgccgaacaacaaatatttcaaacttcgttatggaaaacacatcatcggaaaatatcgtcaacatccttcaaaagaggacttacaaacaggcgccaacgtgacattccgggaattcatccaataccttatcaaagaaggagtccgaacaaacgaacattgggcccctatatatgacctatgcctgccatgtacacttaattatacatttataagccactatgagactattaatgatgactcctcgaccatcttgagaatggttaaggcgccgaatttgttatttcctgtgaccagatcaaaaagaaccaaggataatttgaggttttattttcaacagttgtcaatctacgagatagaatttctctataaattatacgaggctgattttaaattgtttgggtatggtcttgaagatatattaggttatgacctagcttaattttatgaatttggttttgaaacggatagcgctaatcgaaaaggaaccaagcgacatttgacaaaaaatgagttaatagcaccaaacgacagccagatattcactttatatgtgtaaaaaaatccgtacgtctacggagcttctagcgacagctgtagaaaaaaggtccaagcgacaatcgaaaaaacaggcagttttctttaatataaaaagacccaagcagtggtttcttttatatttttgcaataaatgcaaccaaacgacctgtaaggcagttgattccttttataatattgcaaatattgtaactaaacaacatgcaaggcggtctcttttatattattgcagtattttccaaacgacatgcaaggcggttggttccttttatattattgtggacattaagtctttattccagtttcttccaaaagctgctcttcaattctacaaaattaaaaacatagatgatattgaaggatttggttccttgcctaactttgatttgaacgcagaagaaatttaatgaaagacatattttagcaaatgttacgttcctacacttgaatattagttttaaaatatttattgcttgtttagaatttttaattttatgagtttttaaagatttttttttattactcatcttgaatagattgatatgaataagaaaattaacgcagatattttttgtgaaagagagattaagaaaagttacgttcctacacttgagtatgattagttttagagagtttttttgtttgttaaaaatttttgattttatgagttttaagattttctattatttcttaaattaattaagaataagaaaataaccaaggatatatctttttaaagataggtaaaatcgtacctatactatgagttttagttttataagtttaatgtttggctgaaattttcgagttttttattaccttaaaagtaaataaatataaatttttatcacaagtatcgtatttcttatttctattcttctataggtagtttaaaggtttaaaaaatttacatttttttaataacaagtattttcttttttctaatattattatagtaaagtaaaatttctagaaagaaccattctagattttcttaatctctaaacagaaccatatgagtctcatggttccatttataccagtaaatagtttttctgaaataattgaaaaagaactaaccacgaaaacactgtcaaaaaaacaaaaaaaagttaactttttttgtaaaaaaa

SEQ ID NO: 4118 - DNA, 2476 bp, Diabrotica virgifera
  SmartBlast Evalue=2E-64; Info=Chondroitin 4-sulfotransferase n= 1 Tax=Aedes aegypti RepID=Q17NH2_AEDAE
ataaaaccgaaagcaactattagtgaaggtgtcctgtatggtcaataataaaatatcccacagaaaggtactacagttttagatcttaagaaagcaatacggcgttcttttacactaaagcagcagcgacaaagaattaaaacgaaaattagttggagatacgtatggaaaacattttaccttcaaaatatccagaatggacaggtgatgaaaaatgataaaaaggaagtatctgcatatggaatagtaaataaatcccaaataagatttgttaaacgattacgaaaggaagcttcaaaaagtgagtcatgctgactcaatatgccaagaaaaattgtaaatttaaaatggagtccacttctagccttagttattatccctttagcagctctcgaaagtgacagatatccctggctggaccaaattgccagacaggagcaagtattagaaggctgtgataatatgggtttaaggtttaaaattaaaaatacatttaatgtaaataagctagatcatattttagttgatcataatcataaactactttattgctacgttccaaaggttgcctgtacgaactggaaaagggtgatgatggttctaactggggaatcaaataccacaaatccaatacaaatttcagcaagtgctgcacatttggataattcaacgttaaaactatctcagctaaatttgatggaagtaaaagaatgtcttagagactatacgttatttttggttgctagacatccttttgaaagattgttgtcagcttaccagaataaatttttggacaattcgccgaacaacaaatatttcaaacttcgttatggaaaacacatcatcggaaaatatcgtcaacatccttcaaaagaggacttacaaacaggcgccaacgtgacattccgggaattcatccaataccttatcaaagaaggagtccgaacaaacgaacattgggcccctatatatgacctatgcctgccatgtacacttaattatacatttataagccactatgagactattaatgatgactcctcgaccatcttgagaatggttaaggcgccgaatttgttatttcctgtgaccagatcaaaaagaaccaaggataatttgaggttttattttcaacagttgtcaatctacgagatagaatttctctataaattatacgaggctgattttaaattgtttgggtatggtcttgaagatatattaggttatgacctagcttaattttatgaatttggttttgaaacggatagcgctaatcgaaaaggaaccaagcgacatttgacaaaaaatgagttaatagcaccaaacgacagccagatattcactttatatgtgtaaaaaaatccgtacgtctacggagcttctagcgacagctgtagaaaaaaggtccaagcgacaatcgaaaaaacaggcagttttctttaatataaaaagacccaagcagtggtttcttttatatttttgcaataaatgcaaccaaacgacctgtaaggcagttgattccttttataatattgcaaatattgtaactaaacaacatgcaaggcggtctcttttatattattgcagtattttccaaacgacatgcaaggcggttggttccttttatattattgtggacattaagtctttattccagtttcttccaaaagctgctcttcaattctacaaaattaaaaacatagatgatattgaaggatttggttccttgcctaactttgatttgaacgcagaagaaatttaatgaaagacatattttagcaaatgttacgttcctacacttgaatattagttttaaaatatttattgcttgtttagaatttttaattttatgagtttttaaagatttttttttattactcatcttaagaataagaaaattaacgcagatattttttgtgaaagagagattaagaaaagttacgttcctacacttgagtatgattagttttagagagtttttttgtttgttaaaaatttttgattttatgagttttaagattttctattatttcttaaattaattaagaataagaaaataaccaaggatatatctttttaaagataggtaaaatcgtacctatactatgagttttagttttataagtttaatgtttggctgaaattttcgagttttttattaccttaaaagtaaataaatataaatttttatcacaagtatcgtatttcttatttctattcttctataggtagtttaaaggtttaaaaaatttacatttttttaataacaagtattttcttttttctaatattattatagtaaagtaaaatttctagaaagaaccattctagattttcttaatctctaaacagaaccatatgagtctcatggttccatttataccagtaaatagtttttctgaaataattgaaaaagaactaaccacgaaaacactgtcaaaaaaacaaaaaaaagttaactttttttgtaaaaaaa

SEQ ID NO: 4119 - DNA, 2500 bp, Diabrotica virgifera
  SmartBlast Evalue=1E-132; Info=Endonuclease-reverse transcriptase n=1 Tax=Bombyx mori RepID=D7F170_BOMMO
tgttttttctccatctatttgtactatgatgttatctccttttctttttggatctctcccattatcatatactttgtcttttcttcatttattttaagaccgaattttttggcatctgttattatgtttttcattaacttttgtagttcttttttgcttgttgctaatagcgtcagattatctgcaaatgctatgcattggtggccgtttttaaatatcgtttattgcatgtttattctgcttttcctgattattccttccaatgttagattgaatgccgttgttgatagtgggtctccttgtcgtaatccttccttggtttcaaactttttggatgtataccctttccaagctatttcgtttgttgtgttttccatcgtcatctttatcatcctgacaattttacttggtatccccaattctttcatcagttcgtacatctgctgtctatttactgtgtcgtaagcctgcttaaagtctatgaacaaagcatatagtactgttttatgttcgtaacaggtagtctgtatttcttttaaggcaaatatttggtcagtcgttgatctgttgtttctaaaacctgcctggtattcccccagtattttttccgaataatgacttagccttttacttatactttgtgccaagattttgtaaactatttctaatagtgcgatgcctctgtagttttcgcatagcattctatcaccttttttatgtatagggcatattcttgctatggtccactcttctggcattttttctacttcccatattctttttatcagatcatatatctctttctgtagtcttttccctcctgattttatcatttcggccgatatttctgttattcctgggcttttgttatttttcaagctctttatttcgttctttatttcttgttctgtgggtatttctattgctatctgatcatcttcaatttcatggtttgtttccttttgtacttcgctcttatttagcagttctgtgaaatagttttgccagttttccattattttttccggctcatttagcaacatccctttatcatctctcatatatgggttgtttttttgatatcctctttccattttttttgcttcctggtagaatgatcttatttctttttttgaaatttttcttctatttctttcagtttgttctcgttgtattttctctttttgctttctacattttcttttcatgatttttctcaattctctgtattcttctctagtgctttcttcgtcatttgtgagatttttgagtcttacttttcttattgcttctgctatttcttgacattcttcatcataccaatcttttgttttgtgttttcttttggttttcgctaggattgctttacttgtgtccaagattgcttctttgatattttgccattgtttgtctgggcttgacgtttcttgttccctgattagtctgttggttattccctgttcatacttcttctgtgtgttgttatcttttagtagtcctatgttaaattgttttccaattttttctgttgttttattgtttcgctttatgttatgctcgattttatattctgctctcaccaggtagtggtcagagttacagtccgctcctctcatgctctttacatttattacattgtttgcatgcttcttctctattaaaatatggtctatctgatttactgtcttcttatcaggggaaatccacgttcctttatatatattcttttcggcgtaattgtgtgcttctatcaccatttgcctttctgttgcaaagcctattattctttggccattatcgttcgacacctcatgcttactatatttccctattatgtgttcgtatatattctctcttcctactttggcgttgcagtctcccattattattttgatgtcaaaccctggtaatttatcatattctctttccaattgctctagaattcatctttttcttcttctgtggcatcttcaatcggtgcgtgtacatttattatacttatgtttcgtttgtccccttttaatcttattgtgcatagtctatctgatattggttggaatgccattactctttccttccattttcgctgtattataaaacctgttcctaaccttctggtttctcccccgcttttaaaaaataccacgtcttctatttctactatttctgtctccaattgttttgtctcttgtaaagctattatttctacattatatcttttaatttctctaattaattctttgagttttcctgtttcgtatgtgcctcttacattccatgtacccaagttgactttagttttctttttgttatttttacttattgccttgtccattgcctgcgtcgtttccgtcttatttatctctgttgcaaactgtatcttgtcatttttcggcttttcttttttattgctgtcttgatttgttttatttccatagttcgtaatcctattctttgcatttttcgtcgtcatttgtttcctttcattgctattgcttag

SEQ ID NO: 4120 - DNA, 2410 bp, Diabrotica virgifera
  SmartBlast Evalue=1E-102; Info=Endonuclease-reverse transcriptase n=1 Tax=Bombyx mori RepID=D7F170_BOMMO
tgttttttctccatctatttgtactatgatgttatctccttttctttttggatctctcccattatcatatactttgtcttttcttcatttattttaagaccgaattttttggcatctgttattatgtttttcattaacttttgtagttcttttttgcttgttgctaatagcgtcagattatctgcaaatgctatgcattggtggccgtttttaaatatcgtttattgcatgtttattctgcttttcctgattattccttccaatgttagattgaatgccgttgttgatagtgggtctccttgtcgtaatccttccttggtttcaaactttttggatgtataccctttccaagctatttcgtttgttgtgttttccatcgtcatctttatcatcctgacaattttacttggtatccccaattctttcatcagttcgtacatctgctgtctatttactgtgtcgtaagcctgcttaaagtctatgaacaaagcatatagtactgttttatgttcgtaacaggtagtctgtatttcttttaaggcaaatatttggtcagtcgttgatctgttgtttctaaaacctgcctggtattcccccagtattttttccgaataatgacttagccttttacttatactttgtgccaagattttgtaaactatttctaatagtgcgatgcctctgtagttttcgcatagcattctatcaccttttttatgtatagggcatattcttgctatggtccactcttctggcattttttctacttcccatattctttttatcagatcatatatctctttctgtagtcttttccctcctgattttatcatttcggccgatatttctgttattcctgggcttttgttatttttcaagctctttatttcgttctttatttcttgttctgtgggtatttctattgctatctgatcatcttcaatttcatggtttgtttccttttgtacttcgctcttatttagcagttctgtgaaatagttttgccagttttccattattttttccggctcatttagcaacatccctttatcatctctcatatatgggttgtttttttgatatcctctttccattttttttgcttcctggtagaatgatcttatttctttttttgaaatttttcttctatttctttcagtttgttctcgttgtattttctctttttgctttctacattttcttttcatgatttttctcaattctctgtattcttctctagtgctttcttcgtcatttgtgagatttttgagtcttacttttcttattgcttctgctatttcttgacattcttcatcataccaatcttttgttttgtgttttcttttggttttcgctaggattgctttacttgtgtccaagattgcttctttgatattttgccattgtttgtctgggcttgacgtttcttgttccctgattagtctgttggttattccctgttcatacttcttctgtgtgttgttatcttttagtagtcctatgttaaattgttttccaattttttctgttgttttattgtttcgctttatgttatgctcgattttatattctgctctcaccaggtagtggtcagagttacagtccgctcctctcatgctctttacatttattacattgtttgcatgcttcttctctattaaaatatggtctatctgatttactgtcttcttatcaggggaaatccacgttcctttatatatattcttttcggcgtaattgtgtgcttctatcaccatttgcctttctgttgcaaagcctattattctttggccattatcgttcgacacctcatgcttaatgtatttttctatactttccaattgctctagaattcatctttttcttcttctgtggcatcttcaatcggtgcgtgtacatttattatacttatgtttcgtttgtccccttttaatcttattgtgcatagtctatctgatattggttggaatgccattactctttccttccattttcgctgtattataaaacctgttcctaaccttctggtttctcccccgcttttaaaaaataccacgtcttctatttctactatttctgtctccaattgttttgtctcttgtaaagctattatttctacattatatcttttaatttctctaattaattctttgagttttcctgtttcgtatgtgcctcttacattccatgtacccaagttgactttagttttctttttgttatttttacttattgccttgtccattgcctgcgtcgtttccgtcttatttatctctgttgcaaactgtatcttgtcatttttcggcttttcttttttattgctgtcttgatttgttttatttccatagttcgtaatcctattctttgcatttttcgtcgtcatttgtttcctttcattgctattgcttag

SEQ ID NO: 4121 - DNA, 2400 bp, Diabrotica virgifera
  SmartBlast Evalue=0; Info=S-adenosyl methionine synthetase n=3 Tax=Culicidae RepID=B0W244_CULQU
atcaataacaagatcgtgtgtatctctgtttcctatactgcgagatttaactcttctacgtttgcttatagtttttcgtttgctctctcaagtgttagtgtgatttcttaaaaaaaaaagaaagagcgtaattctgccgaaagacgccaccgcgccgccaatacccacagcgaattcaatcacgtggtcgtagcagaggttataagtagcgccgtccccgtatattccgtctcttttccaaagtaactaaagaaagaagtacaagtacagtgatcagtggtctgcgaaacatcgaggttcagaatgccagaaacaacatcgacaaatggatattcaaacggccattccggctacgaaatggcggatggtgctgaatttctcttcacatccgaatccgtcggagagggacatccagataaaatgtgtgatcaaatcagtgacgccatcttagacgcacatcttgaacaagacccaaatgcaaaagttgcctgtgaaaccgttgcaaaaactggaatgattcttctcgccggtgaaattacatcaaaagctgtggtcgactatcaaaaagttgtcagacaaactgtaaagcacataggatatgacgactcttcaaaaggatttgaccacaagacatgcaacgttttattggcattggatcagcagtctccagacattgctgctggagtgcacataaacaaaaacgaggaagaaattggagctggtgaccagggtcttatgttcggttatgccacggatgaaacagaagaatgtatgccacttacagtagtattagcacacagattgaatcacaaaattgctgatttgagacgatctggagaattctggtgggccagaccagactcaaaaacacaggttaccgcagaatacactttccaacgtggcgcttgcattccacaaagagttcacacagttgttgtttcgctccaacacagcgacaaaatcagcttggaagaattgagaaccgaaatcaaggaaaaagttattaaagaagtaattccagccaaatacctcgatgaccaaacagtcattcacatcaatccatgcggtctcttcatcatcggaggacctcagagtgacgcaggcctaactggtagaaaaatcattgtagacacttatggaggttggggagcacatggaggtggcgctttctctggaaaagattttacaaaagttgacagatctgccgcttacgcagctagatgggtagctaaatcattggttaaagcaggactttgccgaagatgcttagtgcaagtatcatacgctattggtttagccgaacccctttccattacagtatttgattatggaacttcaaaactcactcaaaaggaattgttggacattgtaaacaagaacttcgatttaaggcctggtaaaattgtcaaagaattaaatctgagacaacccatctaccaaaagaccagcacctatggccacttcggacgggacggttttacgtgggaacagcccaaaacactacaactaaactgacaaccttccgtaacaatattttagaaatcttttattgacgcactagatgcctccttctagattttaagtttagaaaaaacttctgtgattggcgctctgaaccttgagaccgacgcgattttttgcctctctgaatcggaaacattctacagagcaaagtatcgcgtactaacaagtaactgtcgcaaaacgtgcccacagattcccgatatagaccacagtggcgtttcaagcgttactgcaattcagtgtgagtcaaacgttcagtttcaagttagatattactcgcacattgtgttgtgtttaagagaaaaaataatttggaaaagagcatttctataaacactccggactgtattgggaatggtggtcatccatgcatgaaaagttcttgcaaaaacaatatttatatattatgtattttatacaactcatcagtgttcactggttgtaaattatattttattctaattttttaacctacaactctacattccttgttattttaaaataatcgtcaaattaacatagaatttgcaagaaacatgtacaatgggcatttaagatctgctgccgtttgatatagaattcccttagtgttaattttattgatttgattttgtaaactgtagatgaataattattgtagatgatagtttgaatgtatagattttattgtacctatgtaatttattatgagaggataaaacgatctatatgttgtatacaattgatttaagtaagtttggtagatgtattgtccaatgtagatcgtaaaatttggtgtaattttttatagcatagtttattttttaaataacccaactgatactctattgctctattcaaattgtgcttttttgtctaagaaataaaatagttgtg

SEQ ID NO: 4122 - DNA, 2400 bp, Diabrotica virgifera
  SmartBlast Evalue=0; Info=S-adenosyl methionine synthetase n=3 Tax=Culicidae RepID=B0W244_CULQU
atcaataacaagatcgtgtgtatctctgtttcctatactgcgagatttaactcttctacgtttgcttatagtttttcgtttgctctctcaagtgttagtgtgatttcttaaaaaaaaaagaaagagcgtaattctgccgaaagacgccaccgcgccgccaatacccacagcgaattcaatcacgtggtcgtagcagaggttataagtagcgccgtccccgtatattccgtctcttttccaaagtaactaaagaaagaagtacaagtacagtgatcagtggtctgcgaaacatcgaggttcagaatgccagaaacaacatcgacaaatggatattcaaacggccattccggctacgaaatggcggatggtgctgaatttctcttcacatccgaatccgtcggagagggacatccagataaaatgtgtgatcaaatcagtgacgccatcttagacgcacatcttgaacaagacccaaatgcaaaagttgcctgtgaaaccgttgcaaaaactggaatgattcttctcgccggtgaaattacatcaaaagctgtggtcgactatcaaaaagttgtcagacaaactgtaaagcacataggatatgacgactcttcaaaaggatttgattggagaaccctgaatttgctagtagctttagaagaacaatctccgaatatagcagaaggtgttcacggaaacagagacgaactagaaataggggcaggggatcagggtcttatgttcggttatgccacggatgaaacagaagaatgtatgccacttacagtagtattagcacacagattgaatcacaaaattgctgatttgagacgatctggagaattctggtgggccagaccagactcaaaaacacaggttaccgcagaatacactttccaacgtggcgcttgcattccacaaagagttcacacagttgttgtttcgctccaacacagcgacaaaatcagcttggaagaattgagaaccgaaatcaaggaaaaagttattaaagaagtaattccagccaaatacctcgatgaccaaacagtcattcacatcaatccatgcggtctcttcatcatcggaggacctcagagtgacgcaggcctaactggtagaaaaatcattgtagacacttatggaggttggggagcacatggaggtggcgctttctctggaaaagattttacaaaagttgacagatctgccgcttacgcagctagatgggtagctaaatcattggttaaagcaggactttgccgaagatgcttagtgcaagtatcatacgctattggtttagccgaacccctttccattacagtatttgattatggaacttcaaaactcactcaaaaggaattgttggacattgtaaacaagaacttcgatttaaggcctggtaaaattgtcaaagaattaaatctgagacaacccatctaccaaaagaccagcacctatggccacttcggacgggacggttttacgtgggaacagcccaaaacactacaactaaactgacaaccttccgtaacaatattttagaaatcttttattgacgcactagatgcctccttctagattttaagtttagaaaaaacttctgtgattggcgctctgaaccttgagaccgacgcgattttttgcctctctgaatcggaaacattctacagagcaaagtatcgcgtactaacaagtaactgtcgcaaaacgtgcccacagattcccgatatagaccacagtggcgtttcaagcgttactgcaattcagtgtgagtcaaacgttcagtttcaagttagatattactcgcacattgtgttgtgtttaagagaaaaaataatttggaaaagagcatttctataaacactccggactgtattgggaatggtggtcatccatgcatgaaaagttcttgcaaaaacaatatttatatattatgtattttatacaactcatcagtgttcactggttgtaaattatattttattctaattttttaacctacaactctacattccttgttattttaaaataatcgtcaaattaacatagaatttgcaagaaacatgtacaatgggcatttaagatctgctgccgtttgatatagaattcccttagtgttaattttattgatttgattttgtaaactgtagatgaataattattgtagatgatagtttgaatgtatagattttattgtacctatgtaatttattatgagaggataaaacgatctatatgttgtatacaattgatttaagtaagtttggtagatgtattgtccaatgtagatcgtaaaatttggtgtaattttttatagcatagtttattttttaaataacccaactgatactctattgctctattcaaattgtgcttttttgtctaagaaataaaatagttgtg

SEQ ID NO: 4123 - DNA, 2386 bp, Diabrotica virgifera
  SmartBlast Evalue=1E-125; Info=Amino acid transporter n=2 Tax= Aedes aegypti RepID=Q16XD9_AEDAE
atttaaatttattatgtagaaaatatatttatattattaataaatattaaggttgtcctttctcgtatgtacagtcaatagtcaacattatttacaattggaatgccaaggagacaacaaaataaaaaaaatattattatattccccaatatttacgtacggtaaatactcccaattgatctttttaacaagaagagtttacttcactttttctgcgtaaattgttcataaaaaatatttactgtttattgcaaatattgcacatattctcagaaaataattacaactatatctacataaaaaaatatttacaatctgtgagtcttattctactatcacccgcactttggtcaacaaaactaactttagtctaggcaggctctgttgatattttctatggaaaatagtcctatcgggctctatttttgcaggaatcacttcaggatgtagtgaatccatggaatcactgggatcctgaagtgagtccagcaaaaaatagactcctatggaaattgtccacatcaaaacatatcctgcctggactacttgcacaaaatttagtgacacttgcgtgaaatttacgttcaatctcacctatacacctgtacaatttgaggtgtcttttcaacgtaaatttaacgtaaaaatatcacgttaaagaccactggttcacaaagataatctctcttcgaataaaatcaggtgaagttcacgtaatacttttcgttctctgatagaacatctaccaaattgttccttttttactcatttgaaaatttattgatgatttcgttcaaactcgtggaggtgccgacgataagtccaaagaatcccaacaagatgataaggcagttcttgatcatggtaaatattctcgtcttgccggtacgttggtgccagtaggtgcccatgtccaccatagcagggatgaagagtcctagtccggagagagtcaatgctccgaacagggagatgaagagatcgatgtagggaactgctaccgcaagaacaaaacaaaaggtaaccaagaagactctcgtgacgtattccaaaagtaccaaatggtttgatccagtgagtaatggcaataaatatatgtcccatacggttttaatggcaggatataattgaagaccatgagtgacatagatggacatagacaatagaattctgcatatttggccgggtatatcgtccccaatcgacagagagatagaaccttgcactgagctgccataggcgatatatccgaagaatcccatggacgtgtacagtatagtgatcactaccatacctttgtttaaaactccaaaagggcttccaaagttctgcggcgttttcatttcgttttccagtggcattatcacaccgattgcttctaacgcaaaaagaacagttccgaagaacaagggataattcttcacctccccgaacggctctttaccgtcaaaggtaaagtctctactgaacatatagtaagcaatgattccaaaactgaccatggtgatgatattggcgaacgtggatagcggtgctagatatttcaagtttttcacgcagttgatcagtatcagaggtagcagggcggccaacatgactagttttacgtttacggtgataccgtgtgcggcgaatacgcctgagatgttgtctccgatgaagattgtgtagacagcaccagagcccagttgataaattaggaggaatatgtttaccatatgcggtgctataaaggcaatccgtcgttgaaagggaggtccttcttgaaagccagccagagcagtttcagggtaggacatcacagccacttttcgtctcttgcataactcatattcagctcttattagaaggtgaatgcagtgagtacataaaaatccgataattgccgtccctactgctcccaagaggtatcctgagtggtagaaggccatgggcatcgccaggattcctgttccgagactccctttgagaagatgcaaaaaagtttctgtatccgtggtagggtgttccacatctcgccatctatacggatcatattcgcctgcttctagtgactttttgcgatcatttaattcgactgtaaagaaaccgttgtctttgctatgtctggcaagctgatttttgttggtttcgcttcctggatattcattatgatttccatatgtaccatctccagcaaatccttgattgtcatacccggacatctttcgtcacttacagatgcaccacttatcctgtcaaaacaaagtcaccactaattaataattcgaatttcttgaacccgaatatcattcaccaatcgcaccggcttttagtatataaaaaattcaacgcaaccaaaaattcgaatagttttagtcctggcctggtaggtggcgagcctcgg

SEQ ID NO: 4124 - DNA, 2386 bp, Diabrotica virgifera
  SmartBlast Evalue=1E-124; Info=Amino acid transporter n=2 Tax= Aedes aegypti RepID=Q16XD9_AEDAE
atttaaatttattatgtagaaaatatatttatattattaataaatattaaggttgtcctttctcgtatgtacagtcaatagtcaacattatttacaattggaatgccaaggagacaacaaaataaaaaaaatattattatattccccaatatttacgtacggtaaatactcccaattgatctttttaacaagaagagtttacttcactttttctgcgtaaattgttcataaaaaatatttactgtttattgcaaatattgcacatattctcagaaaataattacaactatatctacataaaaaaatatttacaatctgtgagtcttattctactatcacccgcactttggtcaacaaaactaactttagtctaggcaggctctgttgatattttctatggaaaatagtcctatcgggctctatttttgcaggaatcacttcaggatgtagtgaatccatggaatcactgggatcctgaagtgagtccagcaaaaaatagactcctatggaaattgtccacatcaaaacatatcctgcctggactacttgcacaaaatttagtgacacttgcgtgaaatttacgttcaatctcacctatacacctgtacaatttgaggtgtcttttcaacgtaaatttaacgtaaaaatatcacgttaaagaccactggttcacaaagataatctctcttcgaataaaatcaggtgaagttcacgtaatacttttcgttctctgatagaacatctaccaaattgttccttttttactcatttgaaaatttattgatgatttcgttcaaactcgtggaggtgccgacgataagtccaaagaatcccaacaagatgataaggcagttcttgatcatggtaaatattctcgtcttgccggtacgttggtgccagtaggtgcccatgtccaccatagcagggatgaagagtcctagtccggagagagtcaatgctccgaacagggagatgaagagatcgatgtagggaactgctaccgcaagaacaaaacaaaaggtaaccaagaagactctcgtgacgtattccaaaagtaccaaatggtttgatccagtgagtaatggcaataaatatatgtcccatacggttttaatggcaggatataattgaagaccatgagtgacatagatggacatagacaatagaattctgcatatttggccgggtatatcgtccccaatcgacagagagatagaaccttgcactgagctgccataggcgatatatccgaagaatcccatggacgtgtacagtatagtgatcactaccatacctttgtttaaaactccaaaagggcttccaaagttctgcggcgttttcatttcgttttccagtggcattatcacaccgattgcttctaacgcaaaaagaacagttccgaagaacaagggataattcttcacctccccgaacggctctttaccgtcaaaggtaaagtctctactgaacatatagtaagcaatgattccaaaactgaccatggtgatgatattggcgaacgtggatagcggtgctagatatttcaagtttttcacgcagttgatcagtatcagaggtagcagggcggccaacatgactagttttacgtttacggtgataccgtgtgcggcgaatacgcctgagatgttgtctccgatgaagattgtgtagacagcaccagagcccagttgataaattaggaggaatatgtttaccatatgcggtgctataaaggcaatccgtcgttgaaagggaggtccttcttgaaagccagctaaagcggtctccgggtaagacatcacagccactttccgtctcttgcacagctcatattcagctcttattagaagatgaatacagtgagtacataagaatcctataatagctgttcctactgctcccaagaggtatcctgagtggtagaaggccatgggcatcgccaggattcctgttccgagacttcctttgagaagatgcaaaaaagtttctgtatcagtggtagggtgttccacatctcgccatctatacggatcatattcgcctgcttctagtgactttttgcgatcatttaattcgactgtaaagaagccgttgtctttgctatgtctggcaagctgatttttattggtttcggttcctggatattcattatgatttccatatgtaccatctccagcaaatccttgattgtcatacccggacatctttcgtcacttacagatgcaccacttatcctgtcaaaacaaattcaccactaattaataattcgaatttcttgaacccgaatatcattcaccaatcgcaccggcttttagtatagaacaaattaaacgcaaccaaaaattcgaatagttttagtcctggcctggtaggtggcgagcctcgg

SEQ ID NO: 4125 - DNA, 2365 bp, Diabrotica virgifera
  SmartBlast Evalue=3E-43; Info=Endonuclease-reverse transcriptase n=1 Tax=Bombyx mori RepID=D7F159_BOMMO
atttttcaacataatatgatttataatgttttatttaattctaattactattttttcattttgggccctgcgaggccccctttgaggccgaggcccctaggcaactgcctactttgcctaatggttaatctggcactgaatacgcagattgttttgaataaataaagtaatcacatatgctgtcttaactaacgtgacaaacgacgctttcaacacataatgccttctctacacatcggcagacgcgtctacggatgcatctgtcgatgtatcatcacgagctgaccacacatctgtaggtacacatctgtaaatcgttcagtctgtgctaattctcgggtgacgcaatatctactttgaattcactgcgaaaactaatgcgccgtagaggtcagaggtcagatgtgtagagaggcatcgggcgttcgctttgatctgtgctaggaaaaccgacaacaatcggatatttcgcggacgcgtccgccgacgtgatatataaacaacaaacgatcaaatttacccatctacacatctaacaatacacatgaggacatcacaatgaggataggacaagatgaaatagaacaagttcacgattatatatatctgggcaaattataaaacttaacaaggaaaaccaaacagcagagatcaaaagacgagttagactggcatgggcggcatttggaaaactaagctacatccttaaaaatcaaaagatatccacaacatcttaagaccaaggtatacaatcaatgcgtactccctgttctcacttatggttcccaaacgtggacgtttacaaaagcaaacatggacaagatcataaaaacgcaaagagcaatggaaaggcaaatgttgcacataagactaatggataaaaatgagaaacgagtggataagagagaaaaccaaagttagggatgttagacaagaagttgtaaagttgaaatggagatttgccggacacactataagacaaaaagaagaccgatggaacaaaattctcataaattggagaccgtgggaatataaacgaagcagaggaaggacacaaatgagatgggcagatgatgtcaagaagcacgtgggctctaggtggataactgtagcgacagacagagaagaatggaaaaggattggggaggcctatgtccaaagatggaccgaagaaggctaattagaagtaccgctttactaccgaaccactttaaagaactcttgattgatacaattttacctttaaacatctaagaaatgattttggtatactcataaatcggcaatcagttcacagcttgaataataataaaatcttcttcttcatgtgccatggcctttcagaacgttggttaccatcatagctatcttaattttattcactgccaccctaaatacagttgagtccgcgagtctttacccgtgcgtcattaatacctgacgagataaaacacatactttttatctagcatcattctcttccatgcatgaaactcatgacaaaccagctgccgtttgttattaagtaacaacacatgttatttttatgaaccatctagactcagtgcattgaaaagagataggtacaaaaaaagacgattcggtatgttttcatattttaagcacaatttgtttgacgtttctgctttgtttacttttgtggctgtcagtcagttgaacttttttgcggtttttgtcgaatttttgcgttttgaagtttctttatattacacaaacagttgttttcacaactaattttatattgggctttgaaattttaaggtaaataattatattttggcaattaatatttaaaacatacaaagctaacgtcattcacacagtaaagaaatgactgtgtttagatttccgtcaaagtgaataaaataacaaaaataaaatatgttattgaatttttttataaattgtttatttatttattaatcaataataataaaagaatttattaagctacttcaaatgtagctgtaattctgcacaaaaattttgaagcaaaacttacatttgacattctatatatttgataacgtcaaattttataataaaacccgtaatcggaacagtagccactttctgtcagttgttgttgcgtgaaatagatttccgacttatttcgtatgctttaaatgatgacgcacgggtaaagactcgcggactcaactgtacttaaattagtaaatagcatttatagaaagtgactgtaatctgaacaattattataatgatagaatacataggcgaaataaagattgtttttagcgaacattttagaaaatatggaatatttctagctttcgtaaataagtgttgaatgttttacttttgactaccagttctacagtgt

SEQ ID NO: 4126 - DNA, 2365 bp, Diabrotica virgifera
  SmartBlast Evalue=8E-49; Info=Endonuclease-reverse transcriptase n=1 Tax=Bombyx mori RepID=D7F159_BOMMO
atttttcaacataatatgatttataatgttttatttaattctaattactattttttcattttgggccctgcgaggccccctttgaggccgaggcccctaggcaactgcctactttgcctaatggttaatctggcactgaatacgcagattgttttgaataaataaagtaatcacatatgctgtcttaactaacgtgacaaacgacgctttcaacacataatgccttctctacacatcggcagacgcgtctacggatgcatctgtcgatgtatcatcacgagctgaccacacatctgtaggtacacatctgtaaatcgttcagtctgtgctaattctcgggtgacgcaatatctactttgaattcactgcgaaaactaatgcgccgtagaggtcagaggtcagatgtgtagagaggcatcgggcgttcgctttgatctgtgctaggaaaaccgacaacaatcggatatttcgcggacgcgtccgccgacgtgatatataaacaacaaacgatcaaatttacccatctacacatctaacaatacacatgaggacatcacaatgaggataggacaagatgaaatagaacaagttcacgattatatatatctgggcaaattataaaacttaacaaggaaaaccaaacagcagagatcaaaagacgagttagactgtcatgggcggtatttgtcaaactaagctacatccttaaaaacaaaagatatccacaacatcttaagaccaaggtatacaatcaatgcgtactccctgttctcacttatggttcccaaacgtggacgtttacaaaagcaaacatggacaaaatcataaaaacgcaaagagcaatgtaaaggcaaatgttgcacataaaactaatggataaaaagagaaacgagtggataagagagaataccaaagttagggatgttagacaaaaacttgcaaaattgaaatggagatgtgccggacacaaaatataagacaaaaggaagaccgatggaacaaaattctcataaattggagaccgtggcaatataaacgaagcagaggaagaccacaaatgagatgggcagatgatgtcaagaagcacgttggctctaggtggataactgtagcgacagacagagaagaatggaaaaggattggggaggcctatgtccaaagatggaccgaagaaggctaattagaagtaccgctttactaccgaaccactttaaagaactcttgattgatacaattttacctttaaacatctaagaaatgattttggtatactcataaatcggcaatcagttcacagcttgaataataataaaatcttcttcttcatgtgccatggcctttcagaacgttggttaccatcatagctatcttaattttattcactgccaccctaaatacagttgagtccgcgagtctttacccgtgcgtcattaatacctgacgagataaaacacatactttttatctagcatcattctcttccatgcatgaaactcatgacaaaccagctgccgtttgttattaagtaacaacacatgttatttttatgaaccatctagactcagtgcattgaaaagagataggtacaaaaaaagacgattcggtatgttttcatattttaagcacaatttgtttgacgtttctgctttgtttacttttgtggctgtcagtcagttgaacttttttgcggtttttgtcgaatttttgcgttttgaagtttctttatattacacaaacagttgttttcacaactaattttatattgggctttgaaattttaaggtaaataattatattttggcaattaatatttaaaacatacaaagctaacgtcattcacacagtaaagaaatgactgtgtttagatttccgtcaaagtgaataaaataacaaaaataaaatatgttattgaatttttttataaattgtttatttatttattaatcaataataataaaagaatttattaagctacttcaaatgtagctgtaattctgcacaaaaattttgaagcaaaacttacatttgacattctatatatttgataacgtcaaattttataataaaacccgtaatcggaacagtagccactttctgtcagttgttgttgcgtgaaatagatttccgacttatttcgtatgctttaaatgatgacgcacgggtaaagactcgcggactcaactgtacttaaattagtaaatagcatttatagaaagtgactgtaatctgaacaattattataatgatagaatacataggcgaaataaagattgtttttagcgaacattttagaaaatatggaatatttctagctttcgtaaataagtgttgaatgttttacttttgactaccagttctacagtgt

SEQ ID NO: 4127 - DNA, 2298 bp, Diabrotica virgifera
  SmartBlast Evalue=1E-153; Info=Ctl2 (Fragment) n=1 Tax=Aedes aegypti RepID=Q17IP0_AEDAE
caatataaaatacattttttaaaaacattacaattacacactctaaaatatattatacatttgattaatcttttcaattttatcttttttggcattcgtcatagtctaaaggttcgtatctactgtatttacttatatcacagatattcttacaggtaaaattgtaaatactgccttacaattaatttaatctattttgttcttctttccaaatattttcattagactcttggacatgtagtaaggtttttctggagatccatcgtttctttcacaatcttccaaaaagcacaaaaatagcgtgtccacggccatagagtaaacattgaagaacaaggatgatatgaagtaagtgcaaatcataattactgcaaccggcacgattccgtaatggagatcagagttgtcgataacttttgtaggaagcaaccctgaggcgaagaacacatatgatgctgctccaactcctagcgtcagcaaaactttactgaggaagaaaaggaagtccgtaatcttatcaagcacccagactctcaggatattcctcatgagcagcataaacgcatctttggcactgacacaaaagtttttgccgtgaatggaacacattatgtaagcgttcttgttaaggaaacgtaggaatttctcgagacagtagaagaagcacttgaatatgcacatgatggctttggtgagatcattatcgtactttttaactttatgatcgacgtattctaggaagagtctgattagcttgcaaatggctattatcaaagatccgaacgctaaagtgccgatgtggtaccttagggttctcgcgaatgctgaagtaaccgcaaagaaaggcaaacgtgattttttaaatgtccagtaccattgagcaaaaactcctgccagtaccatctgtcccaatgcaataacaaagcataacaaccaaaagaaggcgaatatgttgtaagcttgtaaatatggatacatcacatcattattcattcttataaatttacaagtggcattggaaccacacaatggattccttgaataatcatttttactccaatcatctggattacatacaacatcatcgtccaacccagtgactttataacaatcggtcatcgaataatatctggttttgtataatggtttaccaacagttgcgagatatatacctactgcgatagaatacgctatcacaccaaactgtagaatccatggtaaaatggggaagaataatgcagctgtcactgatcctacggccttgcttccttctttgattagagttatggcaagcacgattcgttttcggagaacaagaagtataagcaatatcaccactaatacaattgctacgattactacgcatgtaagccataaatccttggttgtttttaattgtttttcgcgcagttccttttcttcttcgtattgcgttttggcgttgtcggcgaggtcgtttagagcatgcttgtattggactattgagaaatacaatcctgcacctaatccgatgacaacaccaataatagaaagccatactaaaggacctgcgaaccacctcagaataaatatatagaataaacacaccaccaatgcaataacaacacctattgcaattttccaccaacatttgattaaatcttcaattacattttggccgatctcttgaaaatcatataatagcttgatattgtttactgctttcttcaaatttcccagcgactcaccaatttgctttaacatattttcatcaattttagccacgtttggaatacatcgtttttgaagagatgtactgggtaacacatatggtggacaatccgtaccctcaaaaagatattcaccgcagtcgttagttttacgatccaggtaatacttaaattcggatggacatgacgaaacacaaacttgtggtgttttgcatccagtgaaaggtgtggatggatccaaacatttagttatatcgtgaaagagcaaatacggtttattcaggacatcagtatctctgccacatcgccttccaagtgtatcccttggaaccagtagagttgagggatttccatttgtgtaggcatatattccaattccaatccaagcgccgatgaaaaccaaaaatatcattagacaaagaatatccgtacatgatctttttcttaaaggaccattgaaatcaggatcatatggaataggttcccatttaatattttctctgtgcattttcacaatagaaacattaactaggaccacaaactattttttcaacctccgaaccatggtcagttgacatcatttgtcgac

SEQ ID NO: 4128 - DNA, 2298 bp, Diabrotica virgifera
  SmartBlast Evalue=1E-151; Info=Ctl2 (Fragment) n=1 Tax=Aedes aegypti RepID=Q17IP0_AEDAE
caatataaaatacattttttaaaaacattacaattacacactctaaaatatattatacatttgattaatcttttcaattttatcttttttggcattcgtcatagtctaaaggttcgtatctactgtatttacttatatcacagatattcttacaggtaaaattgtaaatactgccttacaattaatttaatctattttgttcttctttccaaatattttcattagactcttggacatgtagtaaggtttttctggagatccatcgtttctttcacaatcttccaaaaagcacaaaaatagcgtgtccacggccatagagtaaacattgaagaacaaggatgatatgaagtaagtgcaaatcataattactgcaaccggcacgattccgtaatggagatcagagttgtcgataacttttgtaggaagcaaccctgaggcgaagaacacatatgatgctgctccaactcctagcgtcagcaaaactttactgaggaagaaaaggaagtccgtaatcttatcaagcacccagactctcaggatattcctcatgagcagcataaacgcatctttggcactgacacaaaagtttttgccgtgaatggaacacattatgtaagcgttcttgttaaggaaacgtaggaatttctcgagacagtagaagaagcacttgaatatgcacatgatggctttggtgagatcattatcgtactttttaactttatgatcgacgtattctaggaagagtctgattagcttgcaaatggctattatcaaagatccgaacgctaaagtgccgatgtggtaccttagggttctcgcgaatgctgaagtaaccgcaaagaaaggcaaacgtgattttttaaatgtccagtaccattgagcaaaaactcctgccagtaccatctgtcccaatgcaataacaaagcataacaaccaaaagaaggcgaatatgttgtaagcttgtaaatatggatacatcacatcattattcattcttataaatttacaagtggcattggaaccacacaatggattccttgaataatcatttttactccaatcatctggattacatacaacatcatcgtccaacccagtgactttataacaatcggtcatcgaataatatctggttttgtataatggtttaccaacagttgcgagatatatacctactgcgatagaatacgctatcacaccaaactgtagaatccatggtaaaatggggaagaataatgcagctgtcactgatcctacggccttgcttccttctttgattaaagttatagcgagcacaattcgttttcttagaacgagaagtataagcaatattaccactaatacaattgctactattactacgcatgtgagccataagtccttggttgtttttaattgtttttcgcggagttccttttcctcttcgtattgcgctttggcgttgtctgcgaggtcgtttagagcatgcttgtattggactattgagaaatataatcctgcacctaatccgacgacaacaccaacaatagaaagccatactaaaggaccagcgaaccaccttagaataaatatatagaataaacacaccaccaaggcaataataacacctattgcaattttccaccaacatttgattaaatcttcaattacattttggccgatctcttgaaaatcatatagtagcttaatattgtttacggctttcttcaaatttcccagcgactcaccaatttgctttaacgtattgtcatcaatcttagccaagtttggaatacatcgtttttgaagagatgtactgggtaacacatatggtggacaatccgtaccctcaaaaagatattcaccgcagtcgttagttttacgatccaggtaatacttaaattcggatggacatgacgaaacacaaacttgtggtgttttgcatccagtgaaaggtgtggatggatccaaacatttagttatatcgtgaaagagcaaatacggtttatgcaggacatcagtatctctgccacatcgccttccaagtgtatcccttggaaccagtagagttgagggatttccatttatgtaggcatatattccaattccaatccaagcgccgatgaaaaccaaaaatatcattagacaaagaatatccgtacatgatctttttcttaaaggaccattgaaatcaggatcatatggaataggttcccatttaatattttctctgtgcattttcacaatagaaacattaactaggaccacaaactattttttcaacctccgaaccatggtcagttgacatcatttgtcgac

SEQ ID NO: 4129 - DNA, 2235 bp, Diabrotica virgifera
  SmartBlast Evalue=1E-161; Info=Beta-hexosaminidase b n=1 Tax= Culex quinquefasciatus RepID=B0XBN5_CULQU
aacagctgtagtcagatagttgtaaataataaattttgtggaagtatagaaaacaaaaggtttcagtgttttattgtgagataaaatgaacttccatcaagtaacggtcgaatgcatcaattaaataaaaatataagtacttaaaattctcagtatctgatatcaaaaacaacaaacttgttcagtataattaattctacatatcaaaatacactcagaataaataaataatagcttatcaaacaaagcaatgactatgaataaagtcacagccacatcaattgtatatttatacaatcttttgatcaaatctttcaacatatatgttcagtttttctcgaaacgtaagattcatttctaatgatgcagaagttaattatacttttgttaacgctaatatacgtgacttttgtgcagtgttatctagaagaaccgggtcctagatatcccccaactaaaggagaattatggccaaagccgtcttatcagataaaaaatgaaagtttctttatacttgatcctcgaacttttgaaataaagacaacaagttatacatgttcactgattaaagatgccatcgtgaattatgaatacctcattacaaaaggtggagtgtcagaaaagaataaaataaaggcacatgggaaaatattcgacaacacgtggttgcaagatccagcttatttgggaatttttgataaactcgaggtacgacttgatacgccatgtgatggaaatgagtatccatcagagaacatgatggaagcttatacaattagggtgtctgaacatgaaaagctaattaattcatcttcagtttggggaattctcagaggtcttgaatcattctcccaaatggtatatatagccgataagggattgtcactgagaattaacagaacttttgtggaagacgttcctagattctctcatcgtggacttcttttagatacatcccggcacttcatccctctagagagtattttacttacaattaacgcaatgtcatacaataaaatgaatgtgtttcattggcatatagtagacgaccacagctttccttacagcagtaaaaaatttccagaactaagtgagaaaggagcatacaccccttatcaagtatattcagatgcagatatacaggttataatagaacatgctagattaaaaggtgttagagtcattccagaatttgatacaccaggacatacaagatcttggggtgtgtctcaccccgaactattaactgcttgtggaggagaacttacaggaaaatatggacccatcgatcctactatagatgcgacttatgaatttctcaacgatctatttatagaaattcacgaaacatttgctgacagatatattcatattggtggtgacgaagtaggttttgaatgttggggaaatacctccaaaattgttgactacatgaaagaaaaagatatacaaacttttgaagatttggaaagtttttacattaaaaaagttattgatatgatagatagtttagaatatcaatctattgtgtgggaagaagtatttacaaatggcgttgagctacctaaggatacagttattcaagtatggaaggatttctggaacgaaacaatgcttaatgttacaacttccaacagacacggcatcctttcttcatgttggtatctagaccatctccaaagtggtggagattggttaaaattctacgattgtgatcctcattcttttacagacgatcctatattacggtctttggtaaagggaggtgaagcttgcatgtggggagaggtcgtaaaccaatacaatgtaatttcaagagtatggccaagaacttctgctgttgctgaaaaactttggtcacaatgggaccaaaaatacgacgaagatgaagtaagaagacgactggaggagcatacatgtagaatgaacaggcgaggcatagcagctcagccacccaatggtcctggtttttgttattaacatctcaatttatacaaaacattaatgactggttgcaccaacagatcttttccgaaagctcactttccgaaacatatgagttgtaccattgagtcttagatcaatgttcaacttaccacaatggattgcattttgatcaatcgaaaattatggtgcaacgtaagtgagacttaaagctgaagcttaagatttgttggtgcaaccaggcataagtttgttagtttttcaaataaaagttaaatgttttccctaaag

SEQ ID NO: 4130 - DNA, 2235 bp, Diabrotica virgifera
  SmartBlast Evalue=1E-161; Info=Beta-hexosaminidase b n=1 Tax= Culex quinquefasciatus RepID=B0XBN5_CULQU
aacagctgtagtcagatagttgtaaataataaattttgtggaagtatagaaaacaaaaggtttcagtgttttattgtgagataaaatgaacttccatcaagtaacggtcgaatgcatcaattaaataaaaatataagtacttaaaattctcagtatctgatatcaaaaacaacaaacttgttcagtataattaattctacatatcaaaatacactcagaataaataaataatagcttatcaaacaaagcaatgactatgaataaagtcacagccacatcaattgtatatttatacaatcttttgatcaaatctttcaacatatatgttcagtttttctcgaaacgtaagattcatttctaatgatgcagaagttaattatacttttgttaacgctaatatacgtgacttttgtgcagtgttatctagaagaaccgggtcctagatatcccccaactaaaggagaattatggccaaagccgtcttatcagataaaaaatgaaagtttctttatacttgatcctcgaacttttgaaataaagacaacaagttatacatgttcactgattaaagatgccatcgtgaattatgaatacctcattacaaaaggtggagtgtcagaaaagaataaaataaaggcacatgggaaaatattcgacaacacgtggttgcaagatccagcttatttgggaatttttgataaactcgaggtacgacttgatacgccatgtgatggaaatgagtatccatcagagaacatgatggaagcttatacaattagggtgtctgaacatgaaaagctaattaattcatcttcagtttggggaattctcagaggtcttgaatcattctcccaaatggtatatatagccgataagggattgtcactgagaattaacagaacttttgtggaagacgttcctagattctctcatcgtggacttcttttagatacatcccggcacttcatccctctagagagtattttacttacaattaacgcaatgtcatacaataaaatgaatgtgtttcattggcatatagtagacgaccacagctttccttacagcagtaaaaaatttccagaactaagtgagaaaggagcatacaccccttatcaagtatattcagatgcagatatacaggttataatagaacatgctagattaaaaggtgttagagtcattccagaatttgatacaccaggacatacaagatcttggggtgtgtctcaccccgaactattaactgcttgtggaggagaacttacaggaaaatatggacccatcgatcctactatagatgcgacttatgaatttctcaacgatctatttatagaaattcacgaaacatttgctgacagatatattcatattggtggtgacgaagtaggttttgaatgttggggaaatacctccaaaattgttgactacatgaaagaaaaagatatacaaacttttgaagatttggaaagtttttacattaaaaaagttattgatatgatagatagtttagaatatcaatctattgtgtgggaagaagtatttacaaatggcgttgagctacctaaggatacagttattcaagtatggaaggatttctggaacgaaacaatgcttaatgttacaacttccaacagacacggcatcctttcttcatgttggtatctagaccatctccaaagtggtggagattggttaaaattctacgattgtgatcctcattcttttacagacgatcctatattacggtctttggtaaagggaggtgaagcttgcatgtggggagaggtcgtaaaccaatacaatgtaatttcaagagtatggccaagaacttctgctgttgctgaaaaactttggtcacagtgggaccaaaaatacgacgaagatgaagtaagacgacgattggaggagcatacatgtagaatgaacaggcgaggcatagcagctcagccacccaatggtcctggtttttgttattaacatctgaatttatacaaaacattaatgcctggttgcaccaacagatcttttccgaaagctcactttccgaaacatacgagttgtaccattgagtcttagatcaatgttcaacttaccacaatggatggcattttgatcaatcgaaaattatggtgcaacgtaagtgagacttaaagctgaagcttaagatttgttggtgcaaccaggcataagtttgttagtttttcaaataaaagttaaatgttttccctaaag

SEQ ID NO: 4131 - DNA, 2235 bp, Diabrotica virgifera
  SmartBlast Evalue=1E-15; Info=EGF-like domain containing protein (Fragment) n=1 Tax=Brugia malayi RepID=A8QHQ4_BRUMA
ctcggatgtgtaagttgaccggagtatataaccggtactctaataagcgggttcgactgtgtttcctgaatctttcaaggtatgttgtatcggcgcacatggattcgctcccaacccctataaaaccacttttattgtacacgagttggctccgaaactcatacccgaaagttaagttatgaccgaagggttaggtcttcctacctgaacccgggagcgaatccatgtgcagcctgttgtatacctatacaaggagacgaataaacataatgaagttgttcatcctttaactttatttaacattccacaaaagtatttgaacaatacatttgtacaaaattaaaacacataaatatgtaagtatagatataaaaatttaaaatcgtacaaaaatgtacaaaaaagctattcaaattacctatggtgtccttaatgtatctattcaatttttaaactataattcctatgagatataaacttgatattgtacataaggacaacatggtgctggagaaagtgagtactggagagccactgtccacatcttgtccaattggaaaaagacatttgttattcctacattgataagaatcgtctagtaccactgtacattgctcgctcgtcatgcagggatcaccatgatttttctcctcccagcatttgtcatccgatttgagcacgtactttttcttacatgcgcatttctgtctttttgatgagcactctgagaacttaaactctctacactgagctgtaacggtacaattgtcatcccaattgttggcaattttaagacacgtactcccgtaacctatatagtctgaaatacaattacaaacacctcccatgcattccataacatcttcgaagcaattgttgaatgtgtcgcatgatccttcaagagcaggaaagcatttcttttcatttccttctttggtcataaaatgctccagacaggtacagttgttgtccacgcatctttggttaatagcacaatcatagtctctcaagcactcaacatcaaaggctggggcattgcagtaaaagttctcttcgtcaaaatcttggggattactacattggcacaaattactggagttgcagtacgagtatggacccattgcattacaccagtcgttcgttaaacaactgtaggtctgctgcagcgttgttttaatacaatttctattgcttctatctccaaaccaatagtctttgcaataacaggcaccatcgaatacttttcctggtcgaattttacagtcagtatccttctgtaaatcaggatctggtacgccaagttcaggaacacactgttttttgtaaaagaaatatcctggcttacagatacaaacgccttgggttccattcaaacttttcccaaagcaatagctatttttttgatcatttgcacagatatcgttctgcgtatcacaagcgctgaatcctggtaaacagttgccttcaaaagtaaagtaattcccatttttgcaacggcagttttttgttgtaccatcacatatagaatttgccatgtaactgcaatctaaatccctttcacattcatcagttcttttatcattgttctggatcaacaattgttcgagaggtccaaattcgtcgtaactttcttcgtctgtcatcagcattgtatcgtctcctaatttgtttgggttcgtacaaatacccagatgacaaattagtccatgttgttgagtgggatcgcagtctctgtttattgcgcatgctttgtgttcatctgattttatcctacagtcagatcctcggtcataataattatcactgcagacacatttattattgtcgcacgttaacgccaaaggatccattccatcaaaacaggcagaggatgaaccacatgcttcacctttaccaacgaagtgttcacattttcctcgataccatctataccctggttcgcaagtacagacataactcgtattgaagcaaactgaattatctcctaaccattcgcattgctttgtttcttggcagtatccattatattcggttgcatattgcaagcaattctttgggttatcttctttggaataagataaaatatcacattgacaagtaccattgacacaaatctgagtttctgcacaattcaaattttctgtacaattgtctgcatggactcctatcgagcatagtagaaaaaataaaaatgtacacttaaatatacacatcatcattaaatctcgataactt

SEQ ID NO: 4132 - DNA, 2235 bp, Diabrotica virgifera
  SmartBlast Evalue=1E-15; Info=EGF-like domain containing protein (Fragment) n=1 Tax=Brugia malayi RepID=A8QHQ4_BRUMA
ctcggatgtgtaagttgaccggagtatataaccggtactctaataagcgggttcgactgtgtttcctgaatctttcaaggtatgttgtatcggcgcacatggattcgctcccaacccctataaaaccacttttattgtacacgagttggctccgaaactcatacccgaaagttaagttatgaccgaagggttaggtcttcctacctgaacccgggagcgaatccatgtgcagcctgttgtatacctatacaaggagacgaataaacataatgaagttgttcatcctttaactttatttaacattccacaaaagtatttgaacaatacatttgtacaaaattaaaacacataaatatgtaagtatagatataaaaatttaaaatcgtacaaaaatgtacaaaaaagctattcaaattacctatggtgtccttaatgtatctattcaatttttaaactataattcctatgagatataaacttgatattgtacataaggacaacatggtgctggagaaagtgagtactggagagccactgtccacatcttgtccaattggaaaaagacatttgttattcctacattgataagaatcgtctagtaccactgtacattgctcgctcgtcatgcagggatcaccatgatttttctcctcccagcatttgtcatccgatttgagcacgtactttttcttacatgcgcatttctgtctttttgatgagcactctgagaacttaaactctctacactgagctgtaacggtacaattgtcatcccaattgttggcaattttaagacacgtactcccgtaacctatatagtctgaaatacaattacaaacacctcccatgcattccataacatcttcgaagcaattgttgaatgtgtcgcatgatccttcaagagcaggaaagcatttcttttcatttccttctttggtcataaaatgctccagacaggtacagttgttgtccacgcatctttggttaatagcacaatcatagtctctcaagcactcaacatcaaaggctggggcattgcagtaaaagttctcttcgtcaaaatcttggggattactacattggcacaaattactggagttgcagtacgagtatggacccattgcattacaccagtcgttcgttaaacaactgtaggtctgctgcagcgttgttttaatacaatttctattgcttctatctccaaaccaatagtctttgcaataacaggcaccatcgaatacttttcctggtcgaattttacagtcagtatccttctgtaaatcaggatctggtacgccaagttcaggaacacactgttttttgtaaaagaaatatcctggcttacagatacaaacgccttgggttccattcaaacttttcccaaagcaatagctatttttttgatcatttgcacagatatcgttctgcgtatcacaagcgctgaatcctggtaaacagttgccttcaaaagtaaagtaattcccatttttgcaacggcagttttttgttgtaccatcacatatagaatttgccatgtaactgcaatctaaatccctttcacattcatcagttcttttatcattgttctggatcaacaattgttcgagaggtccaaattcgtcgtaactttcttcgtctgtcatcagcattgtatcgtctcctaatttgtttgggttcgtacaaatacccagatgacaaattagtccatgttgttgagtgggatcgcagtctctgtttattgcgcatgctttgtgttcatctgattttatcctacagtcagatcctcggtcataataattattactgcagacacatttattattgtcgcatgttaacgccaaaggatccattccatcaaaacaggcagaggatgaaccacatgcttcatctttaccaacgtagtgttcacattttcctcgataccatctataccctgtttcgcaagtacagacataactcatattggaacaaactgaattatttcctaaccattcgcattgctttgtttcttggcagtatccattatattcggttgcatattgcaagcaattctttgggttatcttctttggaataagataaaatatcacattgacaagtaccattgacacaaatctgagtttctgcacaattcaaattttctgtacaattgtctgcatggactcctatcgagcatagtagaaaaaataaaaatgtacacttaaatatacacatcatcattaaatctcgataactt

SEQ ID NO: 4133 - DNA, 2227 bp, Diabrotica virgifera
  SmartBlast Evalue=0; Info=Putative pre-mRNA-splicing factor ATP- dependent RNA helicase DHX15 n=1 Tax=Camponotus floridanus RepID=E2AV08_9HYME
ttgcttggactctaatctattttggataatttctaactgtcgttttgcttcgcattgtgggaagttgttcagatcgtaatactgtggggctattttcaacagccaatcaggtttgatatcagtaacagttctaatataattttttgtagttaacacaaactcattgtaaattacccactcaggtttgtggtctagacaagtggatggatgcagttgtactatttggttgtccttaattgtaagataatgtccagttctttcaagatgagcgacctgcatgaaaaacccgttaacaagtgctttcctaatatttatatagtagtctttactcgtaaattcggtggacgtcctctttagattgaacctatccataatcctggatagctgttgtcgcacgttatcggcagatttgagggaacggtagttgacgaagttgtcgtaacaccattgagggtcatccatactttgtttgaaagcatggtagacgttgagcagcgtgaggtggtctccgtcgatatgggcgaacctcatcttggcgtcgtcggcggcctttttcgcctcgttgggacgcacgaaacactgtgggactgacaacatcgcggttatggacaacagctcatttgaacagttgtgattgcaactagctatcaacattttggccaattggggatccagcgggaattctgccatgacagcaccgagatccgtaaggtttccgtcgtcgtccaaggctgccaaatagttaagcagctccaaggcacgcatcagtgtttcgggagctggtggatccatgaaatcgaagtgaactaaatcgtcgatgccgagcttctttaattggagcactacggagcccaggttcgacctcaatatttctggatatgtattatcttgcatttcattcttaaaagccttttctgtatacaacctgaagcactttccaggttttgttctaccagcacgacctgctctttgttgtgctgaagccttactaataggtgaaaccagtagcgattcgactcttatcctaggattatacaccttttgtttggcaaaacccggatcaatgacaaaaacaacaccatcaatagtgagggaagtttctgcaatattagtagagaccacaactttcctgccgattgctccatttgctttgtttggtggaggatcttcgaagattctttgctgtaggtttggcggtagtgttgaatataagggtatgcacttcagttctcccacttctgggcctaaattgtctatttctcgttttattcgcttacaagcgacttcaatttcttcctgtccagttaaaaacagcagaatatcacctgctatttcctcacacatgtgaatttgaatcactgttctaatggcagcctctagataatctctttcaggttccggtgtgtaaaagatttctacgggatgtgttcgtccagggacattcatcaaaggagcattgtcgaaataatgttgaaattttccagcatctaatgtagcactcataatcaccaattttagatccttacgttgcttaatcacttcttttagtacacccattaaaatatctgtggctagggtacgttcatgagcttcatcaagcaatatacattggtaggcatctaacattggatcactcataccttctcgtaacaacataccatctgtcatgtactttaatatagttttagctgaagagcagtcttcaaaacgaatactataaccaacttcttgacccagagctacatccatttcttctgaaactcgctgagcgactgacatagcggctactctcctaggttgagtacagcaaacacctttctgtcctacggtccttgaatattctacacaccattgtggtatctgagttgttttaccagaacctgtttcaccgacgagcactatgcactggtggtcacttagaagtctcatgaagtctgctctgtattcaaacactggaagacaaattctttttctaaagagctcatgatacttttgtgtaaatggtaatcctgagtaaggattaacagagacagaagttgttgttacagctgtacttataccacgttcttcccttttctttttgatgaagggatccattacatcaattcttctctttgacatagcgttaattaagatctaggatattaaatccgagaattgttgtaattagttgatatagtaaatactattaattattttttataggaaaaaggcacaccgccgcacc

SEQ ID NO: 4134 - DNA, 2227 bp, Diabrotica virgifera
  SmartBlast Evalue=0; Info=Putative pre-mRNA-splicing factor ATP- dependent RNA helicase DHX15 n=1 Tax=Camponotus floridanus RepID=E2AV08_9HYME
ttgcttggactctaatctattttggataatttctaactgtcgttttgcttcgcattgtgggaagttgttcagatcgtaatactgtggggctattttcaacagccaatcaggtttgatatcagtaacagttctaatataattttttgtagttaacacaaactcattgtaaattacccactcaggtttgtggtctagacaagtggatggatgcagttgtactatttggttgtccttaattgtaagataatgtccagttctttcaagatgagcgacctgcatgaaaaacccgttaacaagtgctttcctaatatttatatagtagtctttactcgtaaattcggtggacgtcctctttagattgaacctatccataatcctggatagctgttgtcgcacgttatcggcagatttgagggaacggtagttgacgaagttgtcgtaacaccattgagggtcatccatactttgtttgaaagcatggtagacgttgagcagcgtgaggtggtctccgtcgatatgggcgaacctcatcttggcgtcgtcggcggcctttttcgcctcgttgggacgcacgaaacactgtgggactgacaacatcgcggttatggacaacagctcatttgaacagttgtgattgcaactagctatcaacattttggccaattggggatccagcgggaattctgccatgacagcaccgagatccgtaaggtttccgtcgtcgtccaaggctgccaaatagttaagcagctccaaggcacgcatcagtgtttcgggagctggtggatccatgaaatcgaagtgaactaaatcgtcgatgccgagcttctttaattggagcaccacggagcccaggttcgacctcaatatttctggatatgtattatcttgcatttcattcttaaaagccttttctgtgtacaacctgaagcactttccaggttttgtcctaccagcacgacctgctctttgttgtgctgaagccttactaatgggtgaaaccagtagagattcgactcttatcctaggattatacaccttttgtttggcaaaacccggatcaatgacaaaaacaacaccatcaatagtgagggaagtttctgcaatattagtagagaccacaactttcctgccgattgctccatttgctttgtttggtggaggatcttcgaagattctttgctgtaggtttggcggtagtgttgaatataagggtatgcacttcagttctcccacttctgggcctaaattgtctatttctcgttttattcgcttacaagcgacttcaatttcttcctgtccagttaaaaacagcagaatatcacctgctatttcctcacacatgtgaatttgaatcactgttctaatggcagcctctagataatctctttcaggttccggtgtgtaaaagatttctacgggatgtgttcgtccagggacattcatcaaaggagcattgtcgaaataatgttgaaattttccagcatctaatgtagcactcataatcaccaattttagatccttacgttgcttaatcacttcttttagtacacccattaaaatatctgtggctagggtacgttcatgagcttcatcaagcaatatacattggtaggcatctaacattggatcactcataccttctcgtaacaacataccatctgtcatgtactttaatatagttttagctgaagagcagtcttcaaaacgaatactataaccaacttcttgacccagagctacatccatttcttctgaaactcgctgagcgactgacatagcggctactctcctaggttgagtacagcaaacacctttctgtcctacggtccttgaatattctacacaccattgtggtatctgagttgttttaccagaacctgtttcaccgacgagcactatgcactggtggtcacttagaagtctcatgaagtctgctctgtattcaaacactggaagacaaattctttttctaaagagctcatgatacttttgtgtaaatggtaatcctgagtaaggattaacagagacagaagttgttgttacagctgtacttataccacgttcttcccttttctttttgatgaagggatccattacatcaattcttctctttgacatagcgttaattaagatctaggatattaaatccgagaattgttgtaattagttgatatagtaaatactattaattattttttataggaaaaaggcacaccgccgcacc

SEQ ID NO: 4135 - DNA, 2104 bp, Diabrotica virgifera
  SmartBlast Evalue=1E-125; Info=Alpha-tocopherol transfer protein-like n=1 Tax=Harpegnathos saltator RepID=E2C3S5_9HYME
aataacaaatactttcggactgttttaaccggtttttagtttcgtttcaactgcagattgtgtcgcgactgaattttttacacggaccaaggatggcggctgaaattatcttcatcaaagcatcaccacttgttgcagcaaccatgttgtctgatatggacgagcttcccaccatcaaattaggtgactacactcttcagctagaattagatgagctcaagccagaagttcaagagattgccaagaaggaacttagggaaacccctgatgtgaaaaaggcagggatagtggctctaagggatctactaagagaggaaaaagaccttaaagtacctctagaaaacgacctttggcttacaaggtatttgaggccttgtaagtactacccagaaagtgcctgcgatctgatcaagagatattacaaattcaaaattacacactccggtgtatacgatggattgatgcccagtaaagaaaagaatatttttgaacaaaatattctaacagtacaaccaaacagagatcagttaggcagaagaattttaattattgaattaggaaaaaaatggaaaaccgataaggtatctttagatgaagtattcaaaggctgtgttttgttccttgaagccgccatgttggaaccagaaagtcaagtctgtggagcagtggtcatcttcgacatggatggtttgacgctgtcccaaaccaccaaatttaccccctcgtttgccaagagaatagttgattggttgcaggatagcgtacctctaagaatcaaaaacatccacatcgtcaaccaaccgtacatcttcaagatcgtctttgccctcttcaagcctttccttagggaaaaactgagaaaccgcatcatcttccacggcactgaccgcaaatctctccaccaatacatgagcccagaatgtttgccggaatgttacggaggaaccctagatttgccaaggataaatggtaaccaatggtacgatttgttggttatgtgtgataaggaatatcttgctatcaactctttcggttataagaagaaaggagagctataaggacggtacgaagaacgctccattcacagccatataacaactacgaactgtgtcctcgtatttttcgcagcataatagagataataactatttattatttttatataaaatcgtattctatttttatagcaatgttgccagttttttcattagatattttaattttagacaacggctcaaaggactatatgtgttaacaatattttcatcaattttttgataacttttatacattttagattagaaacaagtggtgtaagcctttttctttcttctggttgtttaagtttaagatagacatgaagtctggacagtaaactgattgtataaacttcaaaaagatacgtgtcaaatttttagaatcttgattcttccgttgaatattcaatttcgcaaacattgtccaaaatgatatctaaagtgggtaataattgaaatagttaaaatattcgttcaatattgagcaaacttattgcgtttaaatacaaatacattaaaaacaattaggtacccaaaacagttttagcctttttatttcttcctaccctttcgtcaccaatatttttctaccccttttccatctttttctgggtctcctttttcctccgaccttttataactatttttaaagttaatttataacatagacataggcactgttagtttttccatcgcatcggtataataaaaacctgtcattaactgaagtatcattttagtgacacctttacataccaactttatgtaaattagggaatttgaataatatttgaacaataatctgtaatatttgatacaattacaccaatgattcatgtttatcataaaccttttgttctttagtgatttttactacacttttactgtcttttttttaggttactacatattataattattattgtacgagtattatgacctaaaaatatttgtgatagctttcatcactttctttaatagtgtatttgttgtacagtaattattagttttatgttaattatacgtttgtttttcattattgaataaaaaatcatacttgttaaaaa

SEQ ID NO: 4136 - DNA, 2136 bp, Diabrotica virgifera
  SmartBlast Evalue=1E-125; Info=Alpha-tocopherol transfer protein-like n=1 Tax=Harpegnathos saltator RepID=E2C3S5_9HYME
aataacaaatactttcggactgttttaaccggtttttagtttcgtttcaactgcagattgtgtcgcgactgaattttttacacggaccaaggatggcggctgaaattatcttcatcaaagcatcaccacttgttgcagcaaccatgttgtctgatatggacgagcttcccaccatcaaattaggtgactacactcttcagctagaattagatgagctcaagccagaagttcaagagattgccaagaaggaacttagggaaacccctgatgtgaaaaaggcagggatagtggctctaagggatctactaagagaggaaaaagaccttaaagtacctctagaaaacgacctttggcttacaaggtatttgaggccttgtaagtactacccagaaagtgcctgcgatctgatcaagagatattacaaattcaaaattacacactccggtgtatacgatggattgatgcccagtaaagaaaagaatatttttgaacaaaatattctaacagtacaaccaaacagagatcagttaggcagaagaattttaattattgaattaggaaaaaaatggaaaaccgataaggtatctttagatgaagtattcaaaggctgtgttttgttccttgaagccgccatgttggaaccagaaagtcaagtctgtggagcagtggtcatcttcgacatggatggtttgacgctgtcccaaaccaccaaatttaccccctcgtttgccaagagaatagttgattggttgcaggatagcgtacctctaagaatcaaaaacatccacatcgtcaaccaaccgtacatcttcaagatcgtctttgccctcttcaagcctttccttagggaaaaactgagaaaccgcatcatcttccacggcactgaccgcaaatctctccaccaatacatgagcccagaatgtttgccggaatgttacggaggaaccctagatttgccaaggataaatggtaaccaatggtacgatttgttggttatgtgtgataaggaatatcttgctatcaactctttcggttataagaagaaaggagagctataaggacggtacgaagaacgctccattcacagccatataacaactacgaactgtgtcctcgtatttttcgcagcataatagagataataactatttattatttttatataaaatcgtattctatttttatagcaatgttgccagttttttcattagatattttaattttagacaacggctcaaaggactatatgtgttaacaatattttcatcaattttttgataacttttatacattttagattagaaacaagtggtgtaagcctttttctttcttctggttgtttaagtttaagatagacatgaagtctggacagtaagcaaactgattgtataaacttcaaaaatgtacgtgtcaaatttttagcctcttgattcttcagttaaatcttcaatttagcaaatattgttcaaaatgatatctaaagtgggtaataattgaaatagttaaaatattcgttcaatatttagcaaacttattgcgtaaaccgttgaaaaatacccaaaatagttttagcctttttatttcttcctaccctttcttcaccaatatttttctaccccgtttccatctttttctgggtctcctttttcctccgaccttttatacctatttataaagttaatttataacatagacataggcactgttagtttttccatcggtatagtagaaacctatcattaactgaagtatcatttagtgacacaaaaactgtcaactgtcttcacttttacgcagatccaacacgccagacacctttacataccaactgtatgtaaattagggaatttgaataatatttgaacaataatctgtaatatttgatacaattacaccaatgattcatgtttatcataaaccttttgttctttagtgatttttactacacttttactgtcttttttttaggttactacatattataattattattgtacgagtattatgacctaaaaatatttgtgatagctttcatcactttctttaatagtgtatttgttgtacagtaattattagttttatgttaattatacgtttgtttttcattattgaataaaaaatcatacttgttaaaaa

SEQ ID NO: 4137 - DNA, 2115 bp, Diabrotica virgifera
  SmartBlast Evalue=1E-107; Info=Endonuclease-reverse transcriptase n=1 Tax=Schistosoma mansoni RepID=Q4QQE8_SCHMA
ttttttgctgtttttgcatttagaagttatttatattacagaaacagtagtcgttttcacaattaatttcatattgaagtttaaaattttatggtaagtgtattttattttgccattaatttacatacaaagttaacctcattcacacagttaaggaatgaatgaattaaatggcacatttatttattaaccactaatgattttaaacattaccacagaactactgaaagcagatagagaaacatcggaagaaatcctgtatgtactaataaacagaatatggcaggaggagagaatacctgatgattggaaaaaaggtataattgtaaagatacccaagaagggagatcaaacgaattgcaacaattggagagcaataacactactttctacagtgagtaaagtcatgacgaggatgatactagaaagaatgaaagaaactatagaccagttgttaagaccaaaccaagcgggcttcaggagtaataaagcatgcacagatcatattaacacattaagaaacattgtagaacaaacaatagaatggcagagcaaaatctatataaatttcattgactttagacaagcctttgaccggattaacagagaaaaaatgtgggaaatattaaagagatatggaattccattaaaatacataagaattatcaaaatgttctatgaaaactataccgcacaaatcatgcacaatgggaaactcacagaaccaatcaacatagacagtggagtcagacaggggtgtattctatctccaaccatatttttgatcttaatcgactgggtcatgaagaaggcaacgaaaaataaaacaggaattagatggaatgctttcggtcagcttgaagatctagactttgcagatgatatatgtctggtgtccgaaaaaagcaacatatgcagaaaaaaacgaaaaggtgacaaaagaagcaagaaaaataggactagagattaacacaagaaaaaccaaacttatgaagataaatacggaaagagaaatgggtatattcattgaaggagaagtagaaaatgtacagaagttttgctatctgggaagcataattgacgctagcggtggaatagaagagaaattaatggaaggataactaaagcccaaaatgcgttctatatgctgaagaaaacatgggagtccaataaattaacaaccaaaaccaaaatcaggatatttaatacaaatgtaaagagcattgtgctatatgcagcagaaacttggaaaatagagaaaaagattatacaaaaggttcaaacatttgtaaatagatgccttagacgaatattgcaaatatattggccaaatcggataagtaacaaggaactttggaaaaaaactaatcaagagccgatagccaaaacgataaacagacgcaaatggaagtttattggacacacattaaggaaaaatgaagatgatataaccaaacaagccctggattaccaaccaactggaaaaagaaaacaaggcagaccaatgacatcctggaaaagaaatattaccagagagctagaagacaatgggttaacatggaaagaagtgaaagccctggccagaaacagagatgaatggagggggactgtagaggccctatgttccaaatggaatcaagaggagtaaagtaaaagtaaagtaatgattttaaaagaatttattacgctacttcaaatgtagctgtcattctgcaccaaaattttttaaaacaaaactaaccttttacatactgtttgataacgtcaaattttataatataatccgtgattgtagcagtagccactttatcacttgctgttgcgtggagtgaatttccgacttatttcgattccgaatgctttaaatgatgacgaacgggtaaagaacaatggacccaactgtattttattttgaggtacccgaaattaagtatttccgccaagttacgggacgaaaagagaaaaaatattttccgtttcgttgaactttgcgaacactgtgcaaaacagacaggcaaataattaaatttgtcctctacttacagaaataataaaaagcccgataataggcgacccaacaaataatagcagatcaaaaattaacacaaataaaaa

SEQ ID NO: 4138 - DNA, 2078 bp, Diabrotica virgifera
  SmartBlast Evalue=2E-55; Info=Endonuclease-reverse transcriptase n=1 Tax=Schistosoma mansoni RepID=Q4QQE8_SCHMA
ttttttgctgtttttgcatttagaagttatttatattacagaaacagtagtcgttttcacaattaatttcatattgaagtttaaaattttatggtaagtgtattttattttgccattaatttacatacaaagttaacctcattcacacagttaaggaatgaatgaattaaatggcacatttatttattaaccactaatgattttaaacattaccacagaactactgaaagcagatagagaaacatcggaagaaatcctgtatgtactaataaacagaatatggcaggaggagagaatacctgatgattggaaaaaaggtataattgtaaagatacccaagaagggagatcaaacgaattgcaacaattggagagcaataacactactttctacagtgagtaaagtcatgacgaggatgatactagaaagaatgaaagaaactatagaccagttgttaagaccaaaccaagcgggcttcaggagtaataaagcatgcacagatcatattaacacattaagaaacattgtagaacaaacaatagaatggcagagcaaaatctatataaatttcattgactttagacaagcctttgaccggattaacagagaaaaaatgtgggaaatattgaagagatatggaattccattaaaatacataagaattatcaaaatgttctatgaaaactatcaatcaacatagacagtggagtcagacaggggtgtattctatctccaaccatatttttgatcttaatcgactgggtcatgaagaaggcaacgaaaaataaaacaggaattagatggaatgctttcggtcagcttgaagatctagactttgcagatgatatatgtctggtgtccgaaaaaagcaacatatgcagaaaaaaacgaaaaggtgacaaaagaagcaagaaaaataggactagagattaacacaagaaaaaccaaacttatgaagataaatacggaaagagaaatgggtatattcattgaaggagaagtagaaaatgtacagaagttttgctatctgggaagcataattgacgctagcggtggaatagaagagaaattaatggaaggataactaaagcccaaaatgcgttctatatgctgaagaaaacatgggagtccaataaattaacaaccaaaaccaaaatcaggatatttaatacaaatgtaaagagcattgtgctatatgcagcagaaacttggaaaatagagaaaaagattatacaaaaggttcaaacatttgtaaatagatgccttagacgaatattgcaaatatattggccaaatcggataagtaacaaggaactttggaaaaaaactaatcaagagccgatagccaaaacgataaacagacgcaaatggaagtttattggacacacattaaggaaaaatgaagatgatataaccaaacaagccctggattaccaaccaactggaaaaagaaaacaaggcagaccaatgacatcctggaaaagaaatattaccagagagctagaagacaatgggttaacatggaaagaagtgaaagccctggccagaaacagagatgaatggagggggactgtagaggccctatgttccaaatggaatcaagaggagtaaagtaaaagtaaagtaatgattttaaaagaatttattacgctacttcaaatgtagctgtcattctgcaccaaaattttttaaaacaaaactaaccttttacatactgtttgataacgtcaaattttataatataatccgtgattgtagcagtagccactttatcacttgctgttgcgtggagtgaatttccgacttatttcgattccgaatgctttaaatgatgacgaacgggtaaagaacaatggacccaactgtattttattttgaggtacccgaaattaagtatttccgccaagttacgggacgaaaagagaaaaaatattttccgtttcgttgaactttgcgaacactgtgcaaaacagacaggcaaataattaaatttgtcctctacttacagaaataataaaaagcccgataataggcgacccaacaaataatagcagatcaaaaattaacacaaataaaaa

SEQ ID NO: 4139 - DNA, 2128 bp, Diabrotica virgifera
  SmartBlast Evalue=1E-25; Info=Endonuclease-reverse transcriptase n=1 Tax=Bombyx mori RepID=D5LB38_BOMMO
aaaacaagcatgtaacttttaatattacataaaataatttataaataaaaattctcatttattttaacctaaaccctgtttgaagtgtagtaacgagacgccaaaaaaatcgtaattagagtaggagaggttgaggaatttagatttaaatgacgcttgctgctaacttaatactttacaaatcataaaatgtcaatttgatttcacaagaggttgttccaacccgtcacattaccgttcttgaatcgttacgcgcatgcacaataacgaataattaggcgcagtaaataacacattttcgttactgtgcatactcgtaaccgttcaataacggcttttgtggcgggttggaacaaacctagtttttctaattaggatttttctgacggttctctaaggtgtaatgaaaaagcatgctaagatatttctgctcttctgggctctgtttgcgttcacttaagtaataacaatagctacatttaatattatgagtttatataagtggtctcgactgattttttgtgaacaacgtagtctcagtatgatatgtttggataataaatatttagccatttttagcgacaacagagttaaattcttaaaaaacaggacaatccagagaagaagagttagtacatggtaagaacacttcatctataaggatcatcaaaagccctagaacagttgatacatacaacaagagttgaatatgtatttacaagtttactatcaataaaaacaactaaaatatgtaaataaataattattatttaggaatgtttgaagtactacctagaaaaattgacttaaagcaatcagtatttagttatttaaaatagtaaaattgttaacaattgaaatttgtaaaatgtaaaaaaaaataaactagataatctaaatttgaaatatgtattataacatcggagacactgctaatggagatttgacattatagtcctcagttcatcattctttttggaagatgcttacaaaagtcttaaaaatgcctgtagctccagcgcggttaggttttgttattgcaaaactataaaaattttaattttaatcaaaagattatacgttaaaataaaataaattatttttatctgaccactctagcgcggtagttttgttattcactcttaattttcaattgaaaataggtacatacttatatttaattaataaatattgccgatctcttgtccgacaaatttacagccttgtttcattagtccgacaacgtcaatattgtaatgacgcggaaacacgtccaacctgcactctgaaatgtttcagaaagtggcagactcgctctaacgaagcagttaagaccattttaagacttttgtaatcatcttacaaaaaggacgatgtactgtggactattatcttgtaacaaacacgacatttgcaaagcatgcgtacatccacaagtttgtccaactctaaatagtttttgtccatctatccgttcaatcgaaacatatacggcataaaggaagaaaatacacactgttctgctttgcatatctttcccattttcactttatatcatcaaggttacagcaaaccaagtcgctacttaactccttgtgaatggaagaactaataacctatataaagagccaaacactagaagaagactgaatcatgagacacaccaccttcttcttcttcttcacgtgccatatcagaattatccgacgttggcgatcaccgttgcgaaggcttctcgatcttctgcaatatggaatagttatcctgcatttgtctgagtccattcacgaatgttttttaaccaagaaacaagttttcttcctacacctctacggccctctattttgcatttaaagatcagttgtaatattttatatcgacttcccctcactatatgttccaggtaagacatttttcgatgtttaaacagtctttagcaggtctctatctttgttgaccctctttagtacttcttcattagttttccttgctgtccaaagtatcttcagaatccgcctatgaatccacatttccaatgtttcaattctgttcatgatcgatacttttagcgtccacacttctgcactatacaaaagtacggaccaaacatagcacttaaccattcttt

SEQ ID NO: 4140 - DNA, 1980 bp, Diabrotica virgifera
  SmartBlast Evalue=1E-25; Info=Endonuclease-reverse transcriptase n=1 Tax=Bombyx mori RepID=D5LB38_BOMMO
aaaacaagcatgtaacttttaatattacataaaataatttataaataaaaattctcatttattttaacctaaaccctgtttgaagtgtagtaacgagacgccaaaaaaatcgtaattagagtaggagaggttgaggaatttagatttaaatgacgcttgctgctaacttaatactttacaaatcataaaatgtcaatttgatttcacgagaggtttgttccaattaggatttttctgacggttctctaaggtgtaatgaaaaagcatgctaagatatttctgctcttctgggctctgtttgcgttcacttaagtaataacaatagctacatttaatattatgagtttatataagtggtctcgactgattttttgtgaacaacgtagtctcagtatgatatgtttggataataaatatttagccatttttagcgacaacagagttaaattcttaaaaaacaggacaatccagagaagaagagttagtacatggtaagaacacttcatctataaggatcatcaaaagccctagaacagttgatacatacaacaagagttgaatatgtatttacaagtttactatcaataaaaacaactaaaatatgtaaataaataattattatttaggaatgtttgaagtactacctagaaaaattgacttaaagcaatcagtatttagttatttaaaatagtaaaattgttaacaattgaaatttgtaaaatgtaaaaaaaaataaactagataatctaaatttgaaatatgtattataacatcggagacactgctaatggagatttgacattatagtcctcagttcatcattctttttggaagatgcttacaaaagtcttaaaaatgcctgtagctccagcgcggttaggttttgttattgcaaaactataaaaattttaattttaatcaaaagattatacgttaaaataaaataaattatttttatctgaccactctagcgcggtagttttgttattcactcttaattttcaattgaaaataggtacatacttatatttaattaataaatattgccgatctcttgtccgacaaatttacagccttgtttcattagtccgacaacgtcaatattgtaatgacgcggaaacacgtccaacctgcactctgaaatgtttcagaaagtggcagactcgctctaacgaagcagttaagaccattttaagacttttgtaatcatcttacaaaaaggacgatgtactgtggactattatcttgtaacaaacacgacatttgcaaagcatgcgtacatccacaagtttgtccaactctaaatagtttttgtccatctatccgttcaatcgaaacatatacggcataaaggaagaaaatacacactgttctgctttgcatatctttcccattttcactttatatcatcaaggttacagcaaaccaagtcgctacttaactccttgtgaatggaagaactaataacctatataaagagccaaacactagaagaagactgaatcatgagacacaccaccttcttcttcttcttcacgtgccatatcagaattatccgacgttggcgatcaccgttgcgaaggcttctcgatcttctgcaatatggaatagttatcctgcatttgtctgagtccattcacgaatgttttttaaccaagaaacaagttttcttcctacacctctacggccctctattttgcatttaaagatcagttgtaatattttatatcgacttcccctcactatatgttccaggtaagacatttttcgatgtttaaacagtctttagcaggtctctatctttgttgaccctctttagtacttcttcattagttttccttgctgtccaaagtatcttcagaatccgcctatgaatccacatttccaatgtttcaattctgttcatgatcgatacttttagcgtccacacttctgcactatacaaaagtacggaccaaacatagcacttaaccattcttt

SEQ ID NO: 4141 - DNA, 2040 bp, Diabrotica virgifera
  SmartBlast Evalue=3E-53; Info=Renin receptor n=1 Tax= Harpegnathos saltator RepID=E2BJ66_9HYME
catatgatttgcaggggtgtgtggtgtttgatttggtgaaagaaaaatgattttctacttaacgttgacgactttgttaatttccacagcactaggtgctggggaattttcagtgctgcatcatgctccaagtcttacctttaggggccatgatgcccttaaagaaagcactttaaaggatgtttacgctgcagcccttggtttttccactgaacacttctcaaactggaagggcatgttcctgtcagacccttttggagtggcccaggctatagtaactgtgtatgtggatggggtatctgatatagaccaacaaaagggccaccactttcctcttaagactgacataggcgaatctaaggtctacagaagtattgaaagaagaatcgaagaacattatcctaatgaagatactaatttagtcagggttcgtctagctaatggattagaagatatccacaagtacaaaatctttgaagacatcgcatctggagactcaaaacaactcaaccataagtccttgaaattggatgttgatgaagacagaaaattcatcaaagaaattacaattttaaatgaaattgcccaaagaatcgaagaaggtgaaatcaagagagataacatccctgatttatactggttcgaagtttcgtctcttcatgcagtttcagacttgtacggagagaattctacacaagtcttggaagcgaaacaacttcttaacgaatgtattttaagacttaactctgctttcaataaactttataacggatatgtccttgtcactgttgtaacaagtgatgccagccacactaggagaggcagaagcattcttgctgctgatgaaccaactgatgataaaaccaaatacaacttggcaagttactacagcaaggactaccccgtcatctttaatctcatcttgtggtttggggtagtgatgttattttccctcatcgctatctgcatggctattggtactatggatccgggccgcgattcaatcatttaccgtatgaccagcaccagaatgaagaaagacaattaagtccactttgtttttcaatgttcagttaggagctaaaatccaagtttagtacagtcatatatatgagtgttttcttcttgtcatcaatacaaagcagtttttaaaggacatgataaatagctgaatgttgaaaatatatttcttagatgtggaaagtttttgatggtgttagtagtataatatgttcacgtcacaacagtgtatttaagatcactagaataaattaaaatcctataatttttcttttccacaaattttattactttgcaaaaaaagtaaaagatgctaatgagtaaattatataaaaacgatatttttcaacatatttgttgcaaggctagtctataaccttaaaatgtaaagtcacaggaatgagtgtttgctcatcaaagtgtcggaatgaaagtcataagttacagaaccattggatgtaccatttttacctttacagaaaaaggggttcatgggttttcttacaaaagcagtttttaaagcgtgaccagtactgtttgaccctgggacctcttactaccttatacatatttagtatcattcattatcataatataacctatatagagactaatgacgccaaaaataacttacactttcaaatttacaagtatataagaacctgaagtgatatgtgcttattaaatatttaagtatcattttgtgcattttactcattatatattacactttattatgaatcattacttaattaaatcatacggttaccacagaatgattaggtttttacaatgcttttgaaaagctgcactgttctgtcaattgtgtgatagaaagctttaagtatcactcactttgtgtctgtgaatattgttttaaataatgcattacttttttgttatgtaaatatgaattaaaataatttaaaagtattattatattgtatattttcagttcatacatttgaaggttgtttttcgagtagacacattcccttgtaaataaaaatattaaacagt

SEQ ID NO: 4142 - DNA, 2040 bp, Diabrotica virgifera
  SmartBlast Evalue=4E-53; Info=Renin receptor n=1 Tax= Harpegnathos saltator RepID=E2BJ66_9HYME
catatgatttgcaggggtgtgtggtgtttgatttggtgaaagaaaaatgattttctacttaacgttgacgactttgttaatttccacagcactaggtgctggggaattttcagtgctgcatcatgctccaagtcttacctttaggggccatgatgcccttaaagaaagcactttaaaggatgtttacgctgcagcccttggtttttccactgaacacttctcaaactggaagggcatgttcctgtcagacccttttggagtggcccaggctatagtaactgtgtatgtggatggggtatctgatatagaccaacaaaagggccaccactttcctcttaagactgacataggcgaatctaaggtctacagaagtattgaaagaagaatcgaagaacattatcctaatgaagatactaatttagtcagggttcgtctagctaatggattagaagatatccacaagtacaaaatctttgaagacatcgcatctggagactcaaaacaactcaaccacaaagccttgaaattagatgttgatgaagacagaaaattcatcaaagaaattacaattttaaatgaaattgcccaaagaatcgaagaaggtgaaatcaagagagataacatccctgatctatactggttcgaagtttcgtctcttcatgcagtttcagacttgtatggagagaattctacacaagtcttggaagcgaaacaacttcttaacgaatgtattttaagacttaactctgctttcaataaactttataacggatatgtccttgtcactgttgtaacaagtgatgccagccacactaggagaggcagaagcattcttgctgctgatgaaccaactgatgataaaaccaaatacaacttggcaagttactacagcaaggactaccccgtcatctttaatctcatcttgtggtttggggtagtgatgttattttccctcatcgctatctgcatggctattggtactatggatccgggccgcgattcaatcatttaccgtatgaccagcaccagaatgaagaaagacaattaagtccactttgtttttcaatgttcagttaggagctaaaatccaagtttagtacagtcatatatatgagtgttttcttcttgtcatcaatacaaagcagtttttaaaggacatgataaatagctgaatgttgaaaatatatttcttagatgtggaaagtttttgatggtgttagtagtataatatgttcacgtcacaacagtgtatttaagatcactagaataaattaaaatcctataatttttcttttccacaaattttattactttgcaaaaaaagtaaaagatgctaatgagtaaattatataaaaacgatatttttcaacatatttgttgcaaggctagtctataaccttaaaatgtaaagtcacaggaatgagtgtttgctcatcaaagtgtcggaatgaaagtcataagttacagaaccattggatgtaccatttttacctttacagaaaaaggggttcatgggttttcttacaaaagcagtttttaaagcgtgaccagtactgtttgaccctgggacctcttactaccttatacatatttagtatcattcattatcataatataacctatatagagactaatgacgccaaaaataacttacactttcaaatttacaagtatataagaacctgaagtgatatgtgcttattaaatatttaagtatcattttgtgcattttactcattatatattacactttattatgaatcattacttaattaaatcatacggttaccacagaatgattaggtttttacaatgcttttgaaaagctgcactgttctgtcaattgtgtgatagaaagctttaagtatcactcactttgtgtctgtgaatattgttttaaataatgcattacttttttgttatgtaaatatgaattaaaataatttaaaagtattattatattgtatattttcagttcatacatttgaaggttgtttttcgagtagacacattcccttgtaaataaaaatattaaacagt

SEQ ID NO: 4143 - DNA, 2050 bp, Diabrotica virgifera
  SmartBlast Evalue=1E-145; Info=Sugar phosphate exchanger 2 n=1 Tax=Camponotus floridanus RepID=E2AVF2_9HYME
ccgaccaccgtgtacatgtcatcaaaaattaaattgataaataaaagttgtgagttgtgagtagcaataacgtaagtaacgttctttgttactattcgtggaaatcgtggattatcatttttaaaaagttggatttacatattaatacatggcaatgaaaatccacaagaattcgaaaggcagtctacttaaatttgtatagaaatatcatatatatgccttcaatttcgggatatagatataagcctaacaagaagaaaactaaaatgaacgtacacccgaatgttccattgggagtacgatttttacagaagttgacagatacttgtacttgttgtccaaggtttcattttaacagggaactatgttatcgtatgagcgtgatatttctaacatatatatcgtatatgtgttatcatctatcaagaaaacccatttcagtagtgaaagcagtgttacatagaaactgcagcaatctcgtgccgccagattcgaatgagccaagcaattggtgtgattgggcacctttcgatggcacggaggacagtgcctctcagatgttgggtgagttggactcatcattccttttctgttatgccatagcgatgttcgtatccgggatcatagctgagagggtcaaccttcggtattttctcagcttgggtatgttaatgtcgggcgtttttagctacctattcggcattgctaaaacttacgacatacataatctttcttattacgtaattgtacagggcatggcaggcattttccagaccacgggatggccaggtgtggtaaccgtcatgagcaactggtttggaaaaagtaaaagaggactgatctttggtttgtggaactcgcataccagtataggaaatattttaggaacgctgattgctgccaaatacgtggaaaaggattgggccttgtcctttattatgccaggcttgttcataggagtagctggttttatcatcttcctctttttggtagtcaatcctagtgatgttggctgtgctaccccagatcgatcagatattcgtccgaaaagaccacgacttttggatcctcaacaatcagtcaatgatgaaaccagttccgggattgactcagacgttgacgatactaatattattgtaggagaacaagatagtataattagccggtcgcgccatttgagccacaatcacgtagaggtccaaagaagaataacagagcgaacgcagttattggctcgttcacactccgagcctgaagagcgggctattggattcgtcgatgctctccgtatacctggtgttattgaattttctttggcattgttcttttcaaagctggtcagttatactttcctctattggcttccattatatttaaacgcatcaacttccatgagtgctgaagacagtgcagatttatcaatactatttgacgttggtggaatcgttggagccataatcgctgggtatttaactgataaaaccgatatgccagcttgtacttgttctataatgctgtttctagcagttccaatgatgctgttctatgaaggcataagtatagaccatttaggattaaatatgatcgttctggtgatagtaggtttattggtaaacggaccatacgcccttattaccacggcggtatccgccgagttgggcacacatcacagtttagaaggaaattcgaaagctttggccactgtcacggccattatcgacggcactggttcgattggtgcagcagtgggtcctcttttagccggtttcgtgaagggttacggctggaggaatgtcttcgtgatgttgatgatctctgatgtttgtgctttatttttgctagtgaagttagtcaaacacgaaattattaaatttaggaatgctcgacgggctggaatccgaatagaataaaccactattttgtacagaatttatataaatataaaaataatgtgttgtataattatgtacatatattatacagaatggtctatataaaaaaagatgtataaagtactgaatttttactactgcccgtaataatattatat

SEQ ID NO: 4144 - DNA, 2005 bp, Diabrotica virgifera
  SmartBlast Evalue=1E-146; Info=Sugar phosphate exchanger 2 n=1 Tax=Camponotus floridanus RepID=E2AVF2_9HYME
ccgaccaccgtgtacatgtcatcaaaaattaaattgataaataaaagttgtgagttgtgagtagcaataacgtaagtaacgttctttgttactattcgtggaaatcgtggattatcatttttaaaaagttggatttacatattaatacatggcaatgaaaatccacaagaattcgaaaggcagtctacttaaatttgtatagaaatatcatatatatgccttcaatttcgggatatagatataagcctaacaagaagaaaactaaaatgaacgtacacccgaatgttccattgggagtacgatttttacagaagttgacagatacttgtacttgttgtccaaggtttcattttaacagggaactatgttatcgtatgagcgtgatatttctaacatatatatcgtatatgtgttatcatctatcaagaaaacccatttcagtagtgaaagcagtgttacatagaaactgcagcaatctcgtgccgccagattcgaatgagccaagcaattggtgtgattgggcacctttcgatggcacggaggacagtgcctctcagatgttgggtgagttggactcatcattccttttctgttatgccatagcgatgttcgtatccgggatcatagctgagagggtcaaccttcggtattttctcagcttgggtatgttaatgtcgggcgtttttagctacctattcggcattgctaaaacttacgacatacataatctttcttattacgtaattgtacagggcatggcaggcattttccagaccacgggatggccaggtgtggtaaccgtcatgagcaactggtttggaaaaagtaaaagaggactgatctttggtttgtggaactcgcataccagtataggaaatattttaggaacgctgattgctgccaaatacgtggaaaaggattgggccttgtcctttattatgccaggcttgttcataggagtagctggttttatcatcttcctctttttggtagtcaatcctagtgatgttggctgtgctaccccagatcgatcagatattcgtccgaaaagaccacgacttttggatcctcaacaatcagtcaatgatgaaaccagttccgggattgactcagacgttgacgatactaatattattgtaggagaacaagaggtccaaagaagaataacagagcgaacgcagttattggctcgttcacactccgagcctgaagagcgggctattggattcgtcgatgctctccgtatacctggtgttattgaattttctttggcattgttcttttcaaagctggtcagttatactttcctctattggcttccattatatttaaacgcatcaacttccatgagtgctgaagacagtgcagatttatcaatactatttgacgttggtggaatcgttggagccataatcgctgggtatttaactgataaaaccgatatgccagcttgtacttgttctataatgctgtttctagcagttccaatgatgctgttctatgaaggcataagtatagaccatttaggattaaatatgatcgttctggtgatagtaggtttattggtaaacggaccatacgcccttattaccacggcggtatccgccgagttgggcacacatcacagtttagaaggaaattcgaaagctttggccactgtcacggccattatcgacggcactggttcgattggtgcagcagtgggtcctcttttagccggtttcgtgaagggttacggctggaggaatgtcttcgtgatgttgatgatctctgatgtttgtgctttatttttgctagtgaagttagtcaaacacgaaattattaaatttaggaatgctcgacgggctggaatccgaatagaataaaccactattttgtacagaatttatataaatataaaaataatgtgttgtataattatgtacatatattatacagaatggtctatataaaaaaagatgtataaagtactgaatttttactactgcccgtaataatattatat

SEQ ID NO: 4145 - DNA, 2144 bp, Diabrotica virgifera
  SmartBlast Evalue=1E-120; Info=Protein phosphatase 1 regulatory subunit 12A n=1 Tax=Harpegnathos saltator RepID=E2B9N5_9HYME
tgtcgatctcctcttcggccttcttctcctttgaatagctgcttgtgtggctagagttgcttgagcatttctaatatcgttctccttatcttgatctttttcttctacggatttgggttttcttaaaggcagtgtaattgtagtatctgcagtctctagaggcgctgaagaaggtctttggatggatgcgatggtcctacgaataatcgacggcgtgtttggcgggtccgaaggttttgaagcgtcttctaacaagaacttgctggtaccattgtctaccctcaacctccacgatggtcgcctttcgtgtattgcgggtggttcctcactttcacgagttgttataactgtgggagtaccggttgtgatggtggcggtaactacgattccgttgggggagtctccatttgctccaggcttttcctcattgccgccaccaggttgattcttctgttttactaactgttcggcggatttgatttcttctaaagttaccccctgagtggatcgtcgagtctcccttaccctcttggcatgcgcttttctttgagtttcactttcttcatcccttactggaggaacaaacgacttaaagaaatttttgagcatctgaagcctggttcctcccggcgttgtaggagtggagggcgtggaagaattcgttaccggtgtaggggcggtaaccgttgttgtaggcggaggtggcatttgcaactttagaccgcttcgcaattgttgttggttgttagtagtaggctgtggactagtcactggtgaagtcttttcttgtgatatgttagttgtggtatttgtggttgcagcggtactgaccggtgtatcgttgtcttcttttttagtcggtttttcattttgtacaataggaggtttcctgagagtaacttctggttcaatctttatagattccgtggaattagtcaaattattcgtactattcagttttgttggactcaaatctgaattctgttttgtatacggtttcttccttaaagtaacatcctctttgtcttcaacgatcttctggggtacagtagtgttcgttgtgatttcattgttggcattcaggttattttcttttctatatttctaatcactttcgtcccttcgagctcaacctttttcactttggtaggcgtctcagattccaaattcctatcgttaatatcggccctcttcttggccattcttctattaaatacgtcttctttattttgttttttcctaagatcttccaatgtcgataacatgtcagtatcacacaagtcaaatgctgtttgtcctacgaagtttttagcttccatgtcagccaaactttcagccaatatttggcacgtttccttttggccccagtgcgcagctgcatgtagaggggtccagccgtcaacatcctgcgcatcaatgtcagctccacattgtaataatatttttataacgtcggcataacctttggcacaggctacatgtaaaggtgtagctccgtttttagggtgtggtacgttaactaaggaactttttgtcgctaaccaatctttggcatccctcaacatcaccaattcttcttcgttcctagctgcttcgcagtcgatgcctctatcctcaatttcttccctgagtagtccttccattttttggctctcggcaatatcaagtgccaattgtccatcgttattaactgccgctacgtgggcccccttttcgatgaggtacttcgcgatcgagagaaacccgcagctggcagtggcgtgcaaaggggtccaaccttcgttgtcgcccctgttgacgtccgccccgttctccacgaggaactccaccatgtcgagattgtcgtcgatacatgcctgatgtagggctgttaatccgtccacatttgcagtattgatgtcagctcctttatgtaacaattccaacacttcttttttatcaccagcagcacaagccgcgagaaacacacatcccgaagaaaatttaattttccgagttttttgtttcggtgacactggttctcgatttgtatctgattcttcccaacgttttagttggtctgctcttttaaacagagctgaattagatcgagtctctagcgacatgattatttaatagttttagaatgcacacggtcggccacc

SEQ ID NO: 4146 - DNA, 1874 bp, Diabrotica virgifera
  SmartBlast Evalue=1E-120; Info=Protein phosphatase 1 regulatory subunit 12A n=1 Tax=Harpegnathos saltator RepID=E2B9N5_9HYME
tgtcgatctcctcttcggccttcttctcctttgaatagctgcttgtgtggctagagttgcttgagcatttctaatatcgttctccttatcttgatctttttcttctacggatttgggttttcttaaaggcagtgtaattgtagtatctgcagtctctagaggcgctgaagaaggtctttggatggatgcgatggtcctacgaataatcgacggcgtgtttggcgggtccgaaggttttgaagcgtcttctaacaagaacttgctggtaccattgtctaccctcaacctccacgatggtcgcctttcgtgtattgcgggtggttcctcactttcacgagttgttataactgtgggagtaccggttgtgatggtggcggtaactacgattccgttgggggagtctccatttgctccaggcttttcctcattgccgccaccaggttgattcttctgttttactaactgttcggcggatttgatttcttctaaagttaccccctgagtggatcgtcgagtctcccttaccctcttggcatgcgcttttctttgagtttcactttcttcatcccttactggaggaacaaacgacggtttttcattttgtacaataggaggtttcctgagagtaacttctggttcaatctttatagattccgtggaattagtcaaattattcgtactattcagttttgttggactcaaatctgaattctgttttgtatacggtttcttccttaaagtaacatcctctttgtcttcaacgatcttctggggtacagtagtgttcgttgtgatttcattgttggcattcaggttattttcttttctatatttctaatcactttcgtcccttcgagctcaacctttttcactttggtaggcgtctcagattccaaattcctatcgttaatatcggccctcttcttggccattcttctattaaatacgtcttctttattttgttttttcctaagatcttccaatgtcgataacatgtcagtatcacacaagtcaaatgctgtttgtcctacgaagtttttagcttccatgtcagccaaactttcagccaatatttggcacgtttccttttggccccagtgcgcagctgcatgtagaggggtccagccgtcaacatcctgcgcatcaatgtcagctccacattgtaataatatttttataacgtcggcataacctttggcacaggctacatgtaaaggtgtagctccgtttttagggtgtggtacgttaactaaggaactttttgtcgctaaccaatctttggcatccctcaacatcaccaattcttcttcgttcctagctgcttcgcagtcgatgcctctatcctcaatttcttccctgagtagtccttccattttttggctctcggcaatatcaagtgccaattgtccatcgttattaactgccgctacgtgggcccccttttcgatgaggtacttcgcgatcgagagaaacccgcagctggcagtggcgtgcaaaggggtccaaccttcgttgtcgcccctgttgacgtccgccccgttctccacgaggaactccaccatgtcgagattgtcgtcgatacatgcctgatgtagggctgttaatccgtccacatttgcagtattgatgtcagctcctttatgtaacaattccaacacttcttttttatcaccagcagcacaagccgcgagaaacacacatcccgaagaaaatttaattttccgagttttttgtttcggtgacactggttctcgatttgtatctgattcttcccaacgttttagttggtctgctcttttaaacagagctgaattagatcgagtctctagcgacatgattatttaatagttttagaatgcacacggtcggccacc

SEQ ID NO: 4147 - DNA, 2010 bp, Diabrotica virgifera
  SmartBlast Evalue=8E-83; Info=Fk506-binding protein n=3 Tax= Culicidae RepID=Q17D71_AEDAE
gttcagttaacttcgaaactttgtcgtggaagtacaaaaccatgtttggaaacacgcttttcaccggcttctttttcggcgcacttttcgccatcgcatcttgcacagatgacttaaaagttgaagtgttattcaaaccagaaatgtgtgatgttaagtccaagcagggagatacgttgaccatgcactacactggtactttgaccgatggtagtaaatttgactcaagtctggacagagaccaggccttctccttccaactcggcgtcggccaagtcatcaaaggatgggaccaaggtctagtagacatgtgcgtaggagagaaacgtaagctgaccattccaccacacctcggatatggcgacaaaggggccggtaatgttattcccggaaaagccacactcatcttcgaagtagaattaatcaacatcagtgatgccaaacctgcaacggctaatgtcttcaaagaaatcgacagcaacaaagacaatcagctaagtcgtgaggaattgagtgactacctcaaaaaacaaatggcagccgctgacgacggagacgtcccaagtgaggaaatgaagaacatgttagcagatcacgacaaactagtagaagaaatcttccaacacgaagatcaagacaagaacggatacatttcgcatgcagaattctccggccctaaacacgacgaattataaaacaagataatatagatttaacacctagtgaattgtcattccataacgatgcattttttaccatgctccatatttttatacatcgagtcaacaaatttaactgtgtatttaagtcgtagttacagttattagtgcgttaattgttggaaaagggaaagtgtcttaggtacagattgacagaaatatctaaaaccgtcaaggtcaaaacgatcggaaactttgattacgcaacgttgtcaggatttcaaggctcttcatcgtatttagtacttaatattccagttatgtttaatatttcaaattgtaacgtaataaactttacatcggagcccacgttgggcgccattgtgtagcgattaactatcatagttgattgaaataatatttttcaagagtatttcaattatctgtggtagtttatcgctacaaaattaataatagataatgaatatctggatcaaagaatgttcacttgtatgtttcttaatgtaacctagtgcaaacctctgacgtaaataccaaagtcgtacaacgtcgtcactttacagatacctaccttatccaacacaaacgcatttcaattaattttgttatataatgtacatagtgactgaatcttttcggcaattttatagtgtaccgggcatttgtttacaagaatatttttaattttgttctatttttattttttgtaatactaagctagtttatgtatatctaaaagattcagtctcaataaaataattcttttagaagaatatagatggcgcttttgggataatagcttagtggaactaggagcaaagtagtaatcaaagaattatgaattgccatcagttagtatcatcttaaagcactatatagtatgaaaatatactttcaatgaaaagcgtagtatgacctttgatacaatttctttgattattatcgcatctctctttgcgctttcattactgttgtgctctttgttccaccaggattttagcctaggcagtttttgaaaattttgaaattttgtataggtatataaccgaccatttttttagttttatataaaataatgtttattttaattcggtaaggcttcatccacttaaaaatttaactgcttagaaaggtataacagctagatgataatcctctcacttttctaacttcttgttatctactctatttatttatatttagaatattagagatgcattttaagttttttaaatctgcacagttgttgttgtcattgattttttacttcatatatgtttatatttgttacaagaaatgattgtaataaaagttttgatacgaacttatg

SEQ ID NO: 4148 - DNA, 1992 bp, Diabrotica virgifera
  SmartBlast Evalue=8E-83; Info=Fk506-binding protein n=3 Tax= Culicidae RepID=Q17D71_AEDAE
gttcagttaacttcgaaactttgtcgtggaagtacaaaaccatgtttggaaacacgcttttcaccggcttctttttcggcgcacttttcgccatcgcatcttgcacagatgacttaaaagttgaagtgttattcaaaccagaaatgtgtgatgttaagtccaagcagggagatacgttgaccatgcactacactggtactttgaccgatggtagtaaatttgactcaagtctggacagagaccaggccttctccttccaactcggcgtcggccaagtcatcaaaggatgggaccaaggtctagtagacatgtgcgtaggagagaaacgtaagctgaccattccaccacacctcggatatggcgacaaaggggccggtaatgttattcccggaaaagccacactcatcttcgaagtagaattaatcaacatcagtgatgccaaacctgcaacggctaatgtcttcaaagaaatcgacagcaacaaagacaatcagctaagtcgtgaggaattgagtgactacctcaaaaaacaaatggcagccgctgacgacggagacgtcccaagtgaggaaatgaagaacatgttagcagatcacgacaaactagtagaagaaatcttccaacacgaagatcaagacaagaacggatacatttcgcatgcagaattctccggccctaaacacgacgaattataaaacaagataatatagatttaacacctagtgaattgtcattccataacgatgcattttttaccatgctccatatttttatacatcgagtcaacaaatttaactgtgtatttaagtcgtagttacagttattagtgcgttaattgttggaaaagggaaagtgtcttaggtacagattgacagaaatatctaaaaccgccaaggtcagaacgatcggaaactttgattaggcaacgttgtcaggatttcaaggcttttcatcgtatttagtacttaatattccagttatgtttaatatttcaaattgtaacgccacgttgggcgccattgtgtagagattaagtatcataggtgattgaaatattatttttcaagagtatttcaattatctgtggtagtttatcgctacaaaattaataatagataatgaatatcttgatcaaagaatggtcacttgtatgtttcttaatgtaacctagtgcaaacctctgacgtaaataccaaagtcgtacaacgtcgtcactttacagatacctaccttatccaacacaaacgcattttaattaattttgttatataatgtacatagtgactgaatcttttcggcaattttatagtgtaccgggcatttgtttacaagaatatttttaattttgttctattttattttttgtaatactaagctagtttatgtatatctaaaagattcagtctcaataaaataattcttttagaagaatatagatggcgcttttgggataatagcttagtggaactaggagcaaagtagtaatcaaagaattatgaattgccatcagttagtatcatcttaaagccctatatagtatgaaaatatactttcaatgaaaagcgtagtatgacctttgatacaatttctttgattattatcgcatctctctttgcgctttcattactgttttgctctttgttccaccaggattttagcctaggcagtttttgaaaattttgaaattttgtacctataggtgtataaccaaccatttttttagttttatataaaataatgtttattttaattctgtaaggcttcatccacttaaaaatttaactgcttagaaaggtataacagctagatgataatcctctcacttttctaacttcttgttatctactctatttatttatatttagaatattagagatgcattttaagttttttaaatctgcacagttgttgttgtcattgattttttacttcatatatgtttatatttgttacaagaaatgattgtaataaaagttttgatacgaacttatg

SEQ ID NO: 4149 - DNA, 1995 bp, Diabrotica virgifera
  SmartBlast Evalue=1E-16; Info=Endonuclease-reverse transcriptase n=1 Tax=Bombyx mori RepID=D7F157_BOMMO
gtttgggcatcgaggcaagtggacgtcggctgtttcgacgtcggtcatttcggcgtcggaattgattggtgacgtggtgggttgtttctgtcagttcaataattaaaaagttgactctagactttacgttgctaaggttactgatggtgccaagatcactttaaaccatgcgtgctttagatatataaatttaaaataaaactttaaatataaattaaaataaagtataaaataataaataaatcaaataactgttcataaagattcataaagagaaacgtcttcatcgtatttagtagttagtctttcgacttactcttttataatttaatttggaaatgataaaagtttctcgggttgcaatacttcaaatatgtattgtattactcaagtcacagagactttgaaagctgttccgtctacttatagtttagttaattttagttttttcgatttaatattacgatgtaaattcatatcggaccattcttaaagtttgggtaaattattttccagaaatatcttaaaaggttaaaatacattcattcttacctatatttctgggtaacatttgtcatttgtatcataatcctctttagaaagtaggtatttggaaagttaggcgagtcaatcggttattgtccccttctgagaaggacagtgatgaacggttttgtaattacgttttttcctaagtgaaattgtgtatgacagatatagacatttttgttttccccaccactagggctttctggtcgatagtcgttttgtaattttaatggtaattttagtagtatttagtagcgagcgaaaattagatctgtaaccacatatatcagtcaataaagagttgtcaaacagcaataatatgtattgaccctgaagtacgattccaggtctgaaatcgtctcatcttctgataactagtctagagtaaagtgtagaatcaactttttaattatttattgaactgacagaagtaacctataacgtcaccaattaattccgacatcgaaatggccgacgcccaaatggccccaccgaaagggcgagcgacgtccagatgtcctagatccgtttcatagacacgcagcataggctaggcatagggtgtcatagacaacagccatgctttggctgtaaagatgagggggtgaatttctttgccctatagaacttcaaaatctgattattgcgtgtgtttctatattatttgtacgcactgaaaagttagtgtgtgggtgagtgttcgtgtattgtgtttgtgtgttatatatgggttttttaatccgctattgttggtatattcttgttgttgacttcctcttatgatattggcaaccaaagcctaacattttatataatataatattttataatggtactagtcactttatagtcaccatgtggctggtctgttgtgttttacgtatcacagtcggtggttatattgaatgtaggtataggtacaaataaacaaggaattttatatgaaactttctaaagtaagttttatggatcttgtgcctctggaatccaattcctatgccaacattttagatcatcagtttaacgcgttggtggacgacctctgcttcggtagacatcctctcttggtctccattccactatccgctttgtccatctgttatctgtcattcgagctacgtgacctgtccagttccatttcagtgttgctattctaactacgtcatcagccactcctgatcttgcctcgcagtgaaattaccaacgtaacacgctccatctttctttgatccacacggatcttgtacattgttctccttgtcatagtcaacgttgatgattgagacatattgtatgtcggacaatttgaaaatgaggttcaacttgccgaaggctttctaagtcagtcttatacgactgagaagctgaacggttttattcagtttagttaacgtataaaagtcaacattgaaactgaaaaatcttcttattaagtgatgcagaaaa

SEQ ID NO: 4150 - DNA, 1981 bp, Diabrotica virgifera
  SmartBlast Evalue=1E-16; Info=Endonuclease-reverse transcriptase n=1 Tax=Bombyx mori RepID=D7F157_BOMMO
gtttgggcatcgaggcaagtggacgtcggctgtttcgacgtcggtcatttcggcgtcggaattgattggtgacgtggtgggttgtttctgtcagttcaataattaaaaagttgactctagactttacgttgctaaggttactgatggtgccaagatcactttaaaccatgcgtgctttagatatataaatttaaaataaaactttaaatataaattaaaataaagtataaaataataaataaatcaaataactgttcataaagattcataaagagaaacgtcttcatcgtatttagtagttagtctttcgacttactcttttataatttaatttggaaatgataaaagtttctcgggttgcaatacttcaaatatgtattgtattactcaagtcacagagactttgaaagctgttccgtctacttatagtttagttaattttagttttttcgatttaatattacgatgtaaattcatatcggaccattcttaaagtttgggtaaattattttccagaaatatcttaaaaggttaaaatacattcattcttacctatatttctgggtaacatttgtcatttgtatcataatcctctttagaaagtaggtatttggaaagttaggcgagtcaatcggttattgtcccggtgatgaacggttttgtaattaagttttttccaaagtgaaattgtgtatgacagatatagacatttttgttttccccaccactagggctttctggtcgatagtcgttttgtaattttaatggtaattttagtagtatttagtagcgagcgaaaattagatctgtaaccacatatatcagtcaataaagagttgtcaaacagcaataatatgtattgaccctgaagtacgattccaggtctgaaatcgtctcatcttctgataactagtctagagtaaagtgtagaatcaactttttaattatttattgaactgacagaagtaacctataacgtcaccaattaattccgacatcgaaatggccgacgcccaaatggccccaccgaaagggcgagcgacgtccagatgtcctagatccgtttcatagacacgcagcataggctaggcatagggtgtcatagacaacagccatgctttggctgtaaagatgagggggtgaatttctttgccctatagaacttcaaaatctgattattgcgtgtgtttctatattatttgtacgcactgaaaagttagtgtgtgggtgagtgttcgtgtattgtgtttgtgtgttatatatgggttttttaatccgctattgttggtatattcttgttgttgacttcctcttatgatattggcaaccaaagcctaacattttatataatataatattttataatggtactagtcactttatagtcaccatgtggctggtctgttgtgttttacgtatcacagtcggtggttatattgaatgtaggtataggtacaaataaacaaggaattttatatgaaactttctaaagtaagttttatggatcttgtgcctctggaatccaattcctatgccaacattttagatcatcagtttaacgcgttggtggacgacctctgcttcggtagacatcctctcttggtctccattccactatccgctttgtccatctgttatctgtcattcgagctacgtgacctgtccagttccatttcagtgttgctattctaactacgtcatcagccactcctgatcttgcctcgcagtgaaattaccaacgtaacacgctccatctttctttgatccacacggatcttgtacattgttctccttgtcatagtcaacgttgatgattgagacatattgtatgtcggacaatttgaaaatgaggttcaacttgccgaaggctttctaagtcagtcttatacgactgagaagctgaacggttttattcagtttagttaacgtataaaagtcaacattgaaactgaaaaatcttcttattaagtgatgcagaaaa

SEQ ID NO: 4151 - DNA, 2001 bp, Diabrotica virgifera
  SmartBlast Evalue=1E-168; Info=Alanine--glyoxylate aminotransferase 2-like n=1 Tax=Camponotus floridanus RepID= E2ANT3_9HYME
tataaaaatatatacatatatttttatcaattaaaacatcgataataatccctcacacattgtcatatgtcgaaattatacattagacttaatctagaatgcattataatactctcttcttttgttttacctatgatacatgtaacaaaaagttaaatagtggaaaattaaaagtaaaaaataaatatttacatgaaaaaacactagatacaattaagaaattactgtttttgaaatttcttgatttttttttcagtaatgttaatactacaattttatacaataatcttaacataaattaaatactattagacatccattcattatttaataattttcaaattagaatctaaatttatcatttagtgctaagacttaaatttgcctaattatgtgaatggatgttgtaaataaatgaagtatctatttttgaatgttaatttgatttaaattattgtaacttaacgttttaaatagacttaatattcgaatccttgaataaggatcccataggtctgtgttcctttgtagtttttgtactttctccaacatgtatcgatggtttgtgggtgttaacatcatataattcttcttggtgtctccattctttgaatactctgtctaacgtagaaactacttcatcgacattttctttggtgaagaccattggaggcttgaacttaatgatgttgccgtgaggtccatcgagactgatgagaatatgttcttccctcatcctttgtaatacaaatttggcacactccgtgttaggttccctagttgttctgtctttcactagatcaattccaacgaaaagaccaacacctctgacgttacctatgcatttgtgtttcttgcctaataactgacagttatccagtaaatattcgccaacaacgacggcattttctcttagattttcatcttctatcgtgtcgaatactgcgtttgctatggcgcaagaaactggattaccaccatacgtattaaaatattccactcctgtctgagtaaaactctttgatatttctctggtggtaacgacgcaagctacgggatgcccatttcccataggtttgcccatggtaacgatatcaggaactacgtcgtactgttggaaagcccaccagtgctttcctattcttccgaagccaacctggacttcatcagcgatgcacacacctccagcactcctgacactgtcgtaaacctcattgaaataatttttgggtggaatgacttgacctccgcagcttataagactttctgctatgaaggcacatactccatctcctttctcttgaactttctggcaaatttcgcgaacatcgtcggcatatgcgtgacctatgttttcctttggatactcagagtcacgatatttacctctgtaagaatcaggtaaaggagccacatggacgtggtctctttgtccaactccaccaggtaggttaaatttgtagtgagaaatatcaatcagtgaagtcaaatggccatggtaagcatgttccaaagcgatcacgtccttatttccggtgtgtatttgggccaatctcagcgctaaatcgttagcttctgagccagaattgacgaaataacatactgacaattcgtctggcatcgtgctcagaattctttgagcgcagagaagaatgttgtcgtggagatagcgattgtttgtacttagtgaagccatctgctcacttccagctttgaccacttttggatgacaatgcccaacatgggcaacattgttaatgcagtccaaatacgaatcatccttttcgtcatacatatactgccccttagccctgacgattttcaaggggttttgtcggaaaaacagttggcatgattctccaataagtttctgacgcaggttcaaagactcttgttttgatagcggcattttgtagcagcgtaaagttgatgatgatacttggctgcaaaatttttcgagtacgaaagtacgattgacttttggtcaaagacagctttaac

SEQ ID NO: 4152 - DNA, 1967 bp, Diabrotica virgifera
  SmartBlast Evalue=1E-168; Info=Alanine--glyoxylate aminotransferase 2-like n=1 Tax=Camponotus floridanus RepID= E2ANT3_9HYME
tataaaaatatatacatatatttttatcaattaaaacatcgataataatccctcacacattgtcatatgtcgaaattatacattagacttaatctagaatgcattataatactctcttcttttgttttacctatgatacatgtaacaaaaagttaaatagtggaaaattaaaagtaaaaaataaatatttacatgaaaaaacagtacttgttttttttttagtaatgttaatactacaattttatacaataatcttaacataaattaaatactattagacatccattcattatttaataattttcaaattagaatctaaatttatcatttagtgctaagacttaaatttgcctaattatgtgaatggatgttgtaaataaatgaagtatctatttttgaatgttaatttgatttaaattattgtaacttaacgttttaaatagacttaatattcgaatccttgaataaggatcccataggtctgtgttcctttgtagtttttgtactttctccaacatgtatcgatggtttgtgggtgttaacatcatataattcttcttggtgtctccattctttgaatactctgtctaacgtagaaactacttcatcgacattttctttggtgaagaccattggaggcttgaacttaatgatgttgccgtgaggtccatcgagactgatgagaatatgttcttccctcatcctttgtaatacaaatttggcacactccgtgttaggttccctagttgttctgtctttcactagatcaattccaacgaaaagaccaacacctctgacgttacctatgcatttgtgtttcttgcctaataactgacagttatccagtaaatattcgccaacaacgacggcattttctcttagattttcatcttctatcgtgtcgaatactgcgtttgctatggcgcaagaaactggattaccaccatacgtattaaaatattccactcctgtctgagtaaaactctttgatatttctctggtggtaacgacgcaagctacgggatgcccatttcccataggtttgcccatggtaacgatatcaggaactacgtcgtactgttggaaagcccaccagtgctttcctattcttccgaagccaacctggacttcatcagcgatgcacacacctccagcactcctgacactgtcgtaaacctcattgaaataatttttgggtggaatgacttgacctccgcagcttataagactttctgctatgaaggcacatactccatctcctttctcttgaactttctggcaaatttcgcgaacatcgtcggcatatgcgtgacctatgttttcctttggatactcagagtcacgatatttacctctgtaagaatcaggtaaaggagccacatggacgtggtctctttgtccaactccaccaggtaggttaaatttgtagtgagaaatatcaatcagtgaagtcaaatggccatggtaagcatgttccaaagcgatcacgtccttatttccggtgtgtatttgggccaatctcagcgctaaatcgttagcttctgagccagaattgacgaaataacatactgacaattcgtctggcatcgtgctcagaattctttgagcgcagagaagaatgttgtcgtggagatagcgattgtttgtacttagtgaagccatctgctcacttccagctttgaccacttttggatgacaatgcccaacatgggcaacattgttaatgcagtccaaatacgaatcatccttttcgtcatacatatactgccccttagccctgacgattttcaaggggttttgtcggaaaaacagttggcatgattctccaataagtttctgacgcaggttcaaagactcttgttttgatagcggcattttgtagcagcgtaaagttgatgatgatacttggctgcaaaatttttcgagtacgaaagtacgattgacttttggtcaaagacagctttaac

SEQ ID NO: 4153 - DNA, 1959 bp, Diabrotica virgifera
  SmartBlast Evalue=0; Info=5-aminoimidazole-4-carboxamide ribonucleotide formyltransferase/IMP cyclohydrolase n=1 Tax= Leptinotarsa decemlineata RepID=Q6UZ77_LEPDE
aataattatagaattttctaatcttcataaagagttatttaaactgtaccagtgttaaaataagctactcttaaattatttattagttaagtgagtctcactgtttacaatggcaacaggtagtggaaaaggaaaaatcgcattattatcagtatcaaacaaactaggccttgttgagttcggtaaaaacttacacagtcttggattcacattggttggtagtggaggcacagctgccattcttcgagatgccggtctcaaaatcaaagatgtctcagacgtgtcaggagccccagaaattctcggaggaagagtgaagactctacaccctgttgtccatggtggaattctagctagattgttaccttccgaccaagaagatctcaagaaccaaaaaatagaaatgattagagtagtagtttgcaatctatatccattcgtagaaactgtatcaaaccctaaagtaacgctagatgatgctgtagagaatatcgacattggcggtgtgacactcttgagagcagcagccaaaaaccatcaaagagttacagttattaccgatcccagtgattatagtaaagtcattagtgaattaagaaataatccagagaaagacacctcattacaaaccagacaaaccttagctctaaaagccttcacccatactgcagaatatgatgcggcaatttctgactatttccgaaaagaattctccagtggaatctcccaattgaccttgaggtatggtatgaacccacatcaaaagccagcacagctatatacaaccttggaaaagctacctctcaccgtcgttaacggctctcctggttttatcaatctttgcgatgctctcaatggttggcaacttgtaaaagagttaaaagctgctcttggcttgcccgcagctactagcttcaagcatgtttcgcccgcaggagcagctgttggcgttcctctcgatgaaactcaggcaaaagtatgtatggttgatgatttagctggaaaactgacaccacttgcaatcgcctatgccagagctagaggtgctgataggatgtcttcattcggagacttcgtggctctttccgatgtttgcgatcaagtcacagctcgtttggtctccagagaagtgtcagatggtattattgctccaggatatacacccgaagcattagagttattgaaaaagaagaaaaatggaggctactgtattttacagatggatccagactatgtacctagtcccatcgaaagaaaatcttattcggtttaaccttagaacaaaaacgtaacgatgccgaaataaacaaatcgattttcaccaatatcgtcagtgagaacaagaatcttcccgaatctgccgtaagagacttaatcgtcgctactatcgctcttaaatacacacaaagtaactcagtatgctacgccaaagacggtcaagttatcggaataggcgctggacagcaatctagaattcattgcaccagattggcgggagataaggctgacaattggtggttgagacaacaccccaaagtgctcaacatgaaatttaagaagactgtgaagagagcagagatctctaatgccattgacaactatgttaatggatcagtaggtaaagatatggatagatcccttttcgaatcaatgtacgcagaagttcctctagaattaacgccaacagaaagacaaacatggttgagccacttgaatggcgttgttgtatcttctgatgcattcttccccttcagagacaatgttgatagagcaagactgagtggagtctcatacattggcagtccatcaggttccacgaacgatgacgaagttatcaaggcttgcaacgaacacaaaatcgtcttggcccacactaatttgcggttgttccaccactgatctgttagctatatacataacgtactatttttataaaatgtaataaaatattgttttgct

SEQ ID NO: 4154 - DNA, 1959 bp, Diabrotica virgifera
  SmartBlast Evalue=0; Info=5-aminoimidazole-4-carboxamide ribonucleotide formyltransferase/IMP cyclohydrolase n=1 Tax= Leptinotarsa decemlineata RepID=Q6UZ77_LEPDE
aataattatagaattttctaatcttcataaagagttatttaaactgtaccagtgttaaaataagctactcttaaattatttattagttaagtgagtctcactgtttacaatggcaacaggtagtggaaaaggaaaaatcgcattattatcagtatcaaacaaactaggccttgttgagttcggtaaaaacttacacagtcttggattcacattggttggtagtggaggcacagctgccattcttcgagatgccggtctcaaaatcaaagatgtctcagacgtgtcaggagccccagaaattctcggaggaagagtgaagactctacaccctgttgtccatggtggaattctagctagattgttaccttccgaccaagaagatctcaagaaccaaaaaatagaaatgattagagtagtagtttgcaatctatatccattcgtagaaactgtatcaaaccctaaagtaacgctagatgatgctgtagagaatatcgacattggcggtgtgacactcttgagagcagcagccaaaaaccatcaaagagttacagttattaccgatcccagtgattatagtaaagtcattagtgaattaagaaacaatccagagaaagacacctcattacaaaccagacaaaccttagctctaaaagccttcacccatactgcagaatatgacgcagcaatttccgactatttccgaaaagaattctccagtggaatctctcaattgaccttgaggtatggtatgaacccacatcaaaagccagcacagctatatacaaccttggaaaagctacctctcaccgtagttaacggctctcctggttttatcaatctttgcgatgctctcaatggttggcaacttgtaaaagagttaaaagctgctcttggcttgcccgcagctactagcttcaagcatgtttcgcccgcaggagcagctgttggcgttcctctcgatgaaactcaggcaaaagtatgtatggttgatgatttagctggaaaactgacaccacttgcaatcgcctatgccagagctagaggtgctgataggatgtcttcattcggagacttcgtggctctttccgatgtttgcgatcaagtcacagctcgtttggtctccagagaagtgtcagatggtattattgctccaggatatacacccgaagcattagagttattgaaaaagaagaaaaatggaggctactgtattttacagatggatccagactatgtacctagtcccatcgaaagaaaatcttattcggtttaaccttagaacaaaaacgtaacgatgccgaaataaacaaatcgattttcaccaatatcgtcagtgagaacaagaatcttcccgaatctgccgtaagagacttaatcgtcgctactatcgctcttaaatacacacaaagtaactcagtatgctacgccaaagacggtcaagttatcggaataggcgctggacagcaatctagaattcattgcaccagattggcgggagataaggctgacaattggtggttgagacaacaccccaaagtgctcaacatgaaatttaagaagactgtgaagagagcagagatctctaatgccattgacaactatgttaatggatcagtaggtaaagatatggatagatcccttttcgaatcaatgtacgcagaagttcctctagaattaacgccaacagaaagacaaacatggttgagccacttgaatggcgttgttgtatcttctgatgcattcttccccttcagagacaatgttgatagagcaagactgagtggagtctcatacattggcagtccatcaggttccacgaacgatgacgaagttatcaaggcttgcaacgaacacaaaatcgtcttggcccacactaatttgcggttgttccaccactgatctgttagctatatacataacgtactatttttataaaatgtaataaaatattgttttgct

SEQ ID NO: 4155 - DNA, 1950 bp, Diabrotica virgifera
  SmartBlast Evalue=1E-151; Info="Aspartate aminotransferase, cytoplasmic n=1 Tax=Camponotus floridanus RepID=E2AD28_9HYME"
aaacggacataacatatttatttagctgtacagttgtatcttacagtaatacttatatataaaatgctcctgggaatacaaccacaaacaatattgtcattaggctcgttatatttgtgcaaatcccagtggtataatcttttttggaaataatataataaaagtagatagaacttataactgttttaacatttttatttttagtgtgcaagtgtcaagatggtgttaaaaacttaaaaaccatgccaaaaaatatattttggtaaaatttgaaaagatattcatatttttttttgagtatttgaggtatttttcatatttatgtgatatttgtcatgaacaaaatatttaccacataattagataatattcttctatattttttcatgacaatatttggttaatagacctcaaatcaatataaatcatggaaatgtccagaataataataaaaagcttattagaaacgttattatagacgaattctctttggttcgcaagaaatgactcatcaaagaacgagctaaggcaaaaaatgaaaatatttgttcttctgtggcattttcccataaaaattctaaaacacttatattttgctgggtagggtggttactgtttcatggatggctttagcaacatagttcacgttgtcattgttcaaaccacttatactaattcttccagaacgcagcaggtagacatgatgtttcttcaccaagtgctctgactggatttcatttagacctgtgtaagagaacattccgatgtgtttagttaaatggctccagtctcctggagtgcccaactcctctaatgcgtttctcaacagagtcctcatttcaattattcttgaagacatcgtagtgatattatcttgccactgctttgccaaatctgggttattgagcacaaaagatactatcctggctccgtgactaggtgggtttgagtacattcctctgacgatgagagtaagctgcgattttacaggtgccataaggtctggtttgctaaccgctactgttaggtttccaacacgttcattgtagagaccgaagttcttggcaaaactctgggcacagaagaactcatagccttcggcggcgaattttcttaccacagcagcatctttgaccaagttaccagaggcgaaaccttggtaggcacagtcgaagaaggggaacaattttctttcttttaaaacagctgcgattgctgtccattgttcaggagtgggatctgtacctgtaggattgtgtgcgcaagcgtgtaaaatgatgacagcgccctctggagcatttttcaaatcctctatcataccattgaagtctagaccacgggttttattgtcccagtatctgtagctgcgttcttctgtaaagccggcatttttaaagagcaacttgtggttttcccaagtaggatcagaaatgtaaaaggtcttctttcctaatactctggcaaggaactcggcaccaactctaagagctccagtaccagatagagattggacaccaaatgcccttccttcacggattgcaggtgaatcttgtcctagcaacatggtagtagctgcagtactgaaagcttccaagcccaaaattggtaagtactctttgttgagcgattcatcattggctagagctttttccgctgttcttacaactggcagaacccatggtttaccttcagtgtttctgtaagctccgactccaagattcactttcttatcgaaagtatcatcgttgtaggccttagtgagagcaaaaacttccactggaggtcctaattcaacttctgaaaaccaggacattgtttccggcacttgtattttgaaccttgaaacgaaagtgtatatacaattaagaattgccgagcgcaactgccgtgcgttaattaaaaaacgtttgctttatttaaacaagataactgatgtgatgtgacctttcg

SEQ ID NO: 4156 - DNA, 1950 bp, Diabrotica virgifera
  SmartBlast Evalue=1E-151; Info="Aspartate aminotransferase, cytoplasmic n=1 Tax=Camponotus floridanus RepID=E2AD28_9HYME"
aaacggacataacatatttatttagctgtacagttgtatcttacagtaatacttatatataaaatgctcctgggaatacaaccacaaacaatattgtcattaggctcgttatatttgtgcaaatcccagtggtataatcttttttggaaataatataataaaagtagatagaacttataactgttttaacatttttatttttagtgtgcaagtgtcaagatggtgttaaaaacttaaaaaccatgccaaaaaatatattttggtaaaatttgaaaagatattcatatttttttttgagtatttgaggtatttttcatatttatgtgatatttgtcatgaacaaaatatttaccacataattagataatattcttctatattttttcatgacaatatttggttaatagacctcaaatcaatataaatcatggaaatatccagaatgataataaaaagcctattagaaacgttattatagacgaattctctttggttcgcaagaaatgactcatcaaagaacgagctaaggcaaaaaatgaaaatatttgttcttctgtggcattttcccataaaaattctaaaagacttatattttgctgggtagggtggttactgtttcatggatggctttagcaacatagttcacgttgtcattgttcaaaccacttatactaattcttccagaacgcagcaggtagacatgatgtttcttcaccaagtgctctgactggatttcatttagacctgtgtaagagaacattccaatgtgcttagttaaatggctccagtctcctggagtgcccaactcctctaatgcgtttctcaacagagttctcatttcaatgattcttgaagacatcgtagtgatattatcttgccattgctttgccaaatctgggttattgagcacaaaagatactatcctggccccgtgactaggtgggtttgagtacattcctctgacgatgagagtaagctgcgattttacaggtgccacaaggtctggtttgctaaccgctactgttagatttccaacacgttcattgtaaagaccgaagttcttggcaaaactctgggcacagaagaactcatagccttcggcggcgaattttctgaccacagcagcgtctttgaccaaattaccagaggcgaaaccttggtaggcacagtcgaagaaggggaacaattttctttcttttagaacagctgcgattgctgtccattgttcaggagtgggatctgtacctgtaggattgtgtgcgcaagcgtgtaaaatgatgacagcgccctctggagcatttttcaaatcctctatcataccattgaagtctagaccacgggttttattgtcccagtatctgtagctgcgttcttctgtaaagccggcatttttaaagagcaacttgtggttttcccaagtaggatcagaaatgtaaaaggtcttctttcctaatactctggcaaggaactcggcaccaactctaagagctccagtaccagatagagattggacaccaaatgcccttccttcacggattgcaggtgaatcttgtcctagcaacatggtagtagctgcagtactgaaagcttccaagcccaaaattggtaagtactctttgttgagcgattcatcattggctagagctttttccgctgttcttacaactggcagaacccatggtttaccttcagtgtttctgtaagctccgactccaagattcactttcttatcgaaagtatcatcgttgtaggccttagtgagagcaaaaacttccactggaggtcctaattcaacttctgaaaaccaggacattgtttccggcacttgtattttgaaccttgaaacgaaagtgtatatacaattaagaattgccgagcgcaactgccgtgcgttaattaaaaaacgtttgctttatttaaacaagataactgatgtgatgtgacctttcg

SEQ ID NO: 4157 - DNA, 1932 bp, Diabrotica virgifera
  SmartBlast Evalue=1E-148; Info=Dihydrolipoamide succinyltransferase component of 2-oxoglutarate dehydrogenase n= 1 Tax=Aedes aegypti RepID=Q17H89_AEDAE
tttttacttttcaattttctcctactcctactctgaatttagtgacaggttaatagcacatgagttgttgctcataaaatctgggccccctaaaaagaaacatttttgtaatataaagggggttcgttgaataaataccccgaaaatgtcaagtatgttaaatataattattaaaagtgtaccccgatcaactcttcggcatatactaaaatctgtagaaaagggtattcctgtggtaactgcaaatcatagatgtgttattcaaggggagcagataatccgaaaatatggtattaatattaatagttcccacactttaagatgcagaaagtctacttctagtagtagatattttcaaacatccaatgcctgctgggacgtacaacttgtaaaagtgccaccttttgcggactctataacagaaggagatgttaaactcgaaaagaaagttggcgactatgtcgctgccgatgaagttgttatggaaatcgaaaccgacaaaacagccatgcccgttcacgcacctgctgcaggtgtgatagcagaaattctagtcaatgacggcgacactgtgaaaccaggacaacacttgttcaagttaaccgttggtgaaggagctccaccaccagcagctgccaaacctgctgcggctgctccagctcctaagcctgccgccgcccctgctgccccaccagtttctccgcctccacctccaccatcagcgccacccgcagctgctcccccaaaacctgcagctgctcctcctaaaccagcggctccgatgacttcaatacctgtcgccgctattcgtcatgcgcaatccttggaggcggccacagttaagttaccaccagcagatccaaccaaagaaatctctggcacgcgcaccgaacatagagttaagatgaatagaatgaggctaaagatcgcccaacggcttaaggaggctcaaaacacgaatgccatgttaactactttcaacgagattgatatgacgaatatcatggctttccgcaaagaaaaccaagaggctttccaaaagaaatataacgtcaaattaagttttatgtcggcctttttaaaagctgcagcatacgctttacaagatcaacccattgtaaacgctgtgatagatggaaccgatatcttgtatagagactacgtagacatttcagttgctgtcgccacaccgaaaggtctcgttgtacctgttgtgagaaacgtagagagaatgacatatgccgatattgaattgggcatcgctgctttagcagataaagctagaaaaggtcaactggctgttgaagatatggatggcggcacttttactgtaagcaatggaggcgtatttggttctctttatggaactccaattattaatccaccccaatctgctatcttaggaatgcacggaatattcgatagaccaattgctattaaaggacaagctgttgtgaggccgatgatgtacatagccttaacttacgaccatagaatcattgacggacgtgaagcagtgctattcttaagaaaaatcaagcaagctgtggagaatccagccaccatagtcgctggtctttaaactgccgttaagagtaataaaatatcactttaattttatttttcattgtacggttaacgtatttttatttatattcatactaattggatatcagtcgtcgtcaactttttatcacttaatcattattaaagtattattgtcaaatattttattagaaaaggctacaggttaacgatatcatacatttgtaaattatgccgagtataaatatatatacccctaagttgtacacgcaacttcttttttgtgtaatatacatgtgcaaattttgaaaagtgtatttacattcgatattattaggctttgcctatttcacttaattgttatttattaattaaatgattaaacta

SEQ ID NO: 4158 - DNA, 1932 bp, Diabrotica virgifera
  SmartBlast Evalue=1E-148; Info=Dihydrolipoamide succinyltransferase component of 2-oxoglutarate dehydrogenase n= 1 Tax=Aedes aegypti RepID=Q17H89_AEDAE
tttttacttttcaattttctcctactcctactctgaatttagtgacaggttaatagcacatgagttgttgctcataaaatctgggccccctaaaaagaaacatttttgtaatataaagggggttcgttgaataaataccccgaaaatgtcaagtatgttaaatataattattaaaagtgtaccccgatcaactcttcggcatatactaaaatctgtagaaaagggtattcctgtggtaactgcaaatcatagatgtgttattcaaggggagcagataatccgaaaatatggtattaatattaatagttcccacactttaagatgcagaaagtctacttctagtagtagatattttcaaacatccaatgcctgctgggacgtacaacttgtaaaagtgccaccttttgcggactctataacagaaggagatgttaaactcgaaaagaaagttggcgactatgtcgctgccgatgaagttgttatggaaatcgaaaccgacaaaacagccatgcctgttcacgcacctgctgcaggtgtgatagcagaaattctagtcaatgacggcgacactgtgaaaccaggtcaacacttgttcaagttaaccgttggtgaaggagctccaccaccagcagctgccaaacctgctgcggctgctccagctcctaagcctgccgccgctcctgctgccccaccagttgctccgcctccacctccaccatcagcgccacctgcagctgctcccccaaaacctgcagctgctcctcctaaaccagcggctccgatgacttcaatacctgtcgccgctattcgtcatgcgcaatccttggaggcggccacagttaagttaccaccagcagatccaaccaaagaaatctctggcacgcgcaccgaacatagagttaagatgaatagaatgaggctaaagatcgcccaacggcttaaggaggctcaaaacacgaatgccatgttaactactttcaacgagattgatatgacgaatatcatggctttccgcaaagaaaaccaagaggctttccaaaagaaatataacgtcaaattaagttttatgtcggcctttttaaaagctgcagcatacgctttacaagatcaacccattgtaaacgctgtgatagatggaaccgatatcttgtatagagactacgtagacatttcagttgctgtcgccacaccgaaaggtctcgttgtacctgttgtgagaaacgtagagagaatgacatatgccgatattgaattgggcatcgctgctttagcagataaagctagaaaaggtcaactggctgttgaagatatggatggcggcacttttactgtaagcaatggaggcgtatttggttctctttatggaactccaattattaatccaccccaatctgctatcttaggaatgcacggaatattcgatagaccaattgctattaaaggacaagctgttgtgaggccgatgatgtacatagccttaacttacgaccatagaatcattgacggacgtgaagcagtgctattcttaagaaaaatcaagcaagctgtggagaatccagccaccatagtcgctggtctttaaactgccgttaagagtaataaaatatcactttaattttatttttcattgtacggttaacgtatttttatttatattcatactaattggatatcagtcgtcgtcaactttttatcacttaatcattattaaagtattattgtcaaatattttattagaaaaggctacaggttaacgatatcatacatttgtaaattatgccgagtataaatatatatacccctaagttgtacacgcaacttcttttttgtgtaatatacatgtgcaaattttgaaaagtgtatttacattcgatattattaggctttgcctatttcacttaattgttatttattaattaaatgattaaacta

SEQ ID NO: 4159 - DNA, 1927 bp, Diabrotica virgifera
  SmartBlast Evalue=0; Info=Beta-galactosidase-like protein n=1 Tax=Tribolium castaneum RepID=D6WCM8_TRICA
attatatacatgacttgtcttaaagtctactgttgcgtagggtttaaaatgttcaaaaattataatgctgttgctccctgatttcagaaaaggtgctggtagatacaaagtctgtaaggggcccattctagcatatcggccaagtacaaagccgtttatgattacaatgcctttcttccagttttccatgtacacaaaagtgtcttctggagtaccattaattgttaaagtacccctatacatagcaggacctatggagttcgttagtacatttttccagtttgataagttgttcgtccaagaacttttaaattctagaggatagatagcccagtcgtatatgtagtcattgttgagtttaattccattaccttgccagatacctttaaactgtctgtacacaccaacgttaactctgccccaattttccacaactatatctaaagtagcgcctgttagatcttcagatgtaagagtaatagtagaatctaatatcctagatgttccaaagccatttaagtctgcagatttttgcaaccagggggatacgagtatcccgtttactagtaccattgctgtgtcacaaattctaccttctattttaagtattgcgtttgccggtatattcaaatttgttttacggtatactatgtacccataactttgaccattaccgttattgatatcaagtttttccatgggaatgacatttttcgaataagtaggagtaatcgtctgaagcatatcatataaaaacatttcttgttccatttttaccgttgcatacgctgttttcttaggagcagctggtacgtcaggaagagcagttttaatacgattatactgttctagcaattgtttcgctgcccaatatttttctgtgtagtcgccagattcatccaggggagaaacatattcgtaactggatactattgagtggtaatctgtttcccattcatcgaattttaaattctcagctccattcaaaaatgcaaaattagtaccgccgtggaacatataaatgttaacagaagaaggatattttaagatctcttcatagttatatctgaaattttcaacagttttgttagtagtatgagaatcaccccagtagtcgaaccatcctccccaatactccatcgtcatcactggacgattaggttggtatgatttaagtgtatctaagtttttcttaatatccgtatcaaagtttcccgtcattaggaaattgtccggcaacgttccgtacgtaccatgctgcggattgtctgatgtgaccaacaattccacaataccatttttaatcatcaaatccttcaatgtcaataaatactgcaggtcgtgtcgtccagaaatagaatattcgttttcaacttgaaacataataattggacctcccttggtaaattggaaagcagccaatatcggtaacagtacattgaaccatcttgccacgaaatttacataagtcgggttagtagttctcatgtcaatgtcatcgtgtcttagtagccaactgggatgtccaccaaattcatactcggcgcaaataaatgggccagatcgaacgatagtaaacagatcttcttcttgagctgttttaagaaactcctgaaggtgaagaaaatcggacatgtcattaccattgtcaccaaaatcaaattctcctgatctcggttcgtgtaaattccatggaatatacgtttctacagtattaaggccagcagctctcatttttctcaatctatctctccaatatgcccttggtactcgaaaatagtgcattgctccactgtagatggaaatttctttattgttaagtgtgaaggtggacctatcagcattaagcccttgactaataccttcggaagtgtaatacccataattggtggctaaaccagccgtcacgtttacactgcttaaagac

SEQ ID NO: 4160 - DNA, 1927 bp, Diabrotica virgifera
  SmartBlast Evalue=0; Info=Beta-galactosidase-like protein n=1 Tax=Tribolium castaneum RepID=D6WCM8_TRICA
attatatacatgacttgtcttaaagtctactgttgcgtagggtttaaaatgttcaaaaattataatgctgttgctccctgatttcagaaaaggtgctggtagatacaaagtctgtaaggggcccattctagcatatcggccaagtacaaagccgtttatgattacaatgcctttcttccagttttccatgtacacaaaagtgtcttctggagtaccattaattgttaaagtacccctatacatagcaggacctatggagttcgttagtacatttttccagtttgataagttgttcgtccaagaacttttaaattctagaggatagatagcccagtcgtatatgtagtcattgttgagtttaattccattaccttgccagatacctttaaactgtctgtacacaccaacgttaactctgccccaattttccacaactatatctaaagtagcgcctgttagatcttcagatgtaagagtaatagtagaatctaatatcctagatgttccaaagccatttaagtctgcagatttttgcaaccagggggatacgagtatcccgtttactagtaccattgctgtgtcacaaattctaccttctattttaagtattgcgtttgccggtatattcaaatttgttttacggtatactatgtacccataactttgaccattaccgttattgatatcaagtttttccatgggaatgacatttttcgaataagtaggagtaatcgtctgaagcatatcatataaaaacatttcttgttccatttttaccgttgcatacgctgttttcttaggagcagctggtacgtcaggaagagcagttttaatacgattatactgttctagcaattgtttcgctgcccaatatttttctgtgtagtcgccagattcatccaggggagaaacatattcgtaactggatactattgagtggtaatctgtttcccattcatcgaattttaaattctcagctccattcaaaaatgcaaaattagtaccgccgtggaacatataaatgttaacagaagaaggatattttaagatctcttcatagttatatctgaaattttcaacagttttgttagtagtatgagaatcaccccagtagtcgaaccatcctccccaatactccatcgtcatcactggacgattaggttggtatgatttaagtgtatctaagtttttcttaatatccgtatcaaagtttcccgtcattaggaaattgtccggcaacgttccgtacgtaccatgctgcggattgtctgatgtgaccaacaattccacaataccatttttaatcatcaaatcctttaatgtcaataaatactgcaggtcgtgtcgtccagaaatagaatattcgttttcaacttgaaacataataatcggacctcccttggtaaattggaaagcagccaatatcggtaacagtacattgaaccatcttgccacgaaattaacataagtcggattagtagttctcatgtcaatatcatcgtgtcttagtagccaactgggatgtccaccaaattcatactcggcgcaaataaatgggccagatcgaacgatagtaaacagatcttcttcttgagctgttttaagaaactcctgaaggtgaagaaaatcggacatgtcattaccattgtcaccaaaatcaaattctcctgatctcggttcgtgtaaattccatggaatatacgtttctacagtattaaggccagcagctctcatttttctcaatctatctctccaatatgcccttggtactcgaaaatagtgcattgctccactgtagatggaaatttctttattgttaagtgtgaaggtggacctatcagcattaagcccttgactaataccttcggaagtgtaatacccataattggtggctaaaccagccgtcacgtttacactgcttaaagac

SEQ ID NO: 4161 - DNA, 1940 bp, Diabrotica virgifera
  SmartBlast Evalue=1E-150; Info=UPF0326 protein FAM152B n=1 Tax= Camponotus floridanus RepID=E2ALF6_9HYME
tgaatgaatcaatgaaaagaatgatatggaactatctcatgtgtaaaacattttagggatgactaatgataaaagcttctagtcagaatcaacttatacaacacatttttgactactaaattttgtttcattcaataattttaacaatagactttatccagcacccgtgacactgcgttaacattaataataaactttgaaataaataaataaataaaacggagcaaacaaaacatctaccgcaattttgcggcgatttgatcaactaggacatcgattctttcgctggtacccttaaagcttcttggatcgggaccgatcatctggattagttgaggcacttcttgcgtggagacttggacgaacttggctagcgcttttaagcacctgaagagttgttcctctggtggtttggagttgaaatactgcagcagagccatggtaagctcgacggccacgtcatcgaacacctttgataaactcccttttggaaatcgttgtcgtatccgaaaatttctgaatttctccttgcaagcaagattgtggataatagccgagcctcggtcttgcaaaactggagagtccgataaaagggaatggactgctactttggtcgtcaccctgatattgctggtctgttggttattgtatgaccattcggaaatgtacagcaaccactccgaagagctcaaattctcaaacatattcgccataaaaacagcaattgcttcctgttctggcatgctcaatctgtcgatttcaaaagcgtagttcatcaagacgtggtcctttcgatcctgatgtagaactaatatgacgtcatctttcaaggccgccatagccaaaacattgacagtcttcactctaacgtcaacagacagttggggatcgttgagcaatcgtcctacgaaatccaaaaacccatcacttaaggcccagcttccttcatcgccaatcatgtattgttgaagttcttccgttgctctctgttcttctggtgttagctttccgtcgattagggcgaccaaagcgtcaaattctgcttttacgtcaattatgtctttataaactattggtggatccctggctttcttcttagcttcctcctcccgtctttcttcttcttccatcgctagtgcttgatctgagggaagttgcgtttgtccgttcactgcttctgtgtcggccattgttacgttatctgtaagttctggtggtaaaactccgcctgattccagtatctttttgcgcttcttctcccgctttttctctttcttggctattttatcctttatgctctttctgcgctgttccaatagaaacgaattgtatcttgcttcctctatctgtgagtttaactggtcgaaatcgggactgggctccttaatactactggtctgttcctctctgatgggcctcgcgctgttctccaaccgcgacactagagccaaaaagctgggacccaaactggtgttgagtacttcgttgggaaggtctaagatgtacttgggtatcgacgcaccgcacaaaaattgagctatatcatgggagaagttgttgcagttgtggtggagtaagctgtatgtattaccggcaaaggaagattctgatagtcctttcaaataatcaataaacacagtgtaggggacctgtgtctctcccaaaacttctaccctcagtggacgccctaatgccgtagtaccaggattacagctttcaacgcctctggacccgaagaaatattcccggttataaatcactatggacgtgtgccaaattccatcaattttctttcctattattgtaggggaaataattgctgccatgccttgggatagatcataaatatacaactccactttatgtgtacccattttgaattatatttatttaaaatttaaacttttggcttttttgggcctctacaggatcaataacac

SEQ ID NO: 4162 - DNA, 1898 bp, Diabrotica virgifera
  SmartBlast Evalue=1E-156; Info=UPF0326 protein FAM152B n=1 Tax= Camponotus floridanus RepID=E2ALF6_9HYME
tgaatgaatcaatgaaaagaatgatatggaactatctcatgtgtaaaacattttagggatgactaatgataaaagcttctagtcagaatcaacttatacaacacatttttgactactaaattttgtttcattcaataattttaacaatagactttatccagcacccgtgacactgcgttaacattaataataaactttgaaataaataaataaataaaacggagcaaacaaaacatctaccgcaattttgcggcgatttgatcaactaggacatcgattctttcgctggtacccttaaagcttcttggatcgggaccgatcatctggattagttgaggcacttcttgcgtggagacttggacgaacttggctagcgcttttaagcacctgaagagttgttcctctggtggtttggagttgaaatactgcagcagagccatggtaagctcgacggccacgtcatcgaacaccacggtttttacctccttgcaagcaagattgtggataatagccgagcctcggtcttgcaaaactggagagtccgataaaagggaatggactgctactttggtcgtcaccctgatattgctggtctgttggttattgtatgaccattcggaaatgtacagcaaccactccgaagagctcaaattctcaaacatattcgccataaaaacagcaattgcttcctgttctggcatgctcaatctgtcgatttcaaaagcgtagttcatcaagacgtggtcctttcgatcctgatgtagaactaatatgacgtcatctttcaaggccgccatagccaaaacattgacagtcttcactctaacgtcaacagacagttggggatcgttgagcaatcgtcctacgaaatccaaaaacccatcacttaaggcccagcttccttcatcgccaatcatgtattgttgaagttcttccgttgctctctgttcttctggtgttagctttccgtcgattagggcgaccaaagcgtcaaattctgcttttacgtcaattatgtctttataaactattggtggatccctggctttcttcttagcttcctcctcccgtctttcttcttcttccatcgctagtgcttgatctgagggaagttgcgtttgtccgttcactgcttctgtgtcggccattgttacgttatctgtaagttctggtggtaaaactccgcctgattccagtatctttttgcgcttcttctcccgctttttctctttcttggctattttatcctttatgctctttctgcgctgttccaatagaaacgaattgtatcttgcttcctctatctgtgagtttaactggtcgaaatcgggactgggctccttaatactactggtctgttcctctctgatgggcctcgcgctgttctccaaccgcgacactagagccaaaaagctgggacccaaactggtgttgagtacttcgttgggaaggtctaagatgtacttgggtatcgacgcaccgcacaaaaattgagctatatcatgggagaagttgttgcagttgtggtggagtaagctgtatgtattaccggcaaaggaagattctgatagtcctttcaaataatcaataaacacagtgtaggggacctgtgtctctcccaaaacttctaccctcagtggacgccctaatgccgtagtaccaggattacagctttcaacgcctctggacccgaagaaatattcccggttataaatcactatggacgtgtgccaaattccatcaattttctttcctattattgtaggggaaataattgctgccatgccttgggatagatcataaatatacaactccactttatgtgtacccattttgaattatatttatttaaaatttaaacttttggcttttttgggcctctacaggatcaataacac

SEQ ID NO: 4163 - DNA, 1865 bp, Diabrotica virgifera
  SmartBlast Evalue=1E-128; Info=Probable serine carboxypeptidase CPVL n=1 Tax=Camponotus floridanus RepID=E2AY00_9HYME
tatattaccaagccatccaatcactgacaaacaattatttatccaaaatcttagttgaaaatcaaagactttgtggaaaaaaccgcattctccggggaaaaccttcgtcgaagtaaatcgggaaaaacacgtctccatgcagaacttaaccacggtgaacccctatttggatgtcctggcgcaaagataaaacccttggagccatagagcaaaaaattgaaaaaacacgattttcgggcgccaccctgtctataaaaaaagtagcacaccatctgcggaccctgctgcaccctacacattaatatatacaatcataagattcgattccagcaataaaattgctggcaaataacttttcccaaaaatggcctattcgccgataatctgaacagactaacatatctttattctagtgaagttgattttgtgtaaaacgtgtaattagatccagcgctgcctttggctgatctccaggaaccaaatgcccagcatttctcaccaaaacctctgtcaagttaccagcctgcttaacgtatccggctagataatcacccacataccatttctgccttcgagcagttttgtattcgttggcagcactgaaatgcaaatgctttaaaaagttctcagtagtgggataggcaactattatatcaagctgtccgttgtagaaaagaactctgatgttgctgagcagttcagaaatccacggcgctacggactgcatcaagtccaggaccagttttttctccacgtcgtctccgtcgttgtattttaggttgcctacgtgaatcgcttttcggacttgctcgctttccaggaaatcagttaagtttgactctcctgaaccatggtcctgtaagtaattataataagaagtgaatccagtgatgtttttaaacaaagtgtttcctccgtttaggtctccatttagaagatcgtcaaatagttcaaaggctttctggaagtcttctttatggatatattgtataatttctttttccaaatgatgtatttcttccttctcattactatccgccaatcctatctgatacagatagtcggaataaaccaattgatgcacaggatcgcacaaaccgtttccaatagccattcccttcaagttaattttcaactctgcttctttattcttcgtgtaaatggcatacgccgccgctggaatatactttcctgcataagactcacccgtaatgaagaagtcgttcttttgaagatccggaaacagcaggaaaaaactgacggatagcttcatagagatcttcaccaaccttggtttcgttttgtgcgaagccattgttggtaaaactgtatcctgtttgaactgggttgtctatgtataggactgaatgttccttgttccaagaataagggttcagttctaaatctggagaattgttgtagttgaatggtccgttttcttgaaatatggcgtacaaagaagaagcaccgggacctccttgcaaccacagtaaaacaggtgcttctttgtagttggtttctgctgggaagaaccaaaagaacatgtttgagtcaaaggctttatcgacggtgaagaatccagaataagactttacgttcttgaaaacatcggaaggaactttggccagtgattgagctttttctatttggttgttctctatgtacggcgttaaaattagtggatcttctgtaacaattacatctcttttgatgttttttggcttcagttttgggtagaagcttgaaaaagctacttctgcatcttgtatataacacagcagcaaaaacgttgctgcaactgctctgaacatcatttctaggcactggttcgagtacaaataaaagaaatcacttgtgtgacctag

SEQ ID NO: 4164 - DNA, 1864 bp, Diabrotica virgifera
  SmartBlast Evalue=1E-132; Info=Probable serine carboxypeptidase CPVL n=1 Tax=Camponotus floridanus RepID=E2AY00_9HYME
tatattaccaagccatccaatcactgacaaacaattatttatccaaaatcttagttgaaaatcaaagactttgtggaaaaaaccgcattctccggggaaaaccttcgtcgaagtaaatcgggaaaaacacgtctccatgcagaacttaaccacggtgaacccctatttggatgtcctggcgcaaagataaaacccttggagccatagagcaaaaaattgaaaaaacacgattttcgggcgccaccctgtctataaaaaaagtagcacaccatctgcggaccctgctgcaccctacacattaatatatacaatcataagattcgattccagcaataaaattgctggcaaataacttttcccaaaaatggcctattcgccgataatctgaacagactaacatatctttattctagtgaagttgattttgtgtaaaacgtgtaattagatccagcgctgcctttggctgatctccaggaaccaaatgcccagcatttctcaccaaaacctctgtcaagttaccagcctgcttaacgtatccggctagataatcacccacataccatttctgccttcgagcagttttgtattcgttggcagcactgaaatgcaaatgctttaaaaagttctcagtagtgggataggcaactattatatcaagctgtccgttgtagaaaagaactctgatgttgctgagcagttcagaaatccacggcgctacggactgcatcaagtccaggaccagttttttctccacgtcgtctccgtcgttgtattttaggttgcctacgtgaatcgcttttcggacttgctcgctttccaggaaatcagttaagtttgactctcctgaaccatggtcctgtaagtaattataataagaagtgaatccagtgatgtttttaaacaaagtgtttcctccgtttaggtctccatttagaagatcgtcaaatagttcaaaggctttctggaagtcttctttatggatatattgtataatttctttttccaaatgatgtatttcttccttctcattactatccgccaatcctatctgatacagatagtcggaataaaccaattgatgcacaggatcgcataaaccgtttccaatagccattcctttcaagttaatttttaactctgcttctttattcttcgtgtaaatggcatacgacgccgctggaacatactttcctgcataagactcgcccgtaatgaagaagtcgttcttttgaagatccggaaacagcaggaaaaactgacggatagcttcatagagatcttcaccaactttggtttcgttttgtgcgaagccattgttggtaaaactgtatcctgtttgaactgggttgtctatgtataggactgaatgttccttgttccaagaataagggttcagttctaaatctggagaattgttgtagttgaatggtccgttttcttgaaatatggcgtacaaagaagaagcaccgggacctccttgcaaccacagtaaaacaggtgcttctttgtagttggtttctgctgggaagaaccaaaagaacatgtttgagtcaaaggctttatcgacggtgaagaatccagaataagactttacgttcttgaaaacatcggaaggaactttggccagtgattgagctttttctatttggttgttctctatgtacggcgttaaaattagtggatcttctgtaacaattacatctcttttgatgttttttggcttcagttttgggtagaagcttgaaaaagctacttctgcatcttgtatataacacagcagcaaaaacgttgctgcaactgctctgaacatcatttctaggcactggttcgagtacaaataaaagaaatcacttgtgtgacctag

SEQ ID NO: 4165 - DNA, 1850 bp, Diabrotica virgifera
  SmartBlast Evalue=3E-21; Info="Perlucin, putative n=1 Tax= Pediculus humanus corporis RepID=E0VL51_PEDHC"
ttggtaaaatttatttataaagcttgctattaattttttatttattggcacatggttttaagctgttgttaatattaacggaataagtgccttgattcttgtgaccttcatctgctccaggtgctacactaacaccagaagacaccaagttgttgttaatgtatacattaacaatgggtttaaccaaacagttctttttataaacaggtgctgcaggaggtgtgacctctgtctcatccttaactttaccaactgtaccaacgacgtcatcagctgggatagttccaccgggaaccgcactttcttggttctcgcagatgaagggtctgacctttccacacttttctagtctccagataccgcttaataaaatagtcatacaggttctgtcgtctacgaataaggtttcattgggttctaatttttggtagataattgggcgattgatccttaaccatctccagtctgagagtggccttcttccggagatccagaatggaccgtcttcaccgacgtcttcaagtacctttttggtactttcagtttcttgttcattttcaatggctagcaactgaagaccgtggtactcgcagaaaacttgagcttgtttttgtgtacccaacatttccgtttcaatgtgatattttttaccagcgttgtaggtataagttaaaaatcctggtggagtttcctctatagctgcttgccagtcttcatcgcttgcaggttccagttcctcgtcctctccttcgtttgttgctgcagtggaagtttgaattttttcttcattatcctcgtcgacaattgcggcatatatagcgttaacaaattcatctgcatctgggtcaacttcttcttcgtccacgtctcttttgacacgtccaaggtgttcattggtaactttctcgcagatgaagggaagttggtctgtgcagctgagatcgttccagaacaatccgttctcgtttgtgtgttgaaggttgatgcacttttcgtttacgttgtctggctggtttttgtcccatcttgtgtattcgattggttggccgtttgtgaaccaggtccaggtgtcgtctaagagtctagtaccagcagtccaccatcttgatccaagattgttatctctgacatatttctctatagctttgttttcttcttcggattcgatagttacaagactcatatggagcattctgcaataaaatgctgcttgtgtgaatctacctgtaaaatcccttgagaaataatagtttttgccattaaaattcaacatgttgatgtttggagagtaggatggtttggcaacggctgctggtgaagctaccaccgaggctgctgctggaacagcttcgtgattttccctttggcaaataaagttaagctgggtattgcagtctctgtcattccacaagatctcgttattattttccaacaactggacgcacttttcaccattataactaggctctccattgttccatcttgtgtattccacagtttttcctgtgctcatccagacgaagtttctattgtccaggaagttggcagcagaagtccagtattcggtaccactggccttattatccaaaatgattttcttgatagcatcattttcctcttgtgactcaatggtcaatagtttcatgtaaaggacatcacagaattgaagagcctcttggaagtttgccttgtagttaactccaagaaagtagctcttgtttccatgtttcaccagtggaacattgggtacgctagcccaacctttcaaccaacccttttgcgctggtgctccctgtgcatatactgctacggcaaaaatcagtaacaaaacccctctacttaacattttg

SEQ ID NO: 4166 - DNA, 1850 bp, Diabrotica virgifera
  SmartBlast Evalue=2E-21; Info="Perlucin, putative n=1 Tax= Pediculus humanus corporis RepID=E0VL51_PEDHC"
ttggtaaaatttatttataaagcttgctattaattttttatttattggcacatggttttaagctgttgttaatattaacggaataagtgccttgattcttgtgaccttcatctgctccaggtgctacactaacaccagaagacaccaagttgttgttaatgtatacattaacaatgggtttaaccaaacagttctttttataaacaggtgctgcaggaggtgtgacctctgtctcatccttaactttaccaactgtaccaacgacgtcatcagctgggatagttccaccgggaaccgcactttcttggttctcgcagatgaagggtctgacctttccacacttttctagtctccagataccgcttaataaaatagtcatacaggttctgtcgtctacgaataaggtttcattgggttctaatttttggtagataattgggcgattgatccttaaccatctccagtctgagagtggccttcttccggagatccagaatggaccgtcttcaccgacgtcttcaagtacctttttggtactttcagtttcttgttcattttcaatggctagcaactgaagaccgtggtactcgcagaaaacttgagcttgtttttgtgtacccaacatttccgtttcaatgtgatattttttaccagcgttgtaggtataagttaaaaatcctggtggagtttcctctatagctgcttgccagtcttcatcgcttgcaggttccagttcctcgtcctctccttcgtttgttgctgcagtggaagtttgaattttttcttcattatcctcgtcgacaattgcggcatatatagcgttaacaaattcatctgcgtctgggtcaacttcttcttcgtccacgtctcttttgacacgtccaaggtgttcattggtaactttctcgcagatgaagggaagttggtctgtgcaggtgagatcgttccagaacaatccgttctcgtttgtgtgttgaaggttgatgcacttttcgtttacgttgtctggctggtttttgtcccatcttgtgtattcgattggttggccgtttgtgaaccaggtccaggtgtcgtctaagagtctagtaccagcagtccaccatctggatccaagattgttatctctgacatatttctctatagctttgttttcttcttcggattcaatagttacaagactcatatggagcattctgcaataaaatgctgcttgtgtgaatctacctgtaaaatcccttgagaaataatagtttttgccattaaaatccaacatgttgatgtttggagagtaggatggtttggcaacggctgctggtgaagctaccaccgaggctgctgctggaacagcttcgtgattttccctttgacaaataaagttaagctgggtattgcagtctctgtcattccacaagatctcgttattattttccaacaactggacgcacttttcaccattataactaggctctccattgttccattttgtgtattccacagtttttcctgtgctcatccagacgaagtttctattgtccaggaagttggcagcagaagtccagtattcggtaccacttgccttattatccaaaatcattttcttgatagcatcattttcctcttgtgactcaatggtcaatagtttcatgtaaaggacatcacagaattgaagagcctcttggaagtttgccttgtagttaactccaagaaagtagctcttgtttccatgtttcaccagtggaacattgggtacgctagcccaacctttcaaccaacccttttgcgctggtgctccctgtgcatatactgctacggcaaaaatcagtaacaaaacccctctacttaacattttg

SEQ ID NO: 4167 - DNA, 1848 bp, Diabrotica virgifera
aattataataaataccactaacaatatacatacatttattttaataaattcggaatacttttgacatttaataaatacagagtggcacaagtttcctagcttttgaggttgccgtatcattttgatatttggacatgtatcttcatagttaacagcaatcattctgcaatagggtgctaaacacatatttttaaaaggaacaccctacgaagtggacagatcatatcaaaaccattcaataataaatattttaaaacatacatgatatttctgaagatacacgaaataatatatcaaaatgagatctactttcatggcacaagtaaaatccgcttgactgatttttttattatactgaatggtactataaaaattataaaatattttatttttataaccatcaaactaagcaacttgtctaatcaccaaaaacatccataatacattaatgccgcaactttgtgccacactgtagattataaaaagagctgtggcgaaaaaattttcaatgctagaagaactgaatttgcaaaatttgctcttgttatagaaacatggtcacacacttaaataatagtcacactattcgttaaatatgttcaagtcacgtcaagtacagattctaataattttgaagatggttcaatacctaaagagttgttctgaagctattttcttatgtcatttgttgttaataattattatctttcatggaaagtacccataatttgagttgaaaatagatctaccttcgtttcgattttcattttggaaattttataacagtttctgaagtggaagtcgaaacgtcaaaataaacgcattttcaactcaaattgtgctcaattctcattaaagacagtaaataaaggccgatttatctaacaacgggacgtggatgacacggggcgtagaacaatagacggcgcacgtccccgttgtcgctacgtcccgttgtacgataaactagccaatgcttttcatatcagacgattcttcaacgtgcctcgtaagacagccgtgtgtcgttcacgttccgtcttaagataaatcggccttaactatataaactgagcataaacaaatcaaaagacgtgaagactgttgcctttcaaaaacagatacaacttagttatcaataataatattagaggaaaaatagttgtctctcggtcgtgttagtcagtttttttgaatttattgtataatagtaaagttcaatcaagagatatatcgctcgtccaaaataatccagaattgtgtaaagctaactaatttttatcttatctgatatttaaaggaaacattttgatactgtttttaaatatattaatatacacttccataatttcacgcttgtgtattaagtgctagagtttaaacgggtgatatatctcaacctgggaagcacctaggaaagcttcatcgcacattttttagttatttccttcttctactgatctaataatactaaaaagaaaatcaaatactcagttcaaactagaaatgaaaaacattaaataacatatcaaatacaataatttttttaatttttcattatgaacgaagaaattatacagggtgtcccgaaaagattggtcataaatcataccacagattctggggtcaaaaataggttgattgaacctcacttacctatatacaatagtgcacacaaaaaaagttacaaccctttgaagttacaaaatgaaaatcgatgatttttcatatatcgaaaactcttgtgagattttttattgaaaatgcacatgtagcattctcacggcagcaacatctttaaaaaaaaattaaagtgaaatttgtgcacccactaaaacttctatgggg

SEQ ID NO: 4168 - DNA, 1849 bp, Diabrotica virgifera
aattataataaataccactaacaatatacatacatttattttaataaattcggaatacttttgacatttaataaatacagagtggcacaagtttcctagcttttgaggttgccgtatcattttgatatttggacatgtatcttcatagttaacagcaatcattctgcaatagggtgctaaacacatatttttaaaaggaacaccctacgaagtggacagatcatatcaaaaccattcaataataaatattttaaaacatacatgatatttctgaagatacacgaaataatatatcaaaatgagatctactttcatggcacaagtaaaatccgcttgactgatttttttattatactgaatggtactataaaaattataaaatattttatttttataaccatcaaactaagcaacttgtctaatcaccaaaaacatccataatacattaatgccgcaactttgtgccacactgtagattataaaaagagctgtggcgaaaaaattttcaatgctagaagaactgaatttgcaaaatttgctcttgttatagaaacatggtcacacacttaaataatagtcacactattcgttaaatatgttcaagtcacgtcaagtacagattctaataattttgaagatggttcaatacctaaagagttgttctgaagctattttcttatgtcatttgttgttaataattattatctttcatggaaagtacccataatttgagttgaaaatagatctaccttcgtttcgattttcattttggaaattttataacagtttctgaagtggaagtcgaaacgtcaaaataaacgcattttcaactcaaattgtgctcaattctcattaaagacagtaaataaaggccgatttatctaacaacgggacgtggatgacacggggcgtagaacaatagacggcgcacgtccccgttgtcgctacgtcccgttgtacgataaactagccaatgcttttcatatcagacgattcttcaacgtgcctcgtaagacagccgtgtgtcgttcacgttccgtcttaagataaatcggccttaactatataaactgagcataaacaaatcaaaagacgtgaagactgttgcctttcaaaaacagatacaacttagttatcaataataatattagaggaaaaatagttgtctctcggtcgtgttagtcagtttttttgaatttattgtataatagtaaagttcaatcaagagatatatcgctcgtccaaaataatccagaattgtgcaatgctaactaatttttatcttatttggtatttaaaagaacacattttgatactgtttttaaatatactaatatacacttgcataattacacgcttgtgtattaagtgctagaatttaaatgggtgatatatctcaacctgggaagcacctaggaaagcttcatcgcacattttaaagttatttccttcttctactgatctaataatactaaaaagaaaatcaaatactcagttcaaactagaaatgaaaaacattaaataacatatcaaatacaataatttttttaatttttcattatgaacgaagaaattatacagggtgtcccgaaaagattggtcataaatcataccacagattctggggtcaaaaataggttgattgaacctcacttacctatatacaatagtgcacacaaaaaaagttacaaccctttgaagttacaaaatgaaaatcgatgatttttcatatatcgaaaactcttgtgagattttttattgaaaatgcacatgtagcattctcacggcagcaacatctttaaaaaaaaattaaagtgaaatttgtgcacccactaaaacttctatgggg

SEQ ID NO: 4169 - DNA, 1831 bp, Diabrotica virgifera
aacatctactctttgaggatctatcggaaaatacataataattgattatattcttttttaagattgcgcacaatacttgagacaaaaaaatataaaaacttgactttctctgttaaaacattatatttatagttaaaaatgtcgtctacttcgcctagttattgtagtctagttattttgctggtagttactgttttatgtcaaacaaaatgtgacgaagacggtaccatagttgaattgaagcaaggaaaaatcagggggcacgtactaaaaagtgaaaatggacaggactattatgcatttcaagaaattccatatgctgctcctccagtaggaaaaaatagatttcagctccctaaagaaccagagccatgggacaatattctagatacaaaaaaaaatacaaaaatttgttaccaaacaataagcaggttcgactttcttaaaatagaagaggattgtctgtatatcaatgtttacagtccacagaaacctggtagcgatgacttactcccagttcttctatggatccacggaggtggtttagtaaatgaatccagtacaattgaatactatggcccgaaatatattatggatcacggtgtggtcgttgtgacttttaactaccgtcttggaccatttggatttcttggtaccgacgatggagttattccccagaatcttggtttaaaagatcaaagatttgctatagaatgggttaatcaaaacattcatctctttggaggaaatccagaacatgtagtcctagttggtgaaagtgctgggtctctatctgttggtttacacttaatgggagactgggaaggaggcaaagaactatttcatggtgtcatcatgcagagcggtactcctatttctggtatttgtactacacaacatccaactgaacaaacttttaggcttggtaaaaaggtggatccatcatttgattcaaaaagctccgaagaactattacaagtactacaaagtgcttcagcacatgacattctctgggctggaataccaggtggagcagtgctggaaagtagtggaccttttagttatcctgcataccaagcctttattgaccaaaattataaaaaagtgccagttataattggatttaattcagaagaatggctttatctcgctttgatgaataacgaagaagtgcttaaagcttatgatgcaaatccaagttcgttagtttccggactaatgacaatgactcctgaaaatcgaaccattgcaggaaatctcttgaaagatctatacaccaataatggtagtttcgtcgatgatctaggtggttatataaggtcaacaagtgacaacctctttacaacatcaacctgtaaacaagtcgagcttgcttctgaggtggttccatattttttctatcaattttcttacaagggagagttgggacaagggatgggattactaccagtcgcaccaccagacgttggtggtactgtagcccatgctgaagatctccattatatgtgggaagaacagggtacaaatagtgacttaagtaaatattctgctgaagatcagttgatgttacatcgctatgtcacgctatggactaacttcataaagtatttagatccaacaccaaaaccatattcactactgagtaatttcacttggagcccttccaataaggaaacacttaggtacatgaactttaagttggacttagagatgagcgaacatccgagacagtactctcaagttaaagaaataaaagaaaagtatatggaacctccatacgttgtattcacatagaattttattgaaaatattgaaaataaaattatttaaa

SEQ ID NO: 4170 - DNA, 1831 bp, Diabrotica virgifera
aacatctactctttgaggatctatcggaaaatacataataattgattatattcttttttaagattgcgcacaatacttgagacaaaaaaatataaaaacttgactttctctgttaaaacattatatttatagttaaaaatgtcgtctggttcgcctaattattgtagtctagttattttgctggtagttactgtttttagtcaagcaaaatgtgacgaagacggtaccatagttgaactgaagcaaggaaaaatcagggggcacgtactaaaaagtgaaaatggacaggactattatgcatttcaagaaattccatatgctgctcctccagtaggaaaaaatagatttcagctccctaaagaaccagagccatgggacaatattctagatacaacaaaaaatacaaaaatttgttatcaaactttaagcaggtttgactttcttaaaatagaagaggattgtctgtatataaatgtttacagtccacagaaacctggtagcgatgacttactcccagttcttctatggatccacggaggtggtttagtaaatgaatccagtacaattgaatactctggcccgaaatatattatggatcacggtgtggtggttgtgacttttaactaccgtcttggaccatttggatttcttggtaccgacgatggagttattccacagaatcttggtttaaaggatcaacgatttgctatagaatgggtcaatcaaaacattcatctctttggaggaaatccagaacatgtagtcctagttggtgaaagtgctgggtctctatctgttggcttacacttaattggagactgggaaggaggcaaagaactatttcatggtgtcatcatgcagagcggtactcctatttctggtatttgtactacacaacatccaactgaacaaacttttaggcttggtaaaaaggtggatccatcatttgattcaaaaagctccgaagaactattacaagtactacaaagtgcttcagcacatgacattctctgggctggaataccaggtggagcagtgctggaaagtagtggaccttttagttatcctgcataccaagcctttattgaccaaaattataaaaaagtgccagttataattggatttaattcagaagaatggctttatctcgctttgatgaataacgaagaagtgcttaaagcttatgatgcaaatccaagttcgttagtttccggactaatgacaatgactcctgaaaatcgaaccattgcaggaaatctcttgaaagatctatacaccaataatggtagtttcgtcgatgatctaggtggttatataaggtcaacaagtgacaacctctttacaacatcaacctgtaaacaagtcgagcttgcttctgaggtggttccatattttttctatcaattttcttacaagggagagttgggacaagggatgggattactaccagtcgcaccaccagacgttggtggtactgtagcccatgctgaagatctccattatatgtgggaagaacagggtacaaatagtgacttaagtaaatattctgctgaagatcagttgatgttacatcgctatgtcacgctatggactaacttcataaagtatttagatccaacaccaaaaccatattcactactgagtaatttcacttggagcccttccaataaggaaacacttaggtacatgaactttaagttggacttagagatgagcgaacatccgagacagtactctcaagttaaagaaataaaagaaaagtatatggaacctccatacgttgtattcacatagaattttattgaaaatattgaaaataaaattatttaaa

SEQ ID NO: 4171 - DNA, 1830 bp, Diabrotica virgifera
cagtttaatcgatagttttattgtcaacaatttttaatacagtactgataagctaaaataaagaatatcttttatctgctcctttccgtttatattctctgtcaaaataacaactaaaatatcagtgattacaaattattaacaacaattggaaaattttgaaaaatgaccttccaacagtctcttctttcagcttcggggatgcttcccactctaacttcttttcctatatctataaacccacaatccttatcagtagccttccaagttaattgtaaatcatttgcaggtggtgttgggtttcctgttttagcaaaatttgtccatagtttaacaaaccgacgaacaactttatcttctgtttcacttttatcaagaaactgagctgctacgtggtttttaaaaaggtaacccaattcatcgccatgacacgtacctggatcagtaacctttgtaatttttttaagaaggtttaagccggcgtctattgaaattctgtacaaataaactggacacttggatgttcttgcgtggacgtttcctgctgcaataatcccagatacaaagtaaaaatctgtaggtaatagatatttgtctttttcactttctgttgccctttttttgtaagtttctacaagggtttttaaaatacgtttattctgaggatcatcttcagataaaccaggtacaaggaatttcttaacgtcaacatcttcttcctgtccctcttttttagatccagctttgtttccgaaacgtttatacacttccagtagaattccttccctatcacagtaaccaagtattaaaggaactttattgtactggccagttgttaacagttcagtagggttagatgttagaactgctgttttgttgggtttttcgatgtttggacctatcacagatgcgccttttaaagacgcataaaatttttcctgagacaccaaaagttcttcaacaggtaacttttttaaaacttctaaagcctctttttcagtcatcacagtatcagtaattgttttggtaaacgtcaacgcataatccttagaaaatacccatggattcagcaaacacccactttgtaaaatagctttatggaacaatccttttgatgatggtgatactacgtgaatatgaacagaggcacttccagcactctctccaaatatggtaacattatttggatctccgttaaagctcttgatattattttgtacccacttcaatgctagttgttgatcttttaagccagcattaccaggaacgtctaaggatgtgtcatctagatgtaaaaaccctaagaagcctacacgataatttatcgtaacaagaacgatgtcctcagtgattaggaattctggtccatagaagctacttttgttactaccagttacgaaagcaccgccatgtatccaaaccataactggctttaatgcattacattctgatggtaatttttttgtatacacatttaaatacaagcaatcttctgacccttcaagttcttttgtcatctcatttcgttgatagcaagagtttccatcaatcgtagcatcccttatttcaatccatggctcagcaggtactggagccttaaatctcaaatctccaagaggcggtttcgcaaacggtattcccagaaatgaataaaaagattcaccatccaaattcactttttggcatcctctaacttgaccttcgaccaccgtaactatgggagactccatggtttttatttgattagcgcgtagtatccgctaataaattgtaatttaccgacacctaactacaccgtgatgcaactgaatgcatgtacgaatgacaaac

SEQ ID NO: 4172 - DNA, 1830 bp, Diabrotica virgifera
cagtttaatcgatagttttattgtcaacaatttttaatacagtactgataagctaaaataaagaatatcttttatctgctcctttccgtttatattctctgtcaaaataacaactaaaatatcagtgattacaaattattaacaacaattggaaaattttgaaaaatgaccttccaacagtctcttctttcagcttcggggatgcttcccactctaacttcttttcctatatctataaacccacaatccttatcagtagccttccaagttaattgtaaatcatttgcaggtggtgttgggtttcctgttttagcaaaatttgtccatagtttaacaaaccgacgaacaactttatcttctgtttcacttttatcaagaaactgagctgctacgtggtttttaaaaaggtaacccaattcatcgccatgacacgtacctggatcagtaacctttgtaatttttttaagaaggtttaagccggcgtctattgaaattctgtacaaataaactggacacttggatgttcttgcgtggacgtttcctgctgcaataatcccagatacaaagtaaaaatctgtaggtaatagatatttgtctttttcactttctgttgccctttttttgtaagtttctacaagggtttttaaaatacgtttattctgaggatcatcttcagataaaccaggtacaaggaatttcttaacgtcaacatcttcttcctgtccctcttttttagatccagctttgtttccgaaacgtttatacacttccagtagaattccttccctatcacagtaaccaagtattaaaggaactttattgtactggccagttgttaacagttcagtagggttagatgttagaactgctgttttgttgggtttttcgatgtttggacctatcacagatgcgccttttaaagacgcataaaatttttcctgaaacaccaaaagttcttcaacaggtaacttttttaaaacttctaaagcctctttttcagtcatcacagtatcagtaattgttttggtaaacgtcaacgcataatctttagaaaatacccatggattcagcaaacacccactttgtaaaatagctttatggaacagtcctttggacgatggtgatactacgtgaatatggacagaggcacttccagcactctctccaaatatagtaacgttattaggatctccgttaaagctcttgatattattttgtacccatttcagcgctagttgttgatcttttaagccagcattaccaggaacgtctaaggatgtgtcatctaaatgtaaaaatcctaagaaacctacacgatagtttatcgtaacaagaacgatgtcctcagttattaggaattctgggccatagaagctgcttttgttactaccagttacgaaagcaccgccatgtatccaaaccataactgactttaatgcgttacattctgatggtaatttttttgtatacacatttaaatacaagcaatcttctgacccttcaagttcttttgtcatctcatttcgttgatagcaagagtttccatcaatcgtagcatcccttattccactccatggctcagcaggtactggagccttaaatctcaaatatccaagaggcggtttcgcaaacggtattcccagaaatgaataaaaagattcaccatccaaattcactttttggcatcctctaacttgaccttcgaccaccgtaactatgggagactccatggtttttatttgattagcgcgtagtatccgctaataaattgtaatttaccgacacctaactacaccgtgatgcaactgaatgcatgtacgaatgacaaac

SEQ ID NO: 4173 - DNA, 1836 bp, Diabrotica virgifera
gttggaaaaagagcaaacggttgatgagatcaaggtcgaattcgtaaagaatccaaagaaattgaatgcaaatgttaaacatgacaaggaaaatagtgtagacaatggtagtgttcccccaaggaaaagtgttacttttgttgaagtgcacagttccacataatattagtgtagttgttccattaaatctttacacaaacgtcatgattcatttgcaaacaaggtataagtgaaacactaagtgaaacgtacgtcgatatttaattatcagtagtaattgcacaagagctctaaaattattgaatttttccctagtgacactttgacagttttaatttcacgagccgaaagcgagtgaaattatgtcaaagtgtcaaaagggcaaattagtacaattaaacaaacagttgttataaatattaatttgacggttgaaagtcatcacttttataattttaaaacattaattgtcattaatgtcactgaatgtattttttcgtagcaacgaagggcatctgacgtaatatacttgacgacgggaaaattatcaaaaattatcgggtataatatcacaagagagtgagaataaattgaaaataatgcgacagtttttcgaaaatttgttgtctggcaatagacacgagagcccgcagggctcgagtggctattgcccaatgacaacaaatttgagtaaaaatgaagcattattttcttatttattcttactgtcgtgtgatattcgtaagattattttttaatacgtatattatggatattttcttaaatgtgacagttgtcaaaactaggaaactggttgccattaaacagaaacaatctacttaaaaaaattctatcggtaattttctacagtagataattctcagtataattttaatctgattggacagaattaaacacgtgatcaaatatcttactatacgattggaagttaaaatcatcaaaaaataatctgtttaatttttatttctgtagctttctattgatcagaatctcctatgactgaaataatcgatataaacgtataaattaacattatatcacatagtttctcacctttagacgtatcggaggagtatgacaactgtcactaagagagactcactaaagaattttataaaatactcctgtcacagacgtctaaaggtgggaaactatgtgatgtaatgttgatttatacgtttatgtcgataatttccacttccactagtttcatctctttttatttcacagtgtattgtgttttccatcttttgcgtggttttgccggttagtagcgcaatcgtcactgtatatgaaaactaaaccctggttttgaaatgctttgagaagtttttactggatttttccaacttttattacctttattaccattttattaccattttattacatttattaccattaagccgcgcacttcaaacaaaaccggtttcaaacaaaataatggtagtgaaggcattttgcctatcttaacggggtaccctttggctttaagggaaaacaaaaattacatggtgcgagtgcaggagagaaggagaacgcttttgtagatttctcggttgtgataattttttgtacaatttttccattaattgctatcgttcttactttctacaattttggagcatgcgcagttctttcgtggaagccttgatctctttattttacaaccacatcttgcatagtagtcgctaaacccgttgaaagtccaattaagcgcaattaggaaggagacatgctcagataaaccaaaacgaggatttgcgtagattcagctggtttggcggttgttataatattgctctgagactccct

SEQ ID NO: 4174 - DNA, 1797 bp, Diabrotica virgifera
gttggaaaaagagcaaacggttgatgagatcaaggtcgaattcgtaaagaatccaaagaaattgaatgcaaatgttaaacatgacaaggaaaatagtgtagacaatggtagtgttcccccaaggaaaagtgttacttttgttgaagtgcacagttccacataatattagtgtagttgttccattaaatctttacacaaacgtcatgattcatttgcaaacaaggtataagtgaaacactaagtgaaacgtacgtcgatatttaattatcagtagtaattgcacaagagctctaaaattattgaatttttccctagtgacactttgacagttttaatttcacgagccgaaagcgagtgaaattatgtcaaagtgtcaaaagggcaaattagtacaattaaacaaacagttgttataaatattaatttgacggttgaaagtcatcacttttataattttaaaacattaattgtcattaatgtcactgaatgtattttttcgtagcaacgaagggcatctgacgtaatatacttgacgacgggaaaattatcaaaaattatcgggtataatatcacaagagagtgagaataaattgaaaataatgcgacagtttttcgaaaatttgttgtctggcaatagacacgagagcccgcagggctcgagtggctattgcccaatgacaacaaatttgagtaaaaatgaagcattattttcttatttattcttactgtcgtgtgatattcgtaagattattttttaatacgtatattatggatattttcttaaatgtgacagttgtcaaaactaggaaactggttgccattaaacagaaacaatctacttaaaaaaattctatcggtaattttctacagtagataattctcagtataattttaatctgattggacagaattaaacacgtgatcaaatatcttactatacgattggaagttaaaatcatcaaaaaataatctgtttaatttttatttctgtagctttctattgatcagaatctcctatgactgaaataatcgatataaacgtataaattaacattatatcacatagtttctcacctttagacgtatcggaggagtatgacaactgtcactaagagagactcactaaagaattttataaaatactcctgtcacagacgtctaaaggtgggaaactatgtgatgtaatgttgatttatacgtttatgtcgataatttccacttccactagtttcatctctttttatttcacagtgtattgtgttttccatcttttgcgtggttttgccggttagtagcgcaatcgtcactgtatatgaaaactaaaccctggttttgaaatgctttgagaagtttttactggatttttccaacttttattacctttattaccattttattaccattttattacattaagccataataatggtagtgaaggcattttgcctatcttaacggggtaccctttggctttaagggaaaacaaaaattacatggtgcgagtgcaggagagaaggagaacgcttttgtagatttctcggttgtgataattttttgtacaatttttccattaattgctatcgttcttactttctacaattttggagcatgcgcagttctttcgtggaagccttgatctctttattttacaaccacatcttgcatagtagtcgctaaacccgttgaaagtccaattaagcgcaattaggaaggagacatgctcagataaaccaaaacgaggatttgcgtagattcagctggtttggcggttgttataatattgctctgagactccct

SEQ ID NO: 4175 - DNA, 1816 bp, Diabrotica virgifera
  SmartBlast Evalue=2E-58; Info=Cricklet n=3 Tax=melanogaster subgroup RepID=Q9W2F4_DROME
ttaacattaaaatttttatatttatttaaccaaataatacaaaaggtggctgcatgtacttttccataatctcgttaacttctttgtattgtcttggattttcttgcatactcaaagtttcattaatatttagatatcttaaagaattcggttcggatgattcccagatgacgttatccaaaaatgcatcggattcaggtgttgggttgtaaaatttgacaaaattagtccacagtttgacatacttgtgcagaacaagttggtctgattctgggaatttactaagatcagtggtacttccatcgtcccataaatagtgagtgtcttcaacatgggcaactttttctacatctggtggcaaaaatggcaaaaaccacgtttcttggcctatttctcctttgtaagcaaattgatacaaatagtttggcattttgggagacgctaattcaacttgtttacatattccattcgcaaataactggtcactggaatgccttatatacccgccaaaatcttccctaaaactagtattacgtgtatataattgtttcaataaacttccagcggttgttctatcttcgggtgacatatttattcttctatctacgagttggcctggattcctatccacggttcctagtagtattgcggctacgccttttaatatagcttgaggtgcagtttcttctgaattgaatccaataagaactggtacctttttataatttccacttaaaaatgctgcaaaaccaccatatgaaaacggtccttctgcttcggtggatactccacttgtaggtcgggcgtatagaatatctcgagcctttgctttttgtaacacttttaacaattcctttgtatctttaccagcaaagtgagaatccaccgccctaccaagtgctaaggccgagctggtttcatcttcctgtgtgagccaacctgagactgggcttccgctttgcattattgcagcatggaacaattgtttgccattctcccccggtcctgtaagatgatatccaactgatatagatcctgcactttgaccagctatagttacatgatcgggacttccgccaaacaaatgaatatttttattcacccattgcatagccaacctctgatctttaagtccaagatttaagggaataactccatcattagtgccaacaaatccgaaaggaccaagcctgtagttgaagctcacaacgacaattccagcatccattacatattttggtccaacgtactcaaatgtgccgcctcccaaggcaaatgctcctccgtggatccatagcaaaacgggaagccggttgttgctgcctggttgttctggcgtgtaaacattgatatatagacaatcttcacttatttcaaggttcttatatagtggtatatcctgataacaaattttggtatttctagtggcatcaagaacattagtccaaggcttcggtagtttgggtagttgaaatctgttttcccctacaggtggttcggcatacgggatttcttgaaaagcgtaataatcattaccattttcacttttaagtatgtgtcctctaatctttccttcgtcaagatgtactatggtaccatcgtctttgaagcttcttgttgcacttttttctatggtagcaactaataaaaatagctgtagtaatttaatcgcattcatgatcatttattttgaaaaaaattatctattaaaaagaaagatctgattaattattgagtttttatattttttgttgtagaatagataaaaaatattttgagagggtctttatctctagttaattctagtgatttctga

SEQ ID NO: 4176 - DNA, 1816 bp, Diabrotica virgifera
  SmartBlast Evalue=2E-59; Info=Female neotenic-specific protein 1 n=1 Tax=Cryptotermes secundus RepID=A6Y7R8_9NEOP
ttaacattaaaatttttatatttatttaaccaaataatacaaaaggtggctgcatgtacttttccataatctcgttaacttctttgtattgtcttggattttcttgcatactcaaagtttcattaatatttagatatcttaaagaattcggttcggatgattcccagatgacgttatccaaaaatgcatcggattcaggtgttgggttgtaaaatttgacaaaattagtccacagtttgacatacttgtgcagaacaagttggtctgattctgggaatttactaagatcagtggtacttccatcgtcccataaatagtgagtgtcttcaacatgggcaactttttctacatctggtggcaaaaatggcaaaaaccacgtttcttggcctatttctcctttgtaagcaaattgatacaaatagtttggcattttgggagacgctaattcaacttgtttacatattccattcgcaaataactggtcactggaatgccttatatacccgccaaaatcttccctaaaactagtattacgtgtatataattgtttcaataaacttccagcggttgttctatcttcgggtgacatatttattcttctatctaccagttggcctggattcctatccacgcttcctagtagtattgcggctacgccatttaatatagcttgaggtgcagtttcttctgaattgaaaccaataagaactggtacctttttatagtttccacttaaaaatgcttcaaaaccaccatatgaaaacggtccttctgcttcggtggatactccacttgtaggtcgggcgtatagaatatctcgagcctttgctttttgtagcacttttaacaactcctttgtatctttagtagcaaagtgagaatccaccgccctaccaagtgctaaggccgagctggtttcatcttcctgtgtgagccaacctgagactgggcttccgctttgcattattgcagcatggaacaattgtttgtcattctcccacggtcctgtaagatgatatccaactgatatagatcctgcactttgaccagctatagttacatgatcgggatttccgccaaacaaatgaatatttttattcacccattccatagccaacttctgatctttaagtccaagatttaagggaataactccatcattagtgccaacaaatccgaaaggaccaagcctgtagttgaagctcacaacgacaattccagcatccattacatattttggtccaacgtactcaaatgtgccgcctcccaaggcaaatgctcctccgtggatccatagcaaaacgggaagccggttgttgctgcctggttgttctggcgtgtaaacattgatatatagacaatcttcacttatttcaaggttcttatatagtggtatatcctgataacaaattttggtatttctagtggcatcaagaacattagtccaaggcttcggtagtttgggtagttgaaatctgttttcccctacaggtggttcggcatacgggatttcttgaaaagcgtaataatcattaccattttcacttttaagtatgtgtcctctaatctttccttcgtcaagatgtactatggtaccatcgtctttgaagcttcttgttgcacttttttctatggtagcaactaataaaaatagctgtagtaatttaatcgcattcatgatcatttattttgaaaaaaattatctattaaaaagaaagatctgattaattattgagtttttatattttttgttgtagaatagataaaaaatattttgagagggtctttatctctagttaattctagtgatttctga

SEQ ID NO: 4177 - DNA, 1798 bp, Diabrotica virgifera
  SmartBlast Evalue=1E-130; Info=Probable serine incorporator n=1 Tax=Camponotus floridanus RepID=E2A1E8_9HYME
gtatttctcatctgattattcatcaaattaattgattctttgttagttgttttaaatatttctaaatagataaattaaacaaccaattatagttatcaggtaatcaaaatgggggccgtcctgggtctttgttcagcagcacaacttgcctgttgctgtagtagcgcagcatgttctctatgctgttcagcatgtccatcatgcaggaattctacatcttctcgtataatgtatgcattgatgctgttggttgctactgtggcggcttgtattactctgtctccaggactggaaagcgctttacaaaaggtaccgttttgcaaaaacagttcggctctggttcctgactcggttgtttttgattgtaaacaagctgtgggatatttagctgtatatagaatttgctttattttaacatgtttctttgctttgatgtctcttatgatgatcggtgtaaaaacttccaaagatgcaagagcagggattcaaaacgggttctgggggataaagtatttgttagtaatcggaggcattataggcgctttctttatccccgagggctcatttggatcagtttggatggtgttcggcatgataggtggtttcttgtttatactgatccagttgattctaattatagacttcgcccattcatgggctgaagcttgggttggtaattttgaagaaactggatcaaaaggatggtatgtcgcactgattgggatgacgatgcttaactatatcttgagtattactggaatagtattactatatgtattttacactaaggctaacgattgcggattaaataaattcttcatttcaatcaacctgatcatttgtctaatcgtaagtgtgctgtctattttgcctgctgttcaagataagttgcctcgatctggactgctgcaatcatctgtagtgactgtatacgttgtctatcttacttggtcagctgtatcaaattcaagcaaagaatgtaatcctggtatgtggggtatatttggagggaaatctaataataaaacaagcagcgactttgatataattggtttactcatctggatgtgctgcgtgctttactcttctctacgctctgcaagcaaatcatcaaaaattactatgtctgagagtatgctagccaaggatacaggagcagtaaaagactatggatcagacaatttagttgacaacgaaggtaacgatggtggtgagggcggagacaagaaggtgtgggacaatgaggaggaaactgtggcttacagttggagtttcttccacgtcatgtttgctttggccactctgtacgttatgatgactttgaccaactggtataatccaaactccaatctggataaacttcactacaatcctgcctccatgtgggtgaaaacaatttccagctggctctgtctaggattgtatggttggaccttagtagctccagtaattttacatgatcgagaatttaactaaatacgtctcattaatggcatcttttattatctagcctaaggggcctacacccttcttatctatgaaatatgtatgtttttataaagctttaactgtattacaagtttaaatatgcaagatgcaaattatataaacataaattttacagaggtaactgataatagaccaaattaaatttttctccgcttatagtcatcagaagtgtggcattgtcgtcagaaaatattacgatatctgacaaaaataatatactacaatcttacttaactaattgtttattgttttaatgttgttgattaaatcataaggaaaaatccacaag

SEQ ID NO: 4178 - DNA, 1780 bp, Diabrotica virgifera
  SmartBlast Evalue=1E-131; Info=Probable serine incorporator n=1 Tax=Camponotus floridanus RepID=E2A1E8_9HYME
gtatttctcatctgattattcatcaaattaattgattctttgttagttgttttaaatatttctaaatagataaattaaacaaccaattatagttatcaggtaatcaaaatgggggccgtcctgggtctttgttcagcagcacaacttgcctgttgctgtagtagcgcagcatgttctctatgctgttcagcatgtccatcatgcaggaattctacatcttctcgtataatgtatgcattgatgctgttggttgctactgtggcggcttgtattactctgtctccaggactggaaagcgctttacaaaaggtaccgttttgcaaaaacagttcggctctggttcctgactcggttgtttttgattgtaaacaagctgtgggatatttagctgtatatagaatttgctttattttaacatgtttctttgctttgatgtctcttatgatgatcggtgtaaaaacttccaaagatgcaagagcagggattcaaaacgggttctgggggataaagtatttgttagtaatcggaggcattataggcgctttctttatccccgagggctcatttggatcagtttggatggtgttcggcatgataggtggtttcttgtttatactgatccagttgattctaattatagacttcgcccattcatgggctgaagcttgggttggtaattttgaagaaactggatcaaaaggatggtatgtcgcactgattgggatgacgatgcttaactatatcttgagtattactggaatagtattactatatgtattttacactaaggctaacgattgcggattaaataaattcttcatttcaatcaacctgatcatttgtctaatcgtaagtgtgctgtctattttgcctgctgttcaagataagttgcctcgatctggactgctgcaatcatctgtagtgactgtatacgttgtctatcttacttggtcagctgtatcaaattcaagcaaagaatgtaatcctggtatgtggggtatatttggagggaaatctaataataaaacaagcagcgactttgatataattggtttactcatctggatgtgctgcgtgctttactcttctctacgctctgcaagcaaatcatcaaaaattactatgtctgagagtatgctagccaaggatacaggagcagaaccctatgctcctatcgcaggtaacgatggtggtgagggcggagacaagaaggtgtgggacaatgaggaggaaactgtggcttacagttggagtttcttccacgtcatgtttgctttggccactctgtacgttatgatgactttgaccaactggtataatccaaactccaatctggataaacttcactacaatcctgcctccatgtgggtgaaaacaatttccagctggctctgtctaggattgtatggttggaccttagtagctccagtaattttacatgatcgagaatttaactaaatacgtctcattaatggcatcttttattatctagcctaaggggcctacacccttcttatctatgaaatatgtatgtttttataaagctttaactgtattacaagtttaaatatgcaagatgcaaattatataaacataaattttacagaggtaactgataatagaccaaattaaatttttctccgcttatagtcatcagaagtgtggcattgtcgtcagaaaatattacgatatctgacaaaaataatatactacaatcttacttaactaattgtttattgttttaatgttgttgattaaatcataaggaaaaatccacaag

SEQ ID NO: 4179 - DNA, 1776 bp, Diabrotica virgifera
  SmartBlast Evalue=0; Info=Glutamate carboxypeptidase n=1 Tax= Culex quinquefasciatus RepID=B0XCT6_CULQU
tgatgtaaaaatactttatttattagtaccatatcacaaaatattgatattatttaaataatgtagtaaaaaacagaatatattataatataaatatattagagctgagctacttcatataggtaggcacccaagagtttcggcccattgacgtaatttctgacgtcgattttttcattctgagaatgtgctccatcatcaccggcaccgacgggcaacagcaagatattttttcctgtgacttcttggaatgttaacgttactggaatagatcctccttcgcgtgtaaaatcggggtcgacattgtacacgtatttcgtggctttacttgcagcaccatagtgagggtggctaggatcctcggtccaagcattaccaccgtctctcatacgtatcgacattttgttaggactgcctctagctgcccaaagtttattaatgtaatctattacaagtgtctcagtctgtttcagcgtttggttaggtacaatccttatagaaaacttcccgattactttcctaggtattacagtcttagatccgggttcgctaaatgctccttctattccgtgcagtgagagactggggaatctccaacggtgcattagaattttttctttgacttcattatggagaagtttggaagtaccgacgttttggcggtattcgtcgacgtcgaattcgattgctttataaatgccatgttcgttatcggttactggagctacatcgtcgtatataccgtcgattaagatttttccgtctttatcaacaagttgattcattaggtacattaggtctgacatcgcctcatggactgtaccgccgtaaactccactatgcaaatctttatcagcacattcaacctctaagaagaaataagagattcctcggagaccataggtaatgcaaggtttggtggttcccagccagtaattgtctgaaatacatacataatccgttccagccagaaatttatttttctcggcatgtaacaactcgtccaaaccttcacttccgctttcttccattccttcgaataccatttttaagttgacgggtacttcttcgccaattgcctggaatccttcaatagcatgcaaccaagacaaaacgggtcctttatcatctgaagcccctcttccgtacagtttcccatctctttctgtcaactcaaaaggttctgagtcccaaccatcgctcttgtgagctggttgaacatctaaatgcccataaattaaaacagtcttcttttttggatcgttgcccaatgaaccgaataagacaggaggtaaaggtatagtttgtccgttaggtagagtttgggttccaagatctcttaattctgctgacgctcccaaagcttgtaaacgttccagcgcccatttcatttgcttggttatttcacctcttttttctggccatgctgatactgactggatagcaacgacttgtcttaagttttctatatattttgctttgttttcatcgagatatttgaataatttatccaagggtcctggaagagccatatttcaagtacactagcaatcaccctgagagtactatttaaattgttgattaacgtttatattttgtaatttaatttaaacctcccacttacagagttatcttatcaacgttacaaatagcgactatttaccaagagagatcaaactaccacacaggtttatttctattttatttaaagaaagaaaataattcctttgtgtttcaataaacgtgattacgtgataacggcacttcagtttcaag

SEQ ID NO: 4180 - DNA, 1776 bp, Diabrotica virgifera
  SmartBlast Evalue=0; Info=Glutamate carboxypeptidase n=1 Tax= Culex quinquefasciatus RepID=B0XCT6_CULQU
tgatgtaaaaatactttatttattagtaccatatcacaaaatattgatattatttaaataatgtagtaaaaaacagaatatattataatataaatatattagagctgagctacttcatataggtaggcacccaagagtttcggcccattgacgtaatttctgacgtcgattttttcattctgagaatgtgctccatcatcaccggcaccgacgggcaacagcaagatattttttcctgtgacttcttggaatgttaacgttactggaatagatcctccttcgcgtgtaaaatcggggtcgacattgtacacgtatttcgtggctttacttgcagcaccatagtgagggtggctaggatcctcggtccaagcattaccaccgtctctcatacgtatcgacattttgttaggactgcctctagctgcccaaagtttattaatgtaatctattacaagtgtctcagtctgtttcagcgtttggttaggtacaatccttatagaaaacttcccgattactttcctaggtattacagtcttagatccgggttcgctaaatgctccttctattccgtgcagtgagagactggggaatctccaacggtgcattagaattttttctttgacttcattatggagaagtttggaagtaccgacgttttggcggtattcgtcgacgtcgaattcgattgctttataaatgccatgttcgttatcggttactggagctacatcgtcgtatataccgtcgattaagatttttccgtctttatcaacaagttggttcattaggtacaccaggtctgacatcgcctcatggactgtaccgccgtaaactccactatgcaaatctttatcagcacattcgacctctaggaagaaataagagattccccgaagaccataggtaatacaaggtttggtggttcccagccagtaattgtctgaaatacatacataatctgttccagccaaaaatttatttttctccgcatgtagcaactcgtccaaaccttcacttccgctttcttccattccttcaaataccatttttaagttgacgggtacttcttcaccaattgcctggaatccttcaatagcatgcaaccaagacaaaacgggtcctttatcatctgaagctcctcttccgtacagtttcccatctttttctgtcaactcaaaaggttctgagtcccaaccatcgctcttgtgagctggttgaacatctaaatgcccataaattaacacagtcttcttttttggatcgttgcccaatgaaccgaataagacaggaggtaaaggtatagtttgtccgttaggtagagtttgggttccaagatctcttagttctgcggacgctcccaaagcttgtaaacgttctagcgcccatttcatttgcttggttatttcacctcttttttctggccatgctgatactgactggatagcaacgacttgtcttaagttttctatatattttgctttgttttcatcgagatatttgaataatttatccaagggtcctggaagagccatatttcaagtacactagcaatcaccctgagagtactatttaaattgttgattaacgtttatattttgtaatttaatttaaacctcccacttacagagttatcttatcaacgttacaaatagcgactatttaccaagagagatcaaactaccacacaggtttatttctattttatttaaagaaagaaaataattcctttgtgtttcaataaacgtgattacgtgataacggcacttcagtttcaag

SEQ ID NO: 4181 - DNA, 1768 bp, Diabrotica virgifera
  SmartBlast Evalue=1E-157; Info=Cytochrome P450 9Z4 n=1 Tax= Tribolium castaneum RepID=D6WWU4_TRICA
tatatttatccaccttattctaaattaggaatatattacaaaataaaatctagaaatagagttgtaataatggactcacatgtacaacccattgatcatttaaaatctataaacgtttcagtccaaaccaaaagcctccttcagacgagagctggaagttttctttcgaaattactagaggaatttgtgatttctttacaggaacaatttcaaaatctttaagcaaataaaagaacaccactttgatttctaataaagcaaatctggaggctatacaaattcttgggccaattccaaacggtaggtaagcgtaagggttaattttacttttgttttcgtcactgaacctctcagggttgaatttatctggatctggatagtattttgaatctctatgaataggatatactggcataatgattgacattccttttttgatagtaagtggtgcttcttctggtcgttcgggtttaatggtgtaatctttggtgcattgtcgctcggttattaaagcaacgggccattttctcaaagattctgacacaaacatatccatgtacttcatttttaataaagcttcgtaagttaattctccctggcactgttccaaagtttccattatttcttctcttagcctctgctggtaatctggattagcagctagttcataaccaacaaaacacattgttgaggatacggtttcgaatccacccaagaagaatattaacgcttgggccgtaatatctatgttggtaatttcttttgaaatggtttttcctgatacattttcggcttcttttgccgtagcaaatccttcatccacagtatgatcctctttattatggactccttttttagcttctattagtaagtgtatcatatcaagacgaacaattcctttttcttctctcatttttactgtcttgtcaattaaattggtaaaaaaagttcttgttttcttatcaaataatgatattttaaagaagtttgccactcttggaaaaacttgagcaagtaacatctttagcatccttgaagtgctagtgaaattcgtgacttcctttcccatcaagtaaaattcattttcaggattctctaaagaatcgacttttataccaaacgcagttgtagctattacgtcgtttgtaaatcttgtaaaagtatctttcaattcgagttccacaatatcctggttcttcttctggaagtgctttgaaaagttttgggcacattcactcattagtgaaaacataactctcatcttactgctcgtaaaggaaggactgaggacagacctcatgtcgcgccattgttgacctctaagcgccaccaaattttttgtccaaagtgggtcggagttttcagatacttgattagtatgatccatgaagtgatcaaaatttttgacggtaacatcttttataagttctgggtcattaatttgcaccatcggtttaaaaaattgataagttccaatatacctggaattttgaaactttttatatcctatcacagtcatttcggcaatactagtcgtcttggagaacaaaatatagatgtttttaaatatatctttgatatcagcctgttctacgtttaaatccttccagtagtgccaacgttttctcgcgaagaggcagagtgcagcagcgagacccgctgctaccaaaaatatcatcagaaacataactgtgccagtatctacagcttcaaaaacaaataataaaatttatcgatcgaatccactcacaacatactactcgtattt

SEQ ID NO: 4182 - DNA, 1768 bp, Diabrotica virgifera
  SmartBlast Evalue=1E-156; Info=Cytochrome P450 9Z4 n=1 Tax= Tribolium castaneum RepID=D6WWU4_TRICA
tatatttatccaccttattctaaattaggaatatattacaaaataaaatctagaaatagagttgtaataatggactcacatgtacaacccattgatcatttaaaatctataaacgtttcagtccaaaccaaaagcctccttcagacgagagctggaagttttctttcgaaattactagaggaatttgtgatttctttacaggaacaatttcaaaatctttaagcaaataaaagaacaccactttgatttctaataaagcaaatctggaggctatacaaattcttgggccaattccaaacggtaggtaagcgtaagggttaattttacttttgttttcgtcactgaacctctcagggttgaatttatctggatctggatagtattttgaatctctatgaataggatatactggcataatgattgacattccttttttgatagtaagtggtgcttcttctggtcgttcgggtttaatggtgtaatctttggtgcattgtcgctcggttattaaagcaacgggccattttctcaaagattctgacacaaacatatccatgtacttcatttttaataaagcttcgtaagttaattctccctggcactgttccaaagtttccattatttcttctcttagcctctgctggtaatctggattagcagctagttcataaccaacaaaacacattgttgaggatacggtttcgaatccacccaagaagaatattaacgcttgggccgtaatatctatgttggtaatttcttttgaaatggtttttcctgatacattttcggcttcttttgccgtagcaaatccttcatccacagtatgatcctctttattatggactccttttttagcttctattagtaagtgtatcatatcaagacgaacaattcctttttcttctctcatttttattgtcttgtcaattaaattggtaaaaaacgttcttgttttctcatcaaataatgatattttaaagaagtttgccactcttggaaaaacttgagcaagtaacatcttcagcatccttgaagtgctagtgaaattcgtgacttcctttcccatcaagtaaaattcattttcaggattctctaaagaatcgacttttataccaaacgcagttgtagctattacgtcgtttgtaaatcttgtaaaagtatctttcaattcgagttccacaatatcctggttcttgttctggaagtgctttgaaaagttttgggcacattctgtcatcagcgtaaacataactttcatcttactactcgtaaaggaaggactgaggacagacctcatgtcgcgccattgttgacctctaagcgccaccaaattttttgtccaaagtgggtcggagttttcagatacttgattagtatgatccatgaagtgatcaaaatttttgacggtaacatcttttataagttctgggtcattaatttgcaccatcggtttaaaaaattgataagttccaatatacctggaattttgaaactttttatatcctatcacagtcatttcggcaatactagtcgtcttggagaacaaaatatagatgtttttaaatatatctttgatatcagcctgttctacgtttaaatccttccagtagtgccaacgttttctcgcgaagaggcagagtgcagcagcgagacccgctgctaccaaaaatatcatcagaaacataactgtgccagtatctacagcttcaaaaacaaataataaaatttatcgatcgaatccactcacaacatactactcgtattt

SEQ ID NO: 4183 - DNA, 1709 bp, Diabrotica virgifera
  SmartBlast Evalue=1E-23; Info=Reverse transcriptase-like protein n=1 Tax=Glyptapanteles indiensis RepID=B7S927_9HYME
gcctgttgtttctgataatccgagacaatgaatgtcacactgctgccatgtgccatgagtcatttttactatcgtatagttcaaattacacaaatacacattatctctcaaatattatattacatacatttttattgttgaaatatttgtctgatgaaaatcggtttggcttagccggacttccgggtaatcgggggccgacttatcagggttcactgtagttagttctgaccttatgacacacaaatgcattaaaatgtagaaaaactcgcctgtagtaaaatcacaataaagtagtttcattagaaatcaacaaaccaagacacgttgaatgttataaggaacactcccaaatcatgatttacaatttatatacattgtaaatcccaaatcatgatttacaaagtttatacattgtacatcatcattattctcataccatctctattacctcaggtgtaccacaaggatcacacttgggacctctgttgtttaatatatttatcaatgatctaataccctgtttccaagtaagtgaaacttttgttattcgctgatgatttaaaatgttttaaaataatcacatgtgaggctgattgacttagtctacaaggtgatattgatcgcctatctaactggtgtatgcaaaatggtatgtgtttgaatgcatccaaatgccatattcttctttccaccgaactcatcatccaatcatcttcgaatatagtataaataatctgaccttacattctgcctctgaaactagggatctaggtgtgatccttgactccgcccttagctataaatcacacatttccagtacaatacagaagtctatgaagatgcttggctttataaaaagaaccaccagagactttacaaacatctcagctattaaatccctttatttctccctggttagatctcatttcgattactgttccacaatttggtccccctattactttactcataaactgaaacttgaggctgtccaacacaattttctgagatatactgccactaagatgcatgtatactatgactattctgcattagagcgcatactgaacttacctactcttgaggtacgcagaaaacaaagagacttaataattttacttaaaattatcaacgggctgtgtaactgccccgagcttctctccaaaatatctcaatttgtccccagttgttcgactaggcaggtgcaaacaccgcaaacacaggtatcttttcatagattcaattattcctacaacacatttattcctagaactcttcgattagctaactcattaaataacctcgaaatttttaatatatcagtttcccgctttaaaaaccatatttcttccctaactttttaatattttcggccagagcttttgtattgtgattagtgttacatgacctgtataaaaccgttataccttggaacatttctgaattgatttaggtgatatcttttgtttgtaattgtactgacctaatgttatcttactctttttttttttcttttttgtaactgtactactcatagattattttttctcaaaccactttgttatgttatattatgataatttatgttatataattggattaacattaatgttatataattgtataattatgttatataatttagaacactgtaaaatttatatcggaatagggcttgcccgtgaataaataaataaataaataaa

SEQ ID NO: 4184 - DNA, 1684 bp, Diabrotica virgifera
  SmartBlast Evalue=3E-16; Info=Reverse transcriptase-like protein n=1 Tax=Glyptapanteles indiensis RepID=B7S927_9HYME
gcctgttgtttctgataatccgagacaatgaatgtcacactgctgccatgtgccatgagtcatttttactatcgtatagttcaaattacacaaatacacattatctctcaaatattatattacatacatttttattgttgaaatatttgtctgatgaaaatcggtttggcttagccggacttccgggtaatcgggggccgacttatcagggttcactgtagttagttctgaccttatgacacacaaatgcattaaaatgtagaaaaactcgcctgtagtaaaatcacaataaagtagtttcattagaaatcaacaaaccaagacacgttgaatgttataaggaacactcccaaatcatgatttacaatttatatacattgtaaatcccaaatcatgatttacaaagtttatacattgtacatcatcattattctcataccatctctattacctcaggtgtaccacaaggatcacacttgggacctctgttgtttaatatatttatcaatgatctaataccctgtttccaagtaagtgaaacttttgttattcgctgatgatttaaaatgttttaaaataatcacatgtgaggctgattgacttagtctacaaggtgatattgatcgcctatctaactggtgtatgcaaaatggtatgtgtttgaatgcatccaaatgccatattcttctttccaccgaactcatcatccaatcatcttcgaatatagtataaataatctgaccttacattctgcctctgaaactagggatctaggtgtgatccttgactccgcccttagctataaatcacacatttccagtacaatacagaagtctatgaagatgcttggctttataaaaagaaccaccagagactttacaaacatctcagctattaaatccctttatttctccctattacaatttggtccccctattactttactcataaactgaaacttgaggctgtccaacacaattttctgagatatactgccactaagatgcatgtatactatgactattctgcattagagcgcatactgaacttacctactcttgaggtacgcagaaaacaaagagacttaataattttacttaaaattatcaacgggctgtgtaactgccccgagcttctctccaaaatatctcaatttgtccccagttgttcgactaggcaggtgcaaacaccgcaaacacaggtatcttttcatagattcaattattcctacaacacatttattcctagaactcttcgattagctaactcattaaataacctcgaaatttttaatatatcagtttcccgctttaaaaaccatatttcttccctaactttttaatattttcggccagagcttttgtattgtgattagtgttacatgacctgtataaaaccgttataccttggaacatttctgaattgatttaggtgatatcttttgtttgtaattgtactgacctaatgttatcttactctttttttttttcttttttgtaactgtactactcatagattattttttctcaaaccactttgttatgttatattatgataatttatgttatataattggattaacattaatgttatataattgtataattatgttatataatttagaacactgtaaaatttatatcggaatagggcttgcccgtgaataaataaataaataaataaa

SEQ ID NO: 4185 - DNA, 1675 bp, Diabrotica virgifera
  SmartBlast Evalue=0; Info=Chitinase 5 n=2 Tax=Tribolium castaneum RepID=Q5QE61_TRICA
ttgttttagaatgtttctcaagacagtagtcctcgttttccttgcaagcttccaaacaatagacgcaaccccagccaaagtagtgtgttactttagcaattgggctatatacagaccaggaagtggaagatatgctttggacgatgtcccagttgacctatgtacgcatttaatttattcatttattggagttgacgataaatcatggagtattttggttatagatccagagctggatattgaacaaaatggattcagaaactttagtgatattaagaaaactcatccccacgttaaattagaaatagcagtaggagggtgggccgaaggtggatccaagtattccgcactggtagctcaacaggcaagaagggattcttttatcagcagtgtagttgcttttatgaaggaatacaatttggacggttttgacctggactgggaatatcctggagcagcagaccgtggtggtagcttttctgacaaggataaattcttttattttgttgaagaacttcgtagagcctttgacaatgaaggaaaaggatgggaaattacaatggctgtaccggtagctaaatttaggcttcaagaaggttattacgtacccgagttatgcgacttagttgatgctatccatgttatgtcttacgatctaagaggaaactgggctggttttgcagatacccacagtccactgtataagagacctcatgatcaatgggcttatgagaaactgaatgtaaacgatggtgcacaactatgggtagatgccggctgttctccaaaaaaactggtaattggcatacccttctatggaagaacattcactttaagtgctggaaatacgaactataacttggggacttatattaataaagaagcaggaggtggagctcctggaccatacaccaatgctactggatttttagcttactatgaaatttgcactgaactgttgaaagaaaataatggatggacaaagaaatgggacgaacatggaaaagtaccatacgcttataaaggaacacaatgggtcggctacgaagatccagaatctgtacaaataaaaatgaactggataaaatcaaagggatacgcaggtgctatgacttgggctatagatatggatgacttccacggtttgtgtggtcccacaaacgttttgatgcatatattacatgccaacatggactcttatagtgtcccagaacctcatgtatcaacaacagcaaggcccgaatgggatcgaccaaaaagtacaacttcttcaggcagtgcaacagtagtaacttcatctacacctaaaccacctaaaccaacgtactccagtacggttcccacttcacagcaaaccacaaatggagctcccactcaacctactgcaccttcgtcatcgtcatattatcccgaagatgcagataatttaacagaatgtgatgcagatttcatgccacatagagactgtgataaatactaccgctgtgatcatggcaaacccaccttgtttaactgcgaacctggaactgttttccatactggtctcaatgtatgcgactggccagcaaactccgacagagaagagtgcaggccatagagttttagttgtactactagttttagttgtgtatttataagacttatattaagactttttaataaacattttatatat

SEQ ID NO: 4186 - DNA, 1675 bp, Diabrotica virgifera
  SmartBlast Evalue=0; Info=Chitinase 5 n=2 Tax=Tribolium castaneum RepID=Q5QE61_TRICA
ttgttttagaatgtttctcaagacagtagtcctcgttttccttgcaagcttccaaacaatagacgcaaccccagccaaagtagtgtgttactttagcaattgggctatatacagaccaggaagtggaagatatgctttggacgatgtcccagttgacctatgtacgcatttaatttattcatttattggagttgacgataaatcatggagtattttggttatagatccagagctggatattgaacaaaatggattcagaaactttagtgatattaagaaaactcatccccacgttaaattagaaatagcagtaggagggtgggccgaaggtggatccaagtattccgcactggtagctcaacaggcaagaagggattcttttatcagcagtgtagttgcttttatgaaggaatacaatttggacggttttgacctggactgggaatatcctggagcagcagaccgtggtggtagcttttctgacaaggataaattcttttattttgttgaagaacttcgtagagcctttgacaatgaaggaaaaggatgggaaattacaatggctgtaccggtagctaaatttaggcttcaagaaggttattacgtacccgagttatgcgacttagttgatgctatccatgttatgtcttacgatctaagaggaaactgggctggttttgccgatacccacagtccactgtataagagacctcatgatcaatgggcttatgagaaactgaatgtaaacgatggtgcacaactatgggtagatgccggctgttctccaaaaaaactggtaattggcatacccttctatggaagaacattcactttaagtgctggaaatacgaactataacttgggaacttacattaataaagaagcaggtgggggcgctcctggaccgtacaccaatgctactggatttttagcttactatgaaatttgcactgaactcctggaagaaaataatggatggacaaagaaatgggacgaacatggaaaagtaccgtatgcttataaaggaacacaatgggtcggctacgaagatccagaatctgtacaaataaaaatgaactggataaaatcaaagggatacgcaggtgctatgacttgggctatagatatggatgacttccacggtttgtgtggtcccacaaacgttttgatgcatatattacatgccaacatggactcttatagtgtcccagaacctcatgtatcaacaacagcaaggcccgaatgggatcgaccaaaaagtacaacttcttcaggcagtgcaacagtagtaacttcatctacacctaaaccacctaaaccaacgtactccagtacggttcccacttcacagcaaaccacaaatggagctcccactcaacctactgcaccttcgtcatcgtcatattatcccgaagatgcagataatttaacagaatgtgatgcagatttcatgccacatagagactgtgataaatactaccgctgtgatcatggcaaacccaccttgtttaactgcgaacctggaactgttttccatactggtctcaatgtatgcgactggccagcaaactccgacagagaagagtgcaggccatagagttttagttgtactactagttttagttgtgtatttataagacttatattaagactttttaataaacattttatatat

SEQ ID NO: 4187 - DNA, 1735 bp, Diabrotica virgifera
  SmartBlast Evalue=9E-46; Info=SH3 domain-binding glutamic acid- rich protein homolog n=4 Tax=melanogaster subgroup RepID=SH3BG_ DROME
aactgagagatctgtcagaagttatttttctaaattttatttataaaaactagctgatagctgataaccgataagcctgaaccatggtgattaaagtgtatattagtggaatttcaggaaacaaggaggtgaaaaaaagacaacaaagggtcctattaattttggactcgaaaagtgtgaagtatgaggtgctagacatagcagagccaggggctgaggaagccaaagatttcatgcaaaataagtctacaggttcagggggcacaatcagtgatccgaatcccaggcaccctcttccacctcagatattcaatgatgatgagtactgtggggattatgacatgtttgatatggccaacgaaatcgatgaaatggagaagttcctaaaggtcgaaccgaattccctaggagaacagacagccacagcagaggtacaacttaaaaatggcgatatttcaatcgatgaaaaaatagacaaacttgttggcagtggaaccggagaagaggaatcgaaagagaacgaagtgcctaatgaccaggaagccaaagaggataaggattctgaagataaaaaagagggctctgtcgagaaggaagaagctactaaagacgatgatgtcgacgagaatgaagaggaagacgacaaagaagatgaaaaagaaacttcccccgaaaagtctgatgaataaatattaggattatacaaagaaacgcactgatgacctaattataagaaatcgaaacaccaaaatgattttcaaattcgttattgttttgcccttttatttaaagttgtttacaacttttttgagtccttttagacagaattttaatctaatttaatcgtgtttcagtgtattactaactcaaataggtatatctagaaattaggtctttttgagtcccagcaattgtggattaactcgttgaaagtaactcttgcattgaattatattccttacagcattaaaatccggtaaatctgaataattttaagtattaacactttcaaattccttggtcctgaattgtcgtatgccatatatgttttctgtgggtcatatatggtttacgggaatgatttgtcatcgtcataggactagacataactagcaactgtttttgtagcaactatatttttttaatgttgttctgaagctattttcttgtggcatttttacaattttaacccgatttgggcgtcgaaacgttaataaaaatcattttttaataatattgtggcttatttcccattctaaatagttaaaattatatttttttatttgaaattttcagattttttgtaaaataattgactatataaaggctggtaaactgtttgaagcaggctgggtgaactgtctacaaaatttttatagtagggagcaccaagattcatcatttattgatcatacagaaattcatcaattaattattgataaaataaattatccgaattatcgtgggtcatatatggcttccgggctagattcttcattgtgatacgaccgtttgtgacctcacctggactagatatagttagcaactgtttatttctcataaaatcgcataagatatcacaagaaaacaagtagttttttatctggttttaaacatgtctgtataatctcggcataaccttatttgagttagtaatttatacattttattaaattaaaaacattttttattttttgaagttgtgcttttacaaaattgtatgacagttgacgtg

SEQ ID NO: 4188 - DNA, 1597 bp, Diabrotica virgifera
  SmartBlast Evalue=8E-46; Info=SH3 domain-binding glutamic acid- rich protein homolog n=4 Tax=melanogaster subgroup RepID=SH3BG_ DROME
aactgagagatctgtcagaagttatttttctaaattttatttataaaaactagctgatagctgataaccgataagcctgaaccatggtgattaaagtgtatattagtggaatttcaggaaacaaggaggtgaaaaaaagacaacaaagggtcctattaattttggactcgaaaagtgtgaagtatgaggtgctagacatagcagagccaggggctgaggaagccaaagatttcatgcaaaataagtctacaggttcagggggcacaatcagtgatccgaatcccaggcaccctcttccacctcagatattcaatgatgatgagtactgtggggattatgacatgtttgatatggccaacgaaatcgatgaaatggagaagttcctaaaggtcgaaccgaattccctaggagaacagacagccacagcagaggtacaacttaaaaatggcgatatttcaatcgatgaaaaaatagacaaacttgttggcagtggaaccggagaagaggaatcgaaagagaacgaagtgcctaatgaccaggaagccaaagaggataaggattctgaagataaaaaagagggctctgtcgagaaggaagaagctactaaagacgatgatgtcgacgagaatgaagaggaagacgacaaagaagatgaaaaagaaacttcccccgaaaagtctgatgaataaatattaggattatacaaagaaacgcactgatgacctaattataagaaatcgaaacaccaaaatgattttcaaattcgttattgttttgcccttttatttaaagttgtttacaacttttttgagtccttttagacagaattttaatctaatttaatcgtgtttcagtgtattactaactcaaataggtatatctagaaattaggtctttttgagtcccagcaattgtggattaactcgttgaaagtaactcttgcattgaattatattccttacagcattaaaatccggtaaatctgaataattttaagtattaacactttcaaattccttggtcctgaattgtcgtatgccatatatgttttctgtgggtcatatatggtttacgggaatgatttgtcatcgtcataggactagacataactagcaactgtttttgtagcaactatatctttttatttgaaattttcagattttttgtaaaataattgactatataaaggctggtaaactgtttgaagcaggctgggtgaactgtctacaaaatttttatagtagggagcaccaagattcatcatttattgatcatacagaaattcatcaattaattattgataaaataaattatccgaattatcgtgggtcatatatggcttccgggctagattcttcattgtgatacgaccgtttgtgacctcacctggactagatatagttagcaactgtttatttctcataaaatcgcataagatatcacaagaaaacaagtagttttttatctggttttaaacatgtctgtataatctcggcataaccttatttgagttagtaatttatacattttattaaattaaaaacattttttattttttgaagttgtgcttttacaaaattgtatgacagttgacgtg

SEQ ID NO: 4189 - DNA, 1672 bp, Diabrotica virgifera
  SmartBlast Evalue=6E-95; Info=UNC93-like protein MFSD11 n=1 Tax= Camponotus floridanus RepID=E2AP46_9HYME
ttaaattctttatttcaaaaaatatttgacatttcttgtaaaaaatcgtccaaacaaaatataaaattaaaatcacattcactaaaaatcttctattttcctcattctggaccggtcaacgcttcttcgctcttcccgctcttttcggcggataacagtgctgcttttttcttggcgtaccattccaccttaatgaaacataaagtacctactactgacatgaccagcaagatggctagctggtaatgaagtccaagagatttggctgaaacgaaggtgataacggctccaagagactggctaaatttaaatatggcaaaagctggagcgctattatcagcgtataccgttcccaaaagtgagaatatctgagtattataaatagagtctcccaatcctagaaggaatgagcaaaatatagctaaaatggcgttgctggtgatgattgcgttatcatcagtgtctgcaaatggcgagttgttaggcaaattcaaaaatattaggacgaatgctaggatatgtaacaggaatccagtgcttactacgggatctcttccccatttcacggttttgtgaccgaatattccgaaaattccaccacctaggacctctcctagtcccataaatatcccagatatcccaacaagttctttacgattttcaaaatttttggtaaatccaaggcatgaactatatatcgcactgaagaatcccaactccaaacctgtatacaaaaacgcgaaattgagcaaaaacatcctcatcgtgaaaaacagtctcactgatccgaggaaagcttccactgggccttgtggcttcgcttcttctacttcctcttcctcgtcttcttcttctttaaaagctttcggtagcacgaatagaactatcagtccaacagcgccaactgcagccaacgtgatgatcacgaatgttcttgtgctcttatctacttctgtctttcctttaaaagcaaagaagacgaacgtatttccaacaaacatacttaattgaagtaatgcccaaaatattcccgaatttcttgtgatgtacttcttcgtagagtttaaagttaaataattgccttgaccagtccaaatcatagcggctcctatacccaataaggcactacataaatacattccccacgcttttggagctaggaactgtagtatgaaggcaacataaactgtaccccctaggaacattgaaaacttaggaccaattatactaacaactgatggcgctgaccagttaaatagcgagaagaatccatatatgatggcttgactgtagtatgcgtctccgtcatatgttggatcatcttttactatactgtctgttatagtttgctgtatattagacatagtttgaaatgccgtaaaaaccagcataaatgctagccctagtagcataacatttcgcagacttcgatccattataaataaataatttctgtcaacacacaccagcactatcaataatcaatcattcatcaaaacaaaactttcactagctgatcaattaagtcgattgcctgataggtaccatttccaccgttttttatttctaagcgatacttagataaatatctaaatgtcgagatgttatctgtggtgggtatgcgttgtgtttattatggtgggagtttgttgtattgtgggtaccttggctg

SEQ ID NO: 4190 - DNA, 1672 bp, Diabrotica virgifera
  SmartBlast Evalue=5E-95; Info=UNC93-like protein MFSD11 n=1 Tax= Camponotus floridanus RepID=E2AP46_9HYME
ttaaattctttatttcaaaaaatatttgacatttcttgtaaaaaatcgtccaaacaaaatataaaattaaaatcacattcactaaaaatcttctattttcctcattctggaccggtcaacgcttcttcgctcttcccgctcttttcggcggataacagtgctgcttttttcttggcgtaccattccaccttaatgaaacataaagtacctactactgacatgaccagcaagatggctagctggtaatgaagtccaagagatttggctgaaacgaaggtgataacggctccaagagactggctaaatttaaatatggcaaaagctggagcgctattatcagcgtatacggttcccaaaagcgagaatatctgagtattataaatagagtctcccaatcctagaaggaatgagcaaaatatagctaaaatggcgttgctggttataattgcgctatcatcagtgtctgcaaatggcgagttgttaggcaaattcaaaaatattagtacgaatgctaggatatgtaacaggaatccagtgcttactacgggatctcttccccatttcacggttttgtgaccgaatattccgaaaattccaccacctagaacctctcctagtcccataaatatcccagatatcccaacaagttctttacgattttcaaaatttttggtaaatccaaggcatgaactatatatcgcactgaagaatcccaattccaaacctgtatacaaaaacgcgaaattgagcaaaaacatcctcatcgtgaaaaacagtctcactgatccgaggaaagcttccactgggccttgtggcttcgcttcttctacttcctcttcctcgtcttcttcttctttaaaagctttcggtagcacgaatagaactatcagtccaacagcgccaactgcagccaacgtgatgatcacgaatgttcttgtgctcttatctacttctgtctttcctttaaaagcaaagaagacgaacgtatttccaacaaacatacttaattgaagtaatgcccaaaatattcccgaatttcttgtgatgtacttcttcgtagagtttaaagttaaataattgccttgaccagtccaaatcatagcggctcctatacccaataaggcactacataaatacattccccacgcttttggagctaggaactgtagtatgaaggcaacataaactgtaccccctaggaacattgaaaacttaggaccaattatactaacaactgatggcgctgaccagttaaatagcgagaagaatccatatatgatggcttgactgtagtatgcgtctccgtcatatgttggatcatcttttactatactgtctgttatagtttgctgtatattagacatagtttgaaatgccgtaaaaaccagcataaatgctagccctagtagcataacatttcgcagacttcgatccattataaataaataatttctgtcaacacacaccagcactatcaataatcaatcattcatcaaaacaaaactttcactagctgatcaattaagtcgattgcctgataggtaccatttccaccgttttttatttctaagcgatacttagataaatatctaaatgtcgagatgttatctgtggtgggtatgcgttgtgtttattatggtgggagtttgttgtattgtgggtaccttggctg

SEQ ID NO: 4191 - DNA, 1654 bp, Diabrotica virgifera
ctctgagtcatcgatttcgtgaatactgttagtagtccccatttgttcctattttagtttttaggaaatatataattgtattctacgtttatgctggtgtggtgaagttcctttttacttttttattaatattatttgatagtatgtcatataaatcatcttctcttttcatttatttattttgtaaataaccaataacaaaacacaaaaccgttgaaaatgagcttcttccaaacagtattaattgttcttaactaaaaattacacctttttgaaacaccctgtaattcttaaggtagcgtgctgataaattgagacgatggttggagttttttaaccaaatcagttgtcttgtcgcacacgtcgataaataactgaagacgttaatttttttcttatatggttacctcatactaatatcttatcaaagtggtttaacctacagcattttctaatgagtgtacgtcattgataacaaatttaatagtatgctgatactgtctgacagaatagacataatgataaaatattgtagcgtgcttacggttaaaataatactctcggttcgtttatacgaatttatttatactagttacagatcgaatttatattatacactaactctatttacaaaaattgtgcgttatacatataccctagccgttttttctggaacgttccagaaaaacggaaccgcccatcactagtaattattggccttgaccgtcgatcagtcgcgaaaaatcgtccatccaatcggtcgctgactcattattccagatgtttcctcgtgtgatgcgctgtcgagacggaacctgttatctgccgtcggtaattcgtcacaacatgtgagaaatacacgattggaactataaagcgagctctacactctcacaaagttagtcgacgaagtactagggaaagttgtccgaagtgcatctctacacactcttgtaacttcgagaacatattcgcgcggggagaaactaacttcgagtcctctgactcggtcgcaaaaaccgacgcagaatggaagtagcccgagtcgaagcgaagtcgcctgaaatacctctctactacactctcgtgctggctgaacttcgatcaacgtcgcgagtagtatagtggacgctcaaggcacctatgaaggtatacaacctatatcttgcttttagatcatatctctcattatactaaataacaaatgtagtctcaatgttaaataaaactacggaattgcactatatctgtaataatcactattattacctattacactcgctaacaatatattattcttgtatcaaaaacaaaactaaaaactacttcctatctttatcgagtcagataacgaatcatccacacacaagagaggttgaccttgaaaaaacacatgatcgtctgcgcactcggcgctccacgttatcaatagagctctaatacagggtgcaccgacacatttgactgcacaaattaattctaatatcaaaataatcatttttttttcttttaaggggttttaatttggaacaaaaaagcaatttttaaatatttttaaaggcaaaactttttttgcgcttttagttgattttcgccaatgtagagggcatcttccaaaatatcaattttagtgtgggagacacttctgccttcc

SEQ ID NO: 4192 - DNA, 1647 bp, Diabrotica virgifera
ctctgagtcatcgatttcgtgaatactgttagtagtccccatttgttcctattttagtttttaggaaatatataattgtattctacgtttatgctggtgtggtgaagttcctttttacttttttattaatattatttgatagtatgtcatataaatcatcttctcttttcatttatttattttgtaaataaccaataacataactgttgaaaatgtgcttcttctaaacaaaattaattgttcttaactaaaaattacacctttttgaaacaccctgtaattcttaaggtagcgtgctgataaattgagacgatggttggagttttttaaccaaatcagttgtcttgtcgcacacgtcgataaataactgaagacgttaatttttttcttatatggttacctcatactaatatcttatcaaagtggtttaacctacagcattttctaatgagtgtacgtcattgataacaaatttaatagtatgctgatactgtctgacagaatagacataatgataaaatattgtagcgtgcttacggttaaaataatactctcggttcgtttatacgaatttatttatactagttacagatcgaatttatattatacactaactctatttacaaaaattgtgcgttatacatataccctagccgttttttctggaacgttccagaaaaacggaaccgcccatcactagtaattattggccttgaccgtcgatcagtcgcgaaaaatcgtccatccaatcggtcgctgactcattattccagatgtttcctcgtgtgatgcgctgtcgagacggaacctgttatctgccgtcggtaattcgtcacaacatgtgagaaatacacgattggaactataaagcgagctctacactctcacaaagttagtcgacgaagtactagggaaagttgtccgaagtgcatctctacacactcttgtaacttcgagaacatattcgcgcggggagaaactaacttcgagtcctctgactcggtcgcaaaaaccgacgcagaatggaagtagcccgagtcgaagcgaagtcgcctgaaatacctctctactacactctcgtgctggctgaacttcgatcaacgtcgcgagtagtatagtggacgctcaaggcacctatgaaggtatacaacctatatcttgcttttagatcatatctctcattatactaaataacaaatgtagtctcaatgttaaataaaactacggaattgcactatatctgtaataatcactattattacctattacactcgctaacaatatattattcttgtatcaaaaacaaaactaaaaactacttcctatctttatcgagtcagataacgaatcatccacacacaagagaggttgaccttgaaaaaacacatgatcgtctgcgcactcggcgctccacgttatcaatagagctctaatacagggtgcaccgacacatttgactgcacaaattaattctaatatcaaaataatcatttttttttcttttaaggggttttaatttggaacaaaaaagcaatttttaaatatttttaaaggcaaaactttttttgcgcttttagttgattttcgccaatgtagagggcatcttccaaaatatcaattttagtgtgggagacacttctgccttcc

SEQ ID NO: 4193 - DNA, 1663 bp, Diabrotica virgifera
  SmartBlast Evalue=1E-164; Info=Tyrosine-protein phosphatase non- receptor type 4 n=3 Tax=Aculeata RepID=E2AKL0_9HYME
cgaaatgtacggagtagaattacataaagccagggacaatgccaataaagaaatacatttaggagttacacatttaggattagtagtttttcaaaataatgttcgtatcaacgttttctcttggtcaaagattatgaagatttcatttaagaggaaacagtttttcattcaacttagacgagaaccgtccgaatcatacgatactttgttaggtttcaatatggaaacatatcgttcgtcgaaaactctttggaagtcgtgtgtcgaacatcacacgttcttccgtctacattcgccaagagtaagacgaaaatttccattgtcactagggtccaagtttacttattctggacgaaccgagtaccaaactgtgacggaagtacgacaaagaggcatattggagaggaagttcgtgagatcgcccagtaaataccttggtagccaaccagtgcaaactcctccattggaagataggggaaagatagtaactgctcctgctcgaccaccgggaccttacgctcataaagttacgtctttggataccaaagagcctaagaaagcatggactgaagacagtcgaatatctgatgaagataaaaagtatggatctatttctagcgacggcggatttctagaaagaacgttggaaggacctttttcaccgggtatagccggaagagtcatcagttacgccgacgaagaacctccctcacccacatcgaacggactctacgacacgccaccctatagtttaagtcactcgccaacatcgcaaatcatcgacgataatttagttaatattgtactccatccggacgaagaaggaaagtacggatttaatgttaaaggaggaaacgaacgaaatgtgcctatattagtatctagagttgcaccgaacacgccagctgataaatgtgtacctaggttatcagaaggtgatcaagtattgcaaataaacggacatgatgtttcaaatgctcttcatcaagacgtagtcaaattgatacaagatgcccgatcagcaaattcaggaaaattagtgttagttgtaaaaccgaatgtactttaccaaggctatgaagacttcgaggaacctccatatcagtatgtacctgcgggggagaacgaaccatcttcccctggaaacgcgcttcagcaaagtatgcttctattggctgacggattggctagtggggctctgatagcgcgatatgaaacactttttaggaacatcctgatctcacctgtgacgaatcgctcaaacaacctaatgtcaataagaatcgttacagggacatattgccatatgattcaacgagagtggtcttgaaaatcggttccaacggcgattacatcaacgccaactacgtcaacatgtcaatatccggaacagaaacaatcaaccgatatatcgcaactcaaggaccactgcctgcaaccaccgaagatttctggcaaatgatcctcgaagaagaatgtaatttaatagtaatgttaacgacgataattgaaagaggccgagcgaaatgtcataagtattggccggggttgggagaagcacttacgatgcaaaatatcatcgtaaaatgcgttggtgaagagactgatccatctggaagttttgtttttagggattttgttttattagatattaagaacaacg

SEQ ID NO: 4194 - DNA, 1636 bp, Diabrotica virgifera
  SmartBlast Evalue=1E-166; Info=Tyrosine-protein phosphatase non- receptor type 4 n=3 Tax=Aculeata RepID=E2AKL0_9HYME
cgaaatgtacggagtagaattacataaagccagggacaatgccaataaagaaatacatttaggagttacacatttaggattagtagtttttcaaaataatgttcgtatcaacgttttctcttggtcaaagattatgaagatttcatttaagaggaaacagtttttcattcaacttagacgagaaccgtccgaatcatacgatactttgttaggtttcaatatggaaacatatcgttcgtcgaaaactctttggaagtcgtgtgtcgaacatcacacgttcttccgtctacattcgccaagagtaagacgaaaatttccattgtcactagggtccaagtttacttattctggacgaaccgagtaccaaactgtgacggaagtacgacaaagaggcatattggagaggaagttcgtgagatcgcccagtaaataccttggtagccaaccagtgcaaactcctccattggaagataggggaaagatagtaactgctcctgctcgaccaccgggaccttacgctcataaagttacgtctttggataccaaagagcctaagaaagcatggactgaagacagtcgaatatctgatgacgacggcggatttctagaaagaacgttggaaggacctttttcaccgggtatagccggaagagtcatcagttacgccgacgaagaacctccctcacccacatcgaacggactctacgacacgccaccctatagtttaagtcactcgccaacatcgcaaatcatcgacgataatttagttaatattgtactccatccggacgaagaaggaaagtacggatttaatgttaaaggaggaaacgaacgaaatgtgcctatattagtatctagagttgcaccgaacacgccagctgataaatgtgtacctaggttatcagaaggtgatcaagtattgcaaataaacggacatgatgtttcaaatgctcttcatcaagacgtagtcaaattgatacaagatgcccgatcagcaaattcaggaaaattagtgttagttgtaaaaccgaatgtactttaccaaggctatgaagacttcgaggaacctccatatcagtatgtacctgcgggggagaacgaaccatcttcccctggaaacgcgcttcagcaaagtatgcttctattggctgacggattggctagtggggctctgatagcgcgatatgaaacactttttaggaacatcctgatctcacctgtgacgaatcgctcaaacaacctaatgtcaataagaatcgttacagggacatattgccatatgattcaacgagagtggtcttgaaaatcggttccaacggcgattacatcaacgccaactacgtcaacatgtcaatatccggaacagaaacaatcaaccgatatatcgcaactcaaggaccactgcctgcaaccaccgaagatttctggcaaatgatcctcgaagaagaatgtaatttaatagtaatgttaacgacgataattgaaagaggccgagcgaaatgtcataagtattggccggggttgggagaagcacttacgatgcaaaatatcatcgtaaaatgcgttggtgaagagactgatccatctggaagttttgtttttagggattttgttttattagatattaagaacaacg

SEQ ID NO: 4195 - DNA, 1617 bp, Diabrotica virgifera
  SmartBlast Evalue=0; Info="6-phosphogluconate dehydrogenase, decarboxylating n=1 Tax=Harpegnathos saltator RepID=E2BRV2_ 9HYME"
ttagaataaaaaatttatttaaaaatatatattgtatacataacaacattcaacaacaaccccccgtcttttaatacaccttaagcatcgtaagtggaagcagaaacgtttccaccgtggcccgtccagttggtgtggacgaatttaccttctttacccaataattcatatgtgtgtgccccgaagtagtctctttgagcttgcaaaagatttgctggaagacgctcagatctgtatccgtcgtagaaggccaaagcggtacttaaagctggagttggaatacctaaagtgacagcagtagttagaacattcctccatccctgttgagctttggtaatagcgtctaaaaagaatgggtccaataacaaggagttaaggttcatgtctttgtcaaaggcttccttaatctttcccaaaaatactgatctgatgatgcatccacctctccacataagggcgattgctccgtaatctagttcccagttatgtacctttgcagcttccctcaacaacatgaatccctgagtgtaagacacgatcttggcagcatacaatgcttgttcaagatcatcgaggaatttggcgacatttccggagaatttagcattaggtccttgaagtttggtactggcgtgttgtctctcggtcttgagagctgaaaggcaacggctgaagactgattcaccgattagagtaactggaactccatagttaagggcggatatagctgtccattttcctgttcctttttgaccagctgtatcacggattttgggaagaaggtattggccatcgctatccttatacctcaaaatatctctggtaatttcaataagaaaactgtccaaagctcctttgttccatttgtcgaaagtgttgcccatctgttcttgattgactcctatggcgctcattaaatggtatacttcaccaataagttgcatatctccgtattcaataccgttgtgtaccattttgacgaaatgaccagcaccatcattaccgacccagtcacaacatggttggccatcaaccttggcagagataccttggaagatatcttttatgtagggccatgcttctttgttaccgccaggcatcaaacttggaccgtaacgggcaccttcttcaccacctgaaacaccagaaccaacaaaacggattcctttggcagccaactctttagttcttctttcactgtcttggtattctgaattacctccatcaatgataatatctcctttttcaagatgtggcaccaattggttgataaaactatctacagcatctcctgctttgacgagcaacatgactcttctgggacttttcagctttgagcacaaatcagcgattgattcagctccgagtatactctttcctttagcttcatttgcaagaaaatggtggactttttctatggatctgttgaatgctactacggtgaatccgtgatctgccatgtttagaataaggttctggcccatgacggctagaccaattaaaccaatatctcctttcccagccatggcgatacgacctgttgatcccaatctgatattttgaaggttaggtgtagtgtatgacgacgatgttatcgtcaccttttgccgtctttcg

SEQ ID NO: 4196 - DNA, 1617 bp, Diabrotica virgifera
  SmartBlast Evalue=0; Info="6-phosphogluconate dehydrogenase, decarboxylating n=1 Tax=Harpegnathos saltator RepID=E2BRV2_ 9HYME"
ttagaataaaaaatttatttaaaaatatatattgtatacataacaacattcaacaacaaccccccgtcttttaatacaccttaagcatcgtaagtggaagcagaaacgtttccaccgtggcccgtccagttggtgtggacgaatttaccttctttacccaataattcatatgtgtgtgccccgaagtagtctctttgagcttgcaaaagatttgctggaagacgctcagatctgtatccgtcgtagaaggccaaagcggtacttaaagctggagttggaatacctaaagtgacagcagtagttagaacattcctccatccctgttgagctttggtaatagcgtctaaaaagaatgggtccaataacaaggagttaaggttcatgtctttgtcaaaggcttccttaatctttcccaaaaatactgatctgatgatgcatccacctctccacataagggcgattgctccgtaatctagttcccagttatgtacctttgcagcttccctcaacaacatgaatccctgagtgtaagacacgatcttggcagcatacaatgcttgttcaagatcatcgaggaatttggcgacatttccggagaatttagcattaggtccttgcagtttggtactggcgtgttgtctctcggtcttaagagctgaaaggcaacggctgaaaactgattcaccgattagagtaactggaactccatagttaagggcggatattgctgtccatttgcctgttcctttttgtccggctgtgtcacggattttgggaagaaggtatttaccatcgctatccttatacctcaaaatatctctggtaatttcaataagaaaactgtccaaagctcctttgttccatttgtcaaaagtgttgcccatctgttcttgattgactcctatggcgctcattaaatgatatacttcaccaataagttgcatatctccgtattcaataccgttgtgtaccattttgacgaaatgaccagcaccatcattaccgacccagtcacaacatggttggccatcaaccttggcagagataccttggaagatatcttttatgtagggccatgcttctttgttaccgccaggcatcaaacttggaccgtaacgggcaccttcttcaccacctgaaacaccagaaccaacaaaacggattcctttggcagccaactctttagttcttctttcactgtcttggtattctgaattacctccatcaatgataatatctcctttttcaagatgtggcaccaattggttgataaaactatctacagcatctcctgctttgacgagcaacatgactcttctgggacttttcagctttgagcacaaatcagcgattgattcagctccgagtatactctttcctttagcttcatttgcaagaaaatggtggactttttctatggatctgttgaatgctactacggtgaatccgtgatctgccatgtttagaataaggttctggcccatgacggctagaccaattaaaccaatatctcctttcccagccatggcgatacgacctgttgatcccaatctgatattttgaaggttaggtgtagtgtatgacgacgatgttatcgtcaccttttgccgtctttcg

SEQ ID NO: 4197 - DNA, 1608 bp, Diabrotica virgifera
  SmartBlast Evalue=1E-125; Info=Beta-glucosidase n=1 Tax= Neotermes koshunensis RepID=Q8T0W7_9NEOP
aatcattttctttattgaatattaatacctgcatcgtctgaatattattttacaataatatgagtatcagtcgatacactgatccacaatacaatgggtctgacatactttttggtaatagtaaaatgaatcttttttcgttcttgttctgttggggtcattcatatccacatttaccaaaccaaatttcaccgtatacccagcattccactcaaaattatctattaaactccaaacattataaccaatgacgttgacgccatcataatccattgcatcttttatagcacttaaatactccgttaaataatgagttctgttgggatcatttagttgaccagtgaaatcagaatatccattttccgttattaatatttctggattaaaatattcctgtttaaaccaatttagcaatttacgcattccccaaggaactacctttaaccaaattgaaccagaagaatcccagtcatcgcgttgatactcgtagaccccaatgtctttctcaagagtagggtctccaatttctggttcgtcaatagctctaattatacttgtcgtatatgaattgacagctaaaaaatcatttgttcccttaatatattctatttcttctttggtgaattcaggtagacgtgatttaggataaccttctaatttgcttcttaaacctatacgagatttcataattggtggccaatccccatgatatagagcgtgtccaaataatccccatgaaaattgcatctttgtttcagctgcaataatatcatcagttttatctgtttccggttcgtaccagtttaaattaaggaccattgcaaccttaccatgttgtttagatctatattcctcatcatacatgtgccagattttagcatgagctctaagtaaatttgcagcacagtcgtagaccttttctgcaccgtcatatatacaaacttcgtgtggttcatttatagtaaaccagtattttacatcgtctccaaattcatcaaaagcaactctcgcaaaatctctaatccaatccggaaaggattcattgtaatacccccctatatcaccaagtacttgaggaaggtctccatgactaatggttacaagaggttcgatattgttagctttcagttcagctataagattcttgtagtaagctaatccaaggggattgatataatcattgaaaccatttggtaaaattcttggccacgatattgaaaatcgataatgggtggcgccaagttctttaagaagagcgacatcttctttgtatttgtggtaggaatcacaggacacatctgctgtgctattatcttctattacagaaggtattttgtggttggtcgtatcccatacactgggaccctttccatcttcgttccatgctccttctatttgaaatgcagcagttgcacatccaaatataaaatcaggaggaaactttttgttatttagtgcatctaaaaatcctaaattaaggataaaaaatatcactgcaataaactttatgcacaacatatttactattcatataaattataatgaatgaattcatccaatttataagagcataataataattacgattatcatatttttatgtcattg

SEQ ID NO: 4198 - DNA, 1608 bp, Diabrotica virgifera
  SmartBlast Evalue=1E-125; Info=Beta-glucosidase n=1 Tax= Neotermes koshunensis RepID=Q8T0W7_9NEOP
aatcattttctttattgaatattaatacctgcatcgtctgaatattattttacaataatatgagtatcagtcgatacactgatccacaatacaatgggtctgacatactttttggtaatagtaaaatgaatcttttttcgttcttgttctgttggggtcattcatatccacatttaccaaaccaaatttcaccgtatacccagcattccactcaaaattatctattaaactccaaacattataaccaatgacgttgacgccatcataatccattgcatcttttatagcacttaaatactccgttaaataatgagttctgttgggatcatttagttgaccagtgaaatcagaatatccattttccgttattaatatttctggattaaaatattcctgtttaaaccaatttagcaatttacgcattccccaaggaactacctttaaccaaattgaaccagaagaatcccagtcatcgcgttgatactcgtagaccccaatgtctttttcgggagtagggtctccaatttctggttcgtcaatagctctaattatacttgtcgtatatgaattgacagctaaaaaatcatttgttcccttaatatattctatttcttctttggtgaattcaggtagacgtgatttaggataaccttctaatttgcttcttaaacctatacgagatttcataattggtggccaatcaccatgatatagagcgtgtccaaacaatccccatgaaaattgcatctttgtttcagctgcaataatatcatcagttttatctgtttccggttcgtaccagtttaaattaaggaccattgcaaccttaccatgttgtttagatctatattcctcatcatacatgtgccagattttagcatgagctctaagcaaatttgcagcacagtcgtaggccttttctgcaccgtcatatatacaaacttcgtgtggttcatttatagtaaaccagtattttacatcgtctccaaattcatcaaaagcaactctcgcaaaatctctaatccaatccggaaaggattcattgtaatacccccctatatcaccaagtacttgaggaaggtctccatggctaatggttacaaggggttcgatcttgttagctttcagttcagctataagattcttgtaataagctactccaaggggattgatataatcattgaaaccatttggtaaaattcttggccacgatattgaaaatcgataatgggtggcgccaagttctttaaggagagtgacatcttctttgtatttgtggtaggaatcacaggacacatctgctgtgctattatcttctattacagaaggtattttgtggttggtcgtatcccatacactgggaccctttccatcttcgttccatgctccttctatttgaaatgcagcagttgcacatccaaatataaaatcaggaggaaactttttgttatttagtgcatctaaaaatcctaaattaaggataaaaaatatcactgcaataaactttatgcacaacatatttactattcatataaattataatgaatgaattcatccaatttataagagcataataataattacgattatcatatttttatgtcattg

SEQ ID NO: 4199 - DNA, 1580 bp, Diabrotica virgifera
  SmartBlast Evalue=2E-81; Info=Glucosyl/glucuronosyl transferases n=1 Tax=Aedes aegypti RepID=Q17LC9_AEDAE
acgaataatttctattttggttttatttttaatacactcagctaccagtgctaaaattttaagtgtcataccatccgcctccaggtctcaccatttaccattccaaccattatggcgagaattagctctgagaggtcacgaagttacagttgtaacaacagatccacaacgaaatgcctctatagagaatttaaaggagatagataccagcttctgctacaagatatacgaaaaacataatgtggtaaatgccatagccaatgaaagcctgagttctttggagaaagctggtgttctacgtagagcatttttagaatgtgaagattaccatttttccttaccgccaatcagagaaatgataatcaataagaaaatccactttgaccttttgatcgtggaagctcagttaccaagtatgctagcattcagctggagattcaagtgtccagtcatcgctgtggcctctatggaacctgctcttcagtaccacgattcattaggtaacccagtccacccggttatcaacccagactacaatttggacgtgatagattctgaaaatttgacttttaaggaaaggctgttgagttttcttcaagtcgtgatatataaataccatatctacaacagggcatttccggcttaccacgagcacgtaaagaaatactttggaaaggatttgccgcctttgaaagaactgcaggatagtattagtcttatgtttattggttctcatcctttgttccataatataagacctttaaacttaaatacgataccaattggaggaggaatgcatattaaagctcctaagaagcttcctaatgatcttcaaaaattcctggatgatagcaaaactggtgtcatctatttcagtctaggaagtaacgttaattctaatttactgacaacagaattcaaaaaagctgtagtagaagcctttgccgaagttcctcataacgtgctgttaaaaatggacggtgagatagaaggattgtctaaaaatgttatggtaagaaaatggatgccacagcaagatattttgagacatccaaatattaagttgtttataactcaaggaggtctccaatctctgcaagaatccgtcgtcaatggtattccactaataggaataccatttttcggcgaccaaataacaaatgttaataaaatggttaaaaagggttatggtgtgaaagtggacagaaggagcatgaccaaagaaattttagtggcagctattagacaagttatgacgaatccaagttacaaagagactgcagaagccatgggtgaaatattcaaggacgaagaaattcctagtctccagagagcggtctattggaccgagtacgtcatcaggcataaaggcgcgaaacatctgcgcagtcctggcataggaatgccagcttggaaatactatatgctcgatgtcatgggattcttggcatttgtttgcttaacgattatcattgcaatttttttgatattaagattatttttcaggtggttaaataatctagtgaaggagaagctaaaaaacaaagaaagacgaagaagaaagatagttctaaatacta

SEQ ID NO: 4200 - DNA, 1580 bp, Diabrotica virgifera
  SmartBlast Evalue=2E-81; Info=Glucosyl/glucuronosyl transferases n=1 Tax=Aedes aegypti RepID=Q17LC9_AEDAE
acgaataatttctattttggttttatttttaatacactcagctaccagtgctaaaattttaagtgtcataccatccgcctccaggtctcaccatttaccattccaaccattatggcgagaattagctctgagaggtcacgaagttacagttgtaacaacagatccacaacgaaatgcctctatagagaatttaaaggagatagataccagcttctgctacaagatatacgaaaaacataatgtggtaaatgccatagccaatgaaagcctgagttctttggagaaagctggtgttctacgtagagcatttttagaatgtgaagattaccatttttccttaccgccaatcagagaaatgataatcaataagaaaatccactttgaccttttgatcgtggaagctcagttaccaagtatgctagcattcagctggagattcaagtgtccagtcatcgctgtggcctctatggaacctgctcttcagtaccacgattcattaggtaacccagtccacccggttatcaacccagactacaatttggacgtgatagattctgaaaatttgacttttaaggaaaggctgttgagttttcttcaagtcgtgatatataaataccatatctacaacagggcatttccggcttaccacgagcacgtaaagaaatactttggaaaggatttgccgcctttgaaagaactgcaggatagtattagtcttatgtttattggttctcatcctttgttccataatataagacctttaaacttaaatacgataccaattggaggaggaatgcatattaaagctcctaagaagcttcctaatgatcttcaaaaattcctggatgatagcaaaactggtgtcatctatttcagtctaggaagtaacgttaattctaatttactgacaacagaattcaaaaaagctgtagtagaagcctttgccgaagttcctcataacgtgctgttaaaaatggacggtgagatagaaggattgtctaaaaatgttatggtaagaaaatggatgccacagcaagatattttgagacatccaaatattaagttgtttataacacaaggaggtctccagtctctgcaagaatctgtcgtcaatggtattcctttaataggaataccatttttcggcgaccaaataacaaacgtcaataaaatggttaaaaagggatacggtgttaaagtggatagaaggagcatgacgaaagaaattttagtagcagctattaaacaagttatgacgaatccaagttacaaagagaccgcagaagccatgggtgaaatattcaaggacgaagaaattcctagtctccagagagcggtctattggaccgagtacgtcatcaggcataaaggcgcgaaacatctgcgcagtcctggcataggaatgccagcttggaaatactatatgctcgatgtcatgggattcttggcatttgtttgcttaacgattatcattgcaatttttttgatattaagattatttttcaggtggttaaataatctagtgaaggagaagctaaaaaacaaagaaagacgaagaagaaagatagttctaaatacta

SEQ ID NO: 4201 - DNA, 1575 bp, Diabrotica virgifera
  SmartBlast Evalue=1E-106; Info=CG3344 n=1 Tax=Drosophila melanogaster RepID=Q9W0N8_DROME
tgacaacaaaagaattattttttaatcgaaattatatctaatattgaactgattaatcacttaaaaagaaattgatttcttaacgtacagataatagaattgtaaatgtaacggcacttaaaatatataaaaatatcttatttggtttggatatgtatactcgtattataagaatactactcagttactcagtctactgcttcgactacaaaatgcgagtactagtggtattgtgtataatattacaagtagttttgggaaaaagaggttttggtccaacagatcaagaatggggcttctctgaagtaagacctggtgctaatttattttggtggcttcattataccaccgcagatgtctctacaccaacagatagacctcttctaatatggctacagggaggcccaggatcatcttcaacaggttatggaaactttgaggagttaggtccattagattcagatttaaatcctaggaatactacttgggtacaatgggctaatgttctgtttgtggataatcctgtcggaaccggatttggatatgtaaccagtgatgacttgtacgcaaaaaataatactcaaattgcaacagattttttggaatttatgaaagatttctacaaacagttgcccaaatttaagaccgtaccattgtacatattttgcgagtcatacggtggaaaaatggcagcagaaattgcacttgtattataccaagccatacaaaaaggtgaaatagaatcaaacttaaaaggcgttgcacttggcgattcttggatttctcccttagatgctgaactttcgtatggaccatatttattcaacttgggttttatcgatcgaaatggatacgacgcaataatggaagaagctgcacgagtaaagaaagccatagacaaaggcgactttgacgaagctcttagtctatggtatagtatggaatcattggtggaggttgagacacgtggaattgattggtataatgtctttacaggacgagtatctaataatatcaggggtttggacaagcaaaacacaggtgcatcaagtgttacagacgacctagccaccattatgaattctaaagttgctcctgcgttaaatattaccaaagagtgggttgaccaaagatctgaagtgtttgactctttaggaaacgactttatgagacctgtgacgcatatagttgaagaacttcttaatactacagatttaattgtagctgtgtacaacggacaattggatttaattgtggatacacctgcaacttataattgggttgaaaatattgcgtttaaaggaaaagatgagtgggaacatgcagaaaggatcgaaatatataacgccgtcgactatatccaacaaggcttttataaaagagcaaacaaatttgccttttactgggtaaacctagcaggtcatatggttccacatgacaaccctactgctatggagttcattttaagagacgtaacagataatttcaaagtataaaattttttataagtcacaaaatattatcctaattaataatattttgtgtattttgaataaacgctaatatgtaaaaaaa

SEQ ID NO: 4202 - DNA, 1575 bp, Diabrotica virgifera
  SmartBlast Evalue=1E-106; Info=CG3344 n=1 Tax=Drosophila melanogaster RepID=Q9W0N8_DROME
tgacaacaaaagaattattttttaatcgaaattatatctaatattgaactgattaatcacttaaaaagaaattgatttcttaacgtacagataatagaattgtaaatgtaacggcacttaaaatatataaaaatatcttatttggtttggatatgtatactcgtattataagaatactactcagttactcagtctactgcttcgactacaaaatgcgagtactagtggtattgtgtataatattacaagtagttttgggaaaaagaggttttggtccaacagatcaagaatggggcttctctgaagtaagacctggtgctaatttattttggtggcttcattataccaccgcagatgtctctacaccaacagatagacctcttctaatatggctacagggaggcccaggatcatcttcaacaggttatggaaactttgaggagttaggtccattagattcagatttaaatcctaggaatactacttgggtacaatgggctaatgttctgtttgtggataatcctgtcggaaccggatttggatatgtaaccagtgatgacttgtacgcaaaaaataatactcaaattgcaacagattttttggaatttatgaaagatttctacaaacagttgcccaaatttaagaccgtaccattgtacatattttgcgagtcatacggtggaaaaatggcagcagaaattgcacttgtattatacaaagccatacaaaaaggtgaaatagaatcaaacttaaaaggcgttgcccttggcgattcttggatttctcccttagatgctgaactttcgtatggaccatatttatttaacttgggttttattgatcgaaatggatacgacgcaataatggaagaagctgcacgagtaaagaaagccatagacaaaggcaactttgacgaagctcttagtctatggtatagtatggaatcattggtggaggttgagacacgtggaattgattggtataatgtctttacaggacgagtatctaataatatcaggggtttggacaagcaaaacacaggtgcatcaagtgttacagacgacctagccaccattatgaattctaaagttgctcctgcgttaaatattaccaaagagtgggttgaccaaagatctgaagtgtttgactctttaggaaacgactttatgagacctgtgacgcatatagttgaagaacttcttaatactacagatttaattgtagctgtgtacaacggacaattggatttaattgtggatacacctgcaacttataattgggttgaaaatattgcgtttaaaggaaaagatgagtgggaacatgcagaaaggatcgaaatatataacgccgtcgactatatccaacaaggcttttataaaagagcaaacaaatttgccttttactgggtaaacctagcaggtcatatggttccacatgacaaccctactgctatggagttcattttaagagacgtaacagataatttcaaagtataaaattttttataagtcacaaaatattatcctaattaataatattttgtgtattttgaataaacgctaatatgtaaaaaaa

SEQ ID NO: 4203 - DNA, 1572 bp, Diabrotica virgifera
taaattatcccagctctctgtcattctttcagtttctcgttaataattattataggatagtgccaggtcggaagtgggatatacttttcgacgatgagggtgcttgttctaatcctatgcgtcgccttcctccacttggtagcaggagcttgctatgatagcaaggaagaatgtcattcgaccaactatgaaacatacgtcgaatgtgtcagacgacgtcagaaaagatctacagattgtgagtcaagatgtgactctggtaattgtatcgacacttgtcaagaatgtgattgtagctcttgtagctacaatagctgcacgtcatcttgcggaagttgttgcagttcttgttgcagtaattatgtcccttgccacactaaccactgctgccacaaaacctgccacgctcagtgttcaacatcttcgtgccgaagtaactgcagaaagaactgtttcgacattgtaaaagaaagatctcaaactgttgttgtagagccaggtgaagaaactataagtaaaactaacgccaatataaacaacgtgaacaaacctaatataactacaataattcacttgaataatattattaacaccacaaatcttgtagatattcccattattcttaacaatacaaatacgcagaatataacattatttaatgaagaaactggtctctctacaacattacaatgttgtactgtaattagcccaagggaatgcgtctctagtcctcaacctcgttgttttcattatagaacaaaagaatgcggaagtttttgcacagcatctatagtccataaagaggaacaaaagttgtgttcagttaattacccaggggcggcaccatcttgctccaaacaaatctattatataccccaaccacaaccgaaatgtacctaccaatcagtttggccttatgtatcatgtggaatacagaaaaaagaaacctgtcaaggctgctattcccactacgtcaatggaggtactccaaattatctgacctgtccgcctcaatgttacgatgatgggtttggtgcagtgggcccaatgtatcgccagggacctgtatatagacctgggtattctcatgcaccttgttaccaatgcttgggatacccaaatccgaacgaatatagcggatatcctgttccttatggtggctcccaaccttatttgggtgaatatcaacaagctccttttagtggttaccagcagccgtatggtggctaccctcttccttatggcggatatgtagctccaccctatttcccagtatctactgaagtcaatggtacgataccaatacaagtaaatgaaaatctaatggatgaaggaagagtgccaagagagctggaaattgaagtaaattatgaacaaccctctgatgctcaagctgaagttaaaattaaggaagatgatgaaagtaatttagtcgtagaagaagagaaaaaggaaattgttgaagagtcctcctaaagtttatgtagatatttttttataattaatgttacttttggtgttataataatgtagcttattaatttgtaaaataaacttaattgtaaaggttta

SEQ ID NO: 4204 - DNA, 1572 bp, Diabrotica virgifera
taaattatcccagctctctgtcattctttcagtttctcgttaataattattataggatagtgccaggtcggaagtgggatatacttttcgacgatgagggtgcttgttctaatcctatgcgtcgccttcctccacttggtagcaggagcttgctatgatagcaaggaagaatgtcattcgaccaactatgaaacatacgtcgaatgtgtcagacgacgtcagaaaagatctacagattgtgagtcaagatgtgactctggtaattgtatcgacacttgtcaagaatgtgattgtagctcttgtagctacaatagctgcacgtcatcttgcggaagttgttgcagttcttgttgcagtaattatgtcccttgccacactaaccactgctgccacaaaacctgccacgctcagtgttcaacatcttcgtgccgaagtaactgcagaaagaactgtttcgacattgtaaaagaaagatctcaaaccgttgttgtagagccaggtgaagaaactataagtaaaactaacaccaatataaacaacgtgaacaaacctaatataactacaataattcacttgaataatattattaacaccacaaatcttgtagatattcccattattcttaacaatacaaatacgcagaatataacattatttaacgaagaaactggtctctctacaacattacaatgttgtactgtaattagcccaagggaatgcgtctctagtcctcaacctcgctgttttcactataggaccaaagaatgtggaagtttttgcacagcatctatagttcataaagaagagcaaaagttgtgttcagttaattacccaggggcggcaccatcttgctccaaacaaatctattatataccccaaccgcagcctaaatgtacctaccaatcagtttggccttatgtgtcatgtggaatacagaaaaaagaaacctgtcaaggctgctattcccattacgtcaacggaggtactccaaattatctgacctgtccgcctcaatgttacgatgatgggtttggtgcagtgggcccaatgtatcgccagggacctgtatatagacctgggtattctcatgcaccttgttaccaatgcttgggatacccaaatccgaacgaatatagcggatatcctgttccttatggtggctcccaaccttatttgggtgaatatcaacaagctccttttagtggttaccagcagccgtatggtggctaccctcttccttatggcggatatgtagctccaccctatttcccagtatctactgaagtcaatggtacgataccaatacaagtaaatgaaaatctaatggatgaaggaagagtgccaagagagctggaaattgaagtaaattatgaacaaccctctgatgctcaagctgaagttaaaattaaggaagatgatgaaagtaatttagtcgtagaagaagagaaaaaggaaattgttgaagagtcctcctaaagtttatgtagatatttttttataattaatgttacttttggtgttataataatgtagcttattaatttgtaaaataaacttaattgtaaaggttta

SEQ ID NO: 4205 - DNA, 1566 bp, Diabrotica virgifera
gtactgatatactttagattacaccatttaccattcctaactttatataaaaatcatctaacttatttttccttggtcctaaggtcactccttttttataggaagaaaaaaagagtataaaaatattaacaaataatttaataacttatctgtggttacgtatttccttattggagtaataatattaataatacattgatgtgtttttttctttatatacaaaaaagttttttcttcatatccatcaggtataaatttatacaaatcctcagtaatattgcttttatcaagcttttttagaattgtttaataaatatgtacaatattgacagtgaatattcaaaattgatatttagccataccttatttatttattgatacggtggtattaataggaatattaagaaaagttagtagattttgccctatatttcagctaaaattcaattctactcattagattaaagatatttaatgacatcagaaaataattgtacacgcaaattgaacatgcaaaaagtgtccagtgaataagttataagtcaatccccccctcaacttgcttgttctaatataatggtaccaacgtttcgatatttcgattaaccttcatcgggtgacagccacatactcaatttttctaatagcaagagggatcatgtaaaatatcccttgcaacttagtaaaaattttacacacattttaaaattagatttaaatgtacagtcttctaaaacacattaccgaaacaaagatatattatgttttttaatgaaacaccctgtattttattttaaatataacgttcgcttcacttcctcgttacaagaatttaaagttgttttgggttatataaggtattttaaaagttatgaccaaatttcatgaaaatcgtgtttcatttaaaaaaaaaaaacatatctatggtgtgatacggagtgatggaacacatcctgtataattgtaagtaattttaaaatgtggagctaaatgctatctcctatttttgtacataactttttgtttggtatctcctataacaatagatttaacagactttgccacaaaaattgatcaccctgtataaacagtgtgtcgcatttaagatgaagacacagtcataaaaagttcaataagaaattttgcacagtcatacaggttgatggttcacaccctttaagatagtcaactgaaatttaaataaacgcggcctactgcgaatccacacacagggtgaatcctcgataccctgcttcgcgttagggatatcgaaaaaagttatttaaaaaagttgttccaaacattattacaaccacacgtaccaaatttcatgacaaaattcacacttttagttgttttagtatttgtagtcaagatcctaagcccaaaattggctgtcctgagatgcatctgagaattttaggatccttgatctaaataatggaaaaactaaaagtacaatttgccatgaaacccggtacgtgaggttgtaataatatttggaacaacttttccaaataatttttgaatttatacttctttaagcgcgagggtgaattttttatt

SEQ ID NO: 4206 - DNA, 1555 bp, Diabrotica virgifera
gtactgatatactttagattacaccatttaccattcctaactttatataaaaatcatctaacttatttttccttggtcctaaggtcactccttttttataggaagaaaaaaagagtataaaaatattaacaaataatttaataacttatctgtggttacgtatttccttattggagtaataatattaataatacattgatgtgtttttttctttatatacaaaaaagttttttcttcatatccatcaggtataaatttatacaaatcctcagtaatattgcttttatcaagcttttttagaattgtttaataaatatgtacaatattgacagtgaatattcaaaattgatatttagccataccttatttatttattgatacggtggtattaataggaatattaagaaaagttagtagattttgccctatatttcagctaaaattcaattctactcattagattaaagatatttaatgacatcagaaaataattaataacatgcaaaaagtgtccagtgaataagttataagtcaatccccccctcaacttgcttgttctaatataatggtaccaacgtttcgatatttcgattaaccttcatcgggtgacagccacatactcaatttttctaatagcaagagggatcatgtaaaatatcccttgcaacttagtaaaaattttacacacattttaaaattagatttaaatgtacagtcttctaaaacacattaccgaaacaaagatatattatgttttttaatgaaacaccctgtattttattttaaatataacgttcgcttcacttcctcgttacaagaatttaaagttgttttgggttatataaggtattttaaaagttatgaccaaatttcatgaaaatcgtgtttcatttaaaaaaaaaaaacatatctatggtgtgatacggagtgatggaacacatcctgtataattgtaagtaattttaaaatgtggagctaaatgctatctcctatttttgtacataactttttgtttggtatctcctataacaatagatttaacagactttgccacaaaaattgatcaccctgtataaacagtgtgtcgcatttaagatgaagacacagtcataaaaagttcaataagaaattttgcacagtcatacaggttgatggttcacaccctttaagatagtcaactgaaatttaaataaacgcggcctactgcgaatccacacacagggtgaatcctcgataccctgcttcgcgttagggatatcgaaaaaagttatttaaaaaagttgttccaaacattattacaaccacacgtaccaaatttcatgacaaaattcacacttttagttgttttagtatttgtagtcaagatcctaagcccaaaattggctgtcctgagatgcatctgagaattttaggatccttgatctaaataatggaaaaactaaaagtacaatttgccatgaaacccggtacgtgaggttgtaataatatttggaacaacttttccaaataatttttgaatttatacttctttaagcgcgagggtgaattttttatt

SEQ ID NO: 4207 - DNA, 1561 bp, Diabrotica virgifera
ccccccttaactgtattagtgagtttatgtagcaaggatcatattatagcattgttttgtataagcgaatgatactattttgaggttacatttggatattttgttgttcgatactcttggaaaattccagttcttcgtgtgacgtctagattttaacagatcattgtggactgctctaaagttaaagaatagcatgaatgaatgaagcatgaatagtaaattgtatcatcagatacgctaatttacattatattttaaatccctagtattttatccattttaacgtaaagaaaaattaatatttacataaaacaacaaacttaataacacaaagcagaattattatcacacatttctatttgacccgtgctttttacacatactggctgtttaaattcatctcaacaacctcttcattttcatcgatctttttagtttttccaaatatatcacaatgttagtttctgatccatttgaggtcaatatgagaatagttgaatccactggaggggatagtcaggaactatggctggccaaaaataatgcaatgtcatatttagtcgggagtggggataaaattatttcagcgaacacattaaagagtccagaataattaaaaagggaaaaataagattcatgtcgattagagaacatatggaataatttatttttatataaatttactttttatgacagagtgagtgactgtatgacgtatgacgtacaatatacgtcatacgtcttcggtacataccaatgacatatgacgtatacatattgcacgtcaaatgtacgagaaaaatggcggcaatgaatagcattcttgagtttcttagaagcgtttagttattttgcgctactactttcattagaacagtcttaaggaacaatcgttataaatacttttacggaaattctaatcatgtgacacaactttggtttccactacttcaaatctaaaacagcggtgttaggcaaaccatttatattctatatgcttgatctatctattagctttctaacttattggaagatttatgcatagatccatcacaaaagtaacagtaaatatggcctaaatttcgggatacatcatttggtggaacgtttctccaatacagatttttttccactatgtaatggaagtatttaaacgataagtcgacaagatgaatttaaatatgccgaattaaactattcacagcaacaaagcagataatgccctgctttttaaaattttaatataaaacagtgaatcctcaagtgcctacctagtaattatatgaccagttaacatatcaaatgtttatcgtcatttatatataggcccgttaatatataataaacatttatatcaacatcaacgctttttctttacatgcaaatatcaacattttccctctattttccaggattttccaacaaataaaatatataaatttaatggaacataacatgtatcattaaatgagtgttaatatatctatatataaaataaatatttacaagtaacattttttatgtataacaaaaatctgatggacatacaactaatcgtggg

SEQ ID NO: 4208 - DNA, 1535 bp, Diabrotica virgifera
ccccccttaactgtattagtgagtttatgtagcaaggatcatattatagcattgttttgtataagcgaatgatactattttgaggttacatttggatattttgttgttcgatactcttggaaaattccagttcttcgtgtgacgtctagattttaacagatcattgtggactgctctaaagttaaagaatagcatgaatgaatgaagcatgaatagtaaattgtatcatcagatacgctaatttacattatattttaaatccctagtattttatccattttaacgtaaagaaaaattaatatttacataaaacaacaaacttaataacacaaagcagaattattatcacacatttctatttgacccgtgctttttacacatactggctgtttaaattcatctcaacaacctcttcattttcatcgatctttttagtttttccaaatatatcacaatgttagtttctgatccatttgaggtcaatatgagaatagttgaatccactggaggggatagtcaggaactatggctggccaaaaataatgcaatgtcatatttagtcgggagtggggataaaattatttcagcgaacacattaaagagtccagaataattaaaaagggaaaaataagattcatgtcgattagagaacatatggaataatttatttttatataaatttactttttatgacagagtgagtgactgtatgacgtatgacgtacaatatacgtcatacgtcttcggtacataccaatgacatatgacgtatacatattgcacgtcaaatgtacgagaaaaatggcggcaatgaatagcattcttgagtttcttagaagcgtttagttattttgcgctactactttcattagaacagtcttaaggaacaatcgttataaatacttttacggaaattctaatcatgtgacacaactttggtttccactacttcaaatctaaaacagcggtgttaggcaaaccatttatattctatatgcttgatctatctattagctttctaacttattggaagatttatgcatagatccatcacaaaaatgatccatcatttggtggaacgtttctccaatacagatttttttccactatgtaatggaagtatttaaacgataagtcgacaagatgaatttaaatatgccgaattaaactattcacagcaacaaagcagataatgccctgctttttaaaattttaatataaaacagtgaatcctcaagtgcctacctagtaattatatgaccagttaacatatcaaatgtttatcgtcatttatatataggcccgttaatatataataaacatttatatcaacatcaacgctttttctttacatgcaaatatcaacattttccctctattttccaggattttccaacaaataaaatatataaatttaatggaacataacatgtatcattaaatgagtgttaatatatctatatataaaataaatatttacaagtaacattttttatgtataacaaaaatctgatggacatacaactaatcgtggg

SEQ ID NO: 4209 - DNA, 1552 bp, Diabrotica virgifera
  SmartBlast Evalue=1E-121; Info=Beta-glucosidase (Fragment) n=1 Tax=Tenebrio molitor RepID=Q9GSE6_TENMO
tcgcaatgaaggtgtttttatttgccttgctattgggcgtttgccttgctcaaaacgccgacaccaacccaagacgttttcccgccagtttcaaacttggagtggccaatgctgcggctcaaatagaaggtgcctgggaggaagacggcaaaggagaacacatttgggatcgttggtctaaggttcgtccagagatgatttccgataggtctacgcctgctgtagccgctgattcataccacaagtacaaagaagatgtacgtttaatcaaggagatgggtcttgacgtttaccgtttatccatctcgtgggctagaatctacccaacaggatacccaactgctgaacccaatgcagctggtgtacaatactacaaaaacttattggccgaatgcaaacagaacggaatccaagtaatggctaccctttaccactgggacttgccccaacagctccaagacgacttcggaggttggctcaacgaaaccgtcgtcgatctattcgccgccttcgccgacgtttccttcaaactcttcggtgacgatgtcacgtggtggatcaccatcaacgagcccaaacaagtgtgccatgcaggttacggagatggttacttcgcgccaggtgttgtttccagtggcgttggagagtatacctgtgccagaaacgtgcttttggctcacgcaaaggcttatcataattataatgataactacaaagcatcacaaggaggaaaagtctctatggtaatcgatacactttggtttgaacccggcagtgatagtgatgcagataaagatgcagctgaaagattgctacaatttggtttcggtctatacggtaaccccatcttcaacggagattggcccaaactcgtcaaagaccgtgtagccatgcgcagtgagaaggaaggattcaaacagtcgcgtcttccagcttggacccaagaagaaatcgattacatcaagggcaccggagacttcgttgctctgaaccactacgcaactcatatggctaacggaaccaatgaggcacccattggaaatcccagctttggatctgatatcagtgctatggaatgggctagaccagaatggccaaaaggcgatggagactggttctcgattgttccatggggattaaggaaacttcttgtttggttaaaggatacctacaatgaccaggagattatcattactgaaaatggtttatctgataacactggagttttggaagatgaccatagggttgactattttagagattacatcagtaactgcttggatgctatctatgaagataatgtcaatcttagtacttacattgcctggagtatcattgacgattgggaatggggaggtggatacaaatcattcttgggaatgtacaaagttgatttcaatgatcctgaaaggcccagaatcaagagaaaatccgccgactacttcacacaaatcgtaaagaaccgttgtttggttgatgcagacaaatgtgtggactaaatatattttctgtgaaaattgtgacctttattttataaataaaccttaaatat

SEQ ID NO: 4210 - DNA, 1552 bp, Diabrotica virgifera
  SmartBlast Evalue=1E-121; Info=Beta-glucosidase (Fragment) n=1 Tax=Tenebrio molitor RepID=Q9GSE6_TENMO
tcgcaatgaaggtgtttttatttgccttgctattgggcgtttgccttgctcaaaacgccgacaccaacccaagacgttttcccgccagtttcaaacttggagtggccaatgctgcggctcaaatagaaggtgcctgggaggaagacggcaaaggagaacacatttgggatcgttggtctaaggttcgtccagagatgatttccgataggtctacgcctgctgtagccgctgattcataccacaagtacaaagaagatgtacgtttaatcaaggagatgggtcttgacgtttaccgtttatccatctcgtgggctagaatctacccaacaggatacccaactgcagaacccaatgcagctggtgtacagtactacaaaaacttattggccgaatgcaaacagaatggaattcaagtaatggcaaccctttaccactgggacttgccccaacaactccaggacgacttcggaggttggctcaatgaaaccgtcgtcgatctattcgccgccttcgccgacgtttccttcaagctcttcggtgacgacgtcacgtggtggatcaccatcaacgagcccaaacaagtatgccacgccggctatggagatggatacttcgctcccggtgttgtttccagtggagttggggaatacatttgcgccagaaacgtgcttttggctcacgcaaaggcttatcataattataatgataactacaaagcatcacaaggaggaaaagtctctatggtaatcgatacactttggtttgaacccggcagtgatagtgatgcagataaagatgcagctgaaagattgctacaatttggtttcggtctatacggtaaccccatcttcaacggagattggcccaaactcgtcaaagaccgtgtagccatgcgcagtgagaaggaaggattcaaacagtcgcgtcttccagcttggacccaagaagaaatcgattacatcaagggcaccggagacttcgttgctctgaaccactacgcaactcatatggctaacggaaccaatgaggcacccattggaaatcccagctttggatctgatatcagtgctatggaatgggctagaccagaatggccaaaaggcgatggagactggttctcgattgttccatggggattaaggaaacttcttgtttggttaaaggatacctacaatgaccaggagattatcattactgaaaatggtttatctgataacactggagttttggaagatgaccatagggttgactattttagagattacatcagtaactgcttggatgctatctatgaagataatgtcaatcttagtacttacattgcctggagtatcattgacgattgggaatggggaggtggatacaaatcattcttgggaatgtacaaagttgatttcaatgatcctgaaaggcccagaatcaagagaaaatccgccgactacttcacacaaatcgtaaagaaccgttgtttggttgatgcagacaaatgtgtggactaaatatattttctgtgaaaattgtgacctttattttataaataaaccttaaatat

SEQ ID NO: 4211 - DNA, 1517 bp, Diabrotica virgifera
  SmartBlast Evalue=0; Info=Putative eukaryotic translation initiation factor 3 subunit 6 n=1 Tax=Maconellicoccus hirsutus RepID=A2I3X8_MACHI
acttctcgtagctctgcttgttgaattttaaaatattgaaagtagtaaatattgaagaaagtattaataacacaatcatggcaaagttcgacttaacttcgaagatgggccagtatttagaccggcatctcgtttttcccttattggaatttctgtccgcaaaaggaatttacaatgagaccgaactgttaaaagccaaattagatattctaagcaagactaatatgatagattatgctattgatatcagaaaacaactgtaccctgatcaggaaatacccgaggacctaaaacagaggcgtaatcatgttgtgcagcagctagcagagctgcaagaagaggttaagcctatccttaagattatggagtctgaagaagttatgaagaatatggaaaacatgagagattcgaaaacacttattacatatttgtcaaaagaattcaagtttgaaattgaattgatcgacagtcttcacaaactagccaaatacagatacgactgtggcaactacacagtatctacatcctacctgtacttctgtatgctggtattacctcccaatgacaggaactatcttagtgccttgtggggaaaattcgcttcagaaattctgtaccaaaactgggattcagccctggaagatctcaacaaactgagggaatatattgattccagtcccaatcagttttctggcaacagtttgcagcttctccaacagaggacttggttgatccattggtctctctttgtgtttttcaatcatgttatgggcagagaattgattattgaaatgttcttgtatagaccacactacctcaacgccatccagaccatgtgtcctcatatcttgaggtatttggctacagctgtaattattaatcgtggaaggagatcagcactgaaggacttagttaaagttattcagcaagaaagctacacttacagagatcccattacagagtttgtggaacacctttacgtcaacttcgattttgatggagcccgtcaaaaattacacgaatgccaaacagttttactaaacgacttcttcctaatttcctgtttagacgaattcgtagaaaacgccagacttatgatcttcgagacattctgcagaattcatcaatgcatcagtataggcatgttagccgaaaagctcaacatgaatccagacgaagctgaatgctggatcgtgaatttgatcagaaacgcacgattggatgctaagatcgattctaagttagggcatgtggttatgggtgctcaacctttatcgccataccagcaacttattgaaaaaattgattccctttcggtcaggtcagaaactctgtgtgctcttatagatagaaagctcagagcgaggactgacgtaagtttctaaaggtacgttaacgaaatgatgcaagaatttgtcatttttgttacagatacgttggggaaatccagatttttaaatatctgttattttgtaataattttattggatacaaataaaagatctttccagtatgtc

SEQ ID NO: 4212 - DNA, 1517 bp, Diabrotica virgifera
  SmartBlast Evalue=0; Info=Putative eukaryotic translation initiation factor 3 subunit 6 n=1 Tax=Maconellicoccus hirsutus RepID=A2I3X8_MACHI
acttctcgtagctctgcttgttgaattttaaaatattgaaagtagtaaatattgaagaaagtattaataacacaatcatggcaaagttcgacttaacttcgaagatgggccagtatttagaccggcatctcgtttttcccttattggaatttctgtccgcaaaaggaatttacaatgagaccgaactgttaaaagccaaattagatattctaagcaagactaatatgatagattatgctattgatatcagaaaacaactgtaccctgatcaggaaatacccgaggacctaaaacagaggcgtaatcatgttgtgcagcagctagcagagctgcaagaagaggttaagcctatccttaagattatggagtctgaagaagttatgaagaatatggaaaacatgagagattcgaaaacacttattacatatttgtcaaaagaattcaagtttgaaattgaattgatcgacagtcttcacaaactagccaaatacagatacgactgtggcaactacacagtatctacatcctacctgtacttctgtatgctggtattacctcccaatgacaggaactatcttagtgccttgtggggaaaattcgcttcagaaattctgtaccaaaactgggattcagcactggaagatctcaacaaactgagggaatatattgattccagtcccaatcagttttctggcaacagtttgcagcttctacaacagaggacttggttgatccattggtctctctttgtgttcttcaatcatgttatgggcagagaattgattattgaaatgttcttgtatagaccacactacctcaatgccatccagaccatgtgtcctcatatcttgaggtatttggctacagctgtaattattaatcgtggaaggagatcagcactgaaggacttagttaaagttattcagcaagaaagctacacttacagagatcccattacagagtttgtggaacacctttacgtcaacttcgattttgatggagcccgtcaaaaattacacgaatgccaaacagttttactaaacgacttcttcctaatttcctgtttagacgaattcgtagaaaacgccagacttatgatcttcgagacattctgcagaattcatcaatgcatcagtataggcatgttagccgaaaagctcaacatgaatccagacgaagctgaatgctggatcgtgaatttgatcagaaacgcacgattggatgctaagatcgattctaagttagggcatgtggttatgggtgctcaacctttatcgccataccagcaacttattgaaaaaattgattccctttcggtcaggtcagaaactctgtgtgctcttatagatagaaagctcagagcgaggactgacgtaagtttctaaaggtacgttaacgaaatgatgcaagaatttgtcatttttgttacagatacgttggggaaatccagatttttaaatatctgttattttgtaataattttattggatacaaataaaagatctttccagtatgtc

SEQ ID NO: 4213 - DNA, 1497 bp, Diabrotica virgifera
  SmartBlast Evalue=9E-19; Info=CG6839 n=5 Tax=melanogaster subgroup RepID=Q9VVU9_DROME
aaaaaatatatacttgttattcataaatagcccgttactttcagatttggggcaaagttgacagtgctgtgaaatccatcatcattatagtcacaggcgtaaaaatatcccttatcataaagttctttgtcccaacttatccaacttattttactggatatatcttcacaaatttgttcttctggactaactttgtccacatacggattattatgtcctataagaactagtccttgtgtatttaaaggattgtacacaactttccaatataactcaggtactggaaacgctatcacaaacccgtttttgagctctttttcaaggagatataactctgtaggctccgggggctctgtttcattgtttaattttgtaacgccatatgttccgctccaaatttgtaggttaacattgttgttactagcatacagtcttatttcgttttcttgtaaccaatttcctttattaatcgagttccattgtggtgcaatgttggcgtagttcttaacagccagctgaaacgttgctaaataaaaatcattttcagagcaagttgttgcgtggtaataaatatttgttgttaatatatttatccgaatcatctggtaaacctagtaaattattcattgattttttactatcatcatagaccgtttttacagagtaacctaatttgtaaagcgaatcttcttgtcgaatattagacctcgtaacatttctggatccaaaaattgtaacacttgtcaaaatgtagtgagaatacagagctagtttgtttgttgtattaaaacaaatatttacaatattgataaaacgatttgagtccactgtgtagcccaaatttaggaaaagtgtactatcgtcgccagtatcgcaaggtttgttaggatcgtctgaactcaaattttgaactggtacctctttgatggttggtactaataactttgaacatgcaacgtctttccactctatatttgttccattgtatataaatgtttcgttgaacttacaaacaaccgtaatactagaacctaagttaactccatttgctcgaacttctgattgagaacatgaaaattctacttcttggttactggcaaatattgtatttgcttttccttgtggataaataacattgtctgtgttaggagatagcagaagaggatgggtatttctgtactgaatttggttaatttcacagggacctgaaggttcattcggttcgtctgtatgatcttcgattttgctactttttgttccagtatgtgttttggacgctgctactgtaattataataaggagaacaataccaacaacaactccagttactattaaaaaaaaactttctcgattttaaaaacggtttggaaaaatagatcatcctaaatattgtaactctgttgatcgttaatacaatggacaataaggggagacaataaatttatatgaggtgttatcttttacaataggttgaaatgtctactctgtgtgatttac

SEQ ID NO: 4214 - DNA, 1491 bp, Diabrotica virgifera
  SmartBlast Evalue=1E-23; Info=CG6839 n=5 Tax=melanogaster subgroup RepID=Q9VVU9_DROME
aaaaaatatatacttgttattcataaatagcccgttactttcagatttggggcaaagttgacagtgctgtgaaatccatcatcattatagtcacaggcgtaaaaatatcccttatcataaagttctttgtcccaacttatccaacttattttactggatatatcttcacaaatttgttcttctggactaactttgtccacatacggattattatgtcctataagaactagtccttgtgtatttaaaggattgtacacaactttccaatataactcaggtactggaaacgctatcacaaactcttttttgactactttttcaagaagatatagctctgtgggctctgatgattcattgtttaatttcataacgccatatgttccgctccaaatttgtaagttaacattgttgttactagcatatagtctaatttcgttttcttgcaaccaatttcctttgttaatcgagttccattgcggtgcaatgttggcgtagttcttaacggccagttgaaacgttgctaaataaaaatcattttcagagcaagttgttgcgtggtaataaatatttgttgttaatatatttatccgaatcatctggtaaacctagtaaattattcattgattttttactatcatcatagaccgtttttacagagtaacctaatttgtaaagcgaatcttcttgtcgaatattagacctcgtaacatttctggatccaaaaattgtaacacttgtcaaaatgtagtgagaatacagagctagtttgtttgttgtattaaaacaaatatttacaatattgataaaacgatttgagtccactgtgtagcccaaatttaggaaaagtgtactatcgtcgccagtatcgcaaggtttgttaggatcgtctgaactcaaattttgaactggtacctctttgatggttggtactaataactttgaacatgcaacgtctttccactctatatttgttccattgtatataaatgtttcgttgaacttacaaacaaccgtaatactagaacctaagttaactccatttgctcgaacttctgattgagaacatgaaaattctacttcttggttactggcaaatattgtatttgcttttccttgtggataaataacattgtctgtgttaggagatagcagaagaggatgggtatttctgtactgaatttggttaatttcacagggacctgaaggttcattcggttcgtctgtatgatcttcgattttgctactttttgttccagtatgtgttttggacgctgctactgtaattataataaggagaacaataccaacaacaactccagttactattaaaaaaaaactttctcgattttaaaaacggtttggaaaaatagatcatcctaaatattgtaactctgttgatcgttaatacaatggacaataaggggagacaataaatttatatgaggtgttatcttttacaataggttgaaatgtctactctgtgtgatttac

SEQ ID NO: 4215 - DNA, 1502 bp, Diabrotica virgifera
gcactggctttccctttcatcccttgttgctgcttcctgtgtccactgagtgtcagcctgaaaggggtcataattgtcaatatacaatggacacatttcacaggaaaaactccatattacttgtgacgatgatttttcggctctagctctctgtctattatcctatgtttgggaaatacaacaagccagtatatttatttttggcagtatgtatgttattcttgcaggtattgttggttgttgtctttgcctatcgagttgtcaatacccattgtaatcaaattagctatgatatattagacgaattttttgaataagcgaaaattttagtttaacataatgttcatcagataaggtaactatagtttctgttttttcttagaaatggaagatttatcatatcgttctatattaccagacagacagaactgttgactatttttaagctccgctcaagttgttaataaatctaatatatttaaaaatgaaaataggatataaatcgaaatttttacctctaaaatctgtgttttttcttgattacgtgattggaatgtctgcaaggtattacgttatataacaatatagaattattttttaatcgattattttatacttgacaaatgtgattctactattagtcagtaagtatttttttaaagttaggttctcgatgcatttacaatagttatataaaagatttcgtattaatttattatagtttcgaggtaatacatctatgtaagttcactgtttctagtctgttttctctattacacaggatgactcgatacctaacactatgcctccattcaccaaaaaaatcaaaatttaaacattttaattaatataattgaaacatattaacgactatatttaatgatacagtaattaaaaatggatttagctgacttttctgaagtcttgtatacatgcattcttcaaataaattattttaaccaaattttaatctcttatcccgaaattttgaggaactttctggttgcattttctttgttcaagtcgttgtttttctgtgggaaagaaaaaggacgtcatacagctctcattagaatcacgggaacattttaataatgatattttataatatttatttgatactgactactttaaagaaatagattctttcagagtgtaatatcaaattttggacatccattttagtgattttgtacgatcccttgtcaacatttagcccagttcataattatttataacgaaatggcaagggtgtgcatgcggtaccacatttttcactgtaccactggtttgacagagttgtgtttaaagcgttacaaaaaatatgttttggggacactgatagttaggtgcagagacattctgtgtactaagttgtgtagtttgtacatattcaaataaatgatacttattttttatctaagttatctttagtggttcccacctgcagacattctaatttagaggaacgaaattgtctaggagttaagcacaaatgatat

SEQ ID NO: 4216 - DNA, 1487 bp, Diabrotica virgifera
gcactggctttccctttcatcccttgttgctgcttcctgtgtccactgagtgtcagcctgaaaggggtcataattgtcaatatacaatggacacatttcacaggaaaaactccatattacttgtgacgatgatttttcggctctagctctctgtctattatcctatgtttgggaaatacaacaagccagtatatttatttttggcagtatgtatgttattcttgcaggtattgttggttgttgtctttgcctatcgagttgtcaatacccattgtaatcaaattagctatgatatattagacgaattttttgaataagcgaaaattttagtttaacataatgttcatcagataaggtaactatagtttctgttttttcttagaaatggaagatttatcatatcgttctatattaccagacagacagaactgttgactatttttaagctccgctcaagttgttaataaatctaatatatttaaaaatgaaaataggatataaatcgaaatttttacctctaaaatctgtgttttttcttgattacgtgattggaatgtctgcaaggtattacgttatataacaatatagaattattttttaatcgattattttatacttgacaaatgtgattctactattagtcagtaagtatttttttaaagttaggttctcgatgcatttacaatagttatataaaagatttcgtattaatttattatagtttcgaggtaatacatctatgtaagttcactgtttctagtctgttttctctattacacaggatgactcgatacctaacactatgcctccattcaccaaaaaaatcaaaatttaaacattttaattaatataattgaaacatattaacgactatatttaatgatacagtaattaaaaatggatttagctgacttttctgaagtcttgtatacatgcattcttcaaataaattattttaaccaaattttaatctcttatcccgaaattttgaggaactttctggttgcattttctttgttcaagtcgttgtttttctgtgggaaagaaaaaggacgtcatacagctctcattagaatcacgggaacattttaataatgatattttataatatttatttgatactgactactttaaagaaatagattctttcagagtgtaatatcaaattttggacatccattttagtgattttgtacgatcccttgtcaacatttagcccagttcataattatttataacgaaatggcaagggtgtgcatgcggtaccataggttgttgacagagttgtgtttaaagcgttacaaaaaatatgttttggggacactgatagttaggtgcagagacattctgtgtactaagttgtgtagtttgtacatattcaaataaatgatacttattttttatctaagttatctttagtggttcccacctgcagacattctaatttagaggaacgaaattgtctaggagttaagcacaaatgatat

SEQ ID NO: 4217 - DNA, 1492 bp, Diabrotica virgifera
  SmartBlast Evalue=3E-93; Info="Cytochrome B5, putative n=1 Tax= Pediculus humanus corporis RepID=E0VR48_PEDHC"
attttgtctacaataatacaactacataactatttacttcactattatcacttatttacttttcgaatatttcaataggtctgtgggattaggatttggttcaacccttacaagttgttgaaagttgcccttaatcgtttctatttgggaaaccatccttaagtcaacattgaattgattacaaacttctttaaaaactggatagaggtgctgaagttgaccatggtccaaagtgggaaagaaatgatgtagagcgtgatctccaaagctcgttagcactaagaagtgagacccagtaatttcttttcgttcgagtaatgcttccaattggcctagaccccagtcgaatttttttccccttggggtatctccatcgtgaaacacgtcagggtggtggtgaccagcgttaaatcctacaaaactcatataagtacccccgcagacaaggacgaaattccacattatgaaaacacttaacaaatcgtcatttccaaaaacatacatgcagattggaagtagtaggcctaataaatcggtaaatctcaattgcttgtattgggttggcaaattaattattctttcaatagctggtttatggaagaatgttaagcatattattggtaccaacattactgacacaactttttgcattggttttttctccactggcaaataattaagaagtggttcgaacatagcaatttccagatctgttatagtgtttgtatacaagtggtgactcaaagcatggcttattctcgattccctcacttgaagaaatgaaaactggaaataatacattctaaaattatccttcatatgtaaataattatgagcagctatggtaaccattcctaaaaacacaccaccaaatgcacccaatccaaaggtccaaaatttcactgcaaaaattgaaaacataaaactcaacaccaataaagaatctgtaatcagttttgatttggtgtaactttccttgggacagtttcttaaaacaggttgtattttcttttttaatattctataaaagccatcttcttcaaacgtgtaaggagaatttctctctgtagtggcatttttaacaaaatactttttaagtatttcgttgggaaattctgttaagtggtggacttcaaaagcttctgttatatcagtaccctttgttagtgtaagccagtcagaacctcccggatgtttgtgaacaaattcagtcaaatcatagattttatcatgtactctccataatccttcagcaccatcatctatctgtttctctttcaaccacatatctgtcgttacaactctacccttacctctagaaggtattggttttatccctaacgatgaaattggaacaaaatccggatttggtgacattttttgtcttctgatggtagaattacttgggaaatctcttttgttctattgctaattagtcaaagcactcaaagttcttattattgataagatagtattcaatattattgataag

SEQ ID NO: 4218 - DNA, 1492 bp, Diabrotica virgifera
  SmartBlast Evalue=8E-91; Info="Cytochrome B5, putative n=1 Tax= Pediculus humanus corporis RepID=E0VR48_PEDHC"
attttgtctacaataatacaactacataactatttacttcactattatcacttatttacttttcgaatatttcaataggtctgtgggattaggatttggttcaacccttacaagttgttgaaagttgcccttaatcgtttctatttgggaaaccatccttaagtcaacattgaattgattacaaacttctttaaaaactggatagaggtgctgaagttgaccatggtccaaagtgggaaagaaatgatgtagagcgtgatctccaaagctcgttagcactaagaagtgagacccagtaatttcttttcgttcgagtaatgcttccaattggcctagaccccagtcgaatttttttccccttggggtatctccatcgtgaaacacgtcagggtggtggtgaccagcgttaaatcctacaaaactcatataagtacccccgcagacaaggacgaaattccacattatgaaaacacttaacaaatcgtcttttccaaacacatacatgcagattggaagaagtaggcctaataaatcagtaaacctcaattccttgtattggttcggcaaattaattattctttcaatagctggtttatggaaaaatgttaaccacattattggcgccaacattactgacacaaccttttgtaatggttttttctccactggcaaataattaagaagtggttcgaacatagaaatttccagatctgttatagtgtttgtatacaaatggtgactcaaagcatggcttattctccattccctcacttgaagcaatgaaaactggaaataatacattctaaaattatccttcatatggaaataattatgggcagctaccgtaaccattcctaaagacacaccaccaaatacacccaatccgaagttccaaaatttcactgcaaagattgaaaacaaaaaactcaacaccaacaaagaatctataataagctttgatttggtgtaactttccttgggacagtttcttaaaactggttgtattttcttttttaatatcctatataatccatcttcttcaaacgtatagggagaatttctctctgaagtggcatttttaacaaaatattttttgagtatttcgtttggaaattctgttaagtggtggacttcaaaagcttctgttatatcagtaccctttgttagtgtaagccagtcagaacctcccggatgtttgtgaacaaattcagtcaaatcatagattttatcatgtactctccataatccttcagcaccatcatctatctgtttctctttcaaccacatatctgtcgttacaactctacccttacctctagaaggtattggttttatccctaacgatgaaattggaacaaaatccggatttggtgacattttttgtcttctgatggtagaattacttgggaaatctattttgttctattgctaattagtcaaagcactcaaagttcttattattgataagatagtattcaatattattgataag

SEQ ID NO: 4219 - DNA, 1474 bp, Diabrotica virgifera
ctcaacactaagagacgccgatctccgaattttctcgcctttttgcccctcgaaaatccgaaaaaatggtttatgaaagcgatttttacacgaccaggaggccctatcgtgccactccttccgtttcgtcttacactatttcgactccaagacattacgtggtgacggattacccagagcgtacccgcaaatctgcagagcaagtctattcttactcctattcttccgactcttctaatcgctccggttatggcgacccccgctctcgttcttacacttccaccgagagcgtctccagatcttccactggaggccctggcggttacaactatacttcggaacggaccagccgctccagaggcgacggtcctggaggttacagctccagctatagctctacttcatctggcccaggcacatacagacactactcctatcgtgtctaagacctcttgagtttctgcttgtaacctagttatattcttttaaaatcgggaatatccttagtgtttcaattaataaagaaaaacagtaaataaggttttaagtaaaaaacagtaataagcaacttaaattttagaagatatttttactatactgtagtccttaaactaaaaactatactaacgctagtataagattacatcaactggattgtttttttaatttctctatgtcgagtgttagttttacaagataacctcgccttacaattgtctaaaaacattattgatacagggtgtacataattaggaaatattatatcgttattaaggatattcccgaaaatttcaatatggtttagattataattagatatagatatatatttacacatgcattaacaaaattgtgtttgatatatagtactttatactaattttggttgaaataagtattttaggtcaaattataaataaaataagagttaaaaaatactagaaatcaaattgtgaaaaatacatatcaaaaaccccttagcggcttcatataattcttgatttgaaaatataggtatattaatgaatattttatacaaatttatgataggtacaattggaaaaaataatatttttggatactggtaatttttttttaaatggtagagtgacgtaaacagaacatttcaaaatgttattagtgtccattttattattttttttacaattgtttgaaacaaaaatacctatcttattttgaccagaacaatattttaatcatatatagttatttaacttttactaacaaacacaccatattcgcactgattttagattattaatattagatgtttagtagttgttatattataatttttgaatctatataaaatttatttttcgaatgctataccataaaaaatattttcgacaatgtaatttttagaaactaatcttttatatatccattttattttatcgagaagattatatttgatataattattgtgatcaaccttacaatatactgtaaa

SEQ ID NO: 4220 - DNA, 1461 bp, Diabrotica virgifera
ctcaacactaagagacgccgatctccgaattttctcgcctttttgcccctcgaaaatccgaaaaaatggtttatgaaagcgatttttacacgaccaggaggccctatcgtgccactccttccgtttcgtcttacactatttcgactccaagacattacgtggtgacggattacccagagcgtacccgcaaatctgcagagcaagtctattcttactcctattcttccgactcttctaatcgctccggttatggcgacccccgctctcgttcttacacttccaccgagagcgtctccagatcttccactggaggccctggcggttacaactatacttcggaacggaccagccgctccagaggcgacggtcctggaggttacagctccagctatagctctacttcatctggcccaggcacatacagacactactcctatcgtgtctaagacctcttgagtttctgcttgtaacctagttatattcttttaaaatcgggaatatccttagtgtttcaattaataaagaaaaacagtaaataaggttgtaaaagcaacttaaattttagaagatatttttactatactgtagtccttaaactaaaaactatactaatgctagtacaagattacatcaactggattgtttttttttttaatttctctatgtcgagtgttagttttacaagataacctcgccttacaattgtctagaaacattattgatacagggtgtacataattaggaaatataatatcgttattaaggatattcccgaaaatttcaatatggtttagattatatttagatatatatatatttacacatgcattaacaaaattgtgtttgatatatagtactttatactaattttggttgaaataagtattttaggtcaaattataaataaaataagagttaaaaaatactagaaatcaaattgtgaaaaatacatatcaaaaaccccttagcggcttcatataattcttgatttgaaaatataggtatattaatgaatattttatacaaatttatgataggtacaattggaaaaaataatatttttggatactggtaatttttttttaaatggtagagtgacgtaaacagaacatttcaaaatgttattagtgtccattttattattttttttacaattgtttgaaacaaaaatacctatcttattttgaccagaacaatattttaatcatatatagttatttaacttttactaacaaacacaccatattcgcactgattttagattattaatattagatgtttagtagttgttatattataatttttgaatctatataaaatttatttttcgaatgctataccataaaaaatattttcgacaatgtaatttttagaaactaatcttttatatatccattttattttatcgagaagattatatttgatataattattgtgatcaaccttacaatatactgtaaa

SEQ ID NO: 4221 - DNA, 1419 bp, Diabrotica virgifera
  SmartBlast Evalue=1E-100; Info=Chitinase n=1 Tax=Monochamus alternatus RepID=A4PID4_MONAT
ttattttacaaataactttctcaacgactgataagatcgagattttttctataaaaaaatcaaaatacccattttaagtcgtacttgattaataaatataaaaatgaaacttcaaatttatttaggatttgtttcgttaatatttctgtgggcgtattctactccagcaaatggatacaacgtagtgtgttacttctcgagttgggccatttatagaaacttttccggaaaatttgatgtttcggacatcgatcctcatctttgtactcacgtcaactttgcctttgtagaattgtatgaagatggttcattatatattgtagatccctgggaatccaatgataaaaataatggtggatattatgagggatttaaacaattaaaaaatctgaagaacgcaaatcctggactaaaaatattactcagcttgggaggatggaacgaaggttccaaaaatttctcgatagtggcggctgatcagtcaaaacgagaaaggttagctagagaatgcctagctttaattgaagaatacgattatgatggaatagacatcgactgggaatatcctacgttgagggaaggatcacatccgtctgataaggacaactttgtagaaatgttaaaagacttccaagctatcatgaaaccaaaaggtttattactaagtgcggctgtagctggagctgtagataaaattgaatctgcttatcatgtcgaagaagtagcaaagtatttggatatgataaatgtaatggcgtatgactaccatggggcatttgataatttagtgggacacgtatcgcctctgcatgcctcctctaaggattaccaacatggaagaaatgctacttacacagtagctactggtttagaatactggctatacaaaaacgcagatccttcaaaaatcaatcttgggcttccaacttacggaagaacttttactctggcagacagaaccaaaaccgaactatactcagaagtgcttggtccaggcgaaagaggactttacacgggaataagaggaagtttgggatatcacgaaatctgcgaattctattctggttccgactcaacttactactgggatgacgaacaaaaggtgcctcatagggtatgggaggatcaatgggctggatacgatgaccagagatcgatacaatataaagtggactttgctgtgagtcacaacctcgctggcgttttgatttggtctttggatacagacgacttccgaggagaatgtggtagaaaatatcctctctcgtatgctgctaaagaaaggctaatgtatcatgaaacaaaaaagaagaatgcaaaataatttcatatttttatatcgatttatgtaaaataggctcttgattatattacttttttggaatttacggaaataaagaaatattgaattacaatgtc

SEQ ID NO: 4222 - DNA, 1419 bp, Diabrotica virgifera
  SmartBlast Evalue=1E-100; Info=Chitinase n=1 Tax=Monochamus alternatus RepID=A4PID4_MONAT
ttattttacaaataactttctcaacgactgataagatcgagattttttctataaaaaaatcaaaatacccattttaagtcgtacttgattaataaatataaaaatgaaacttcaaatttatttaggatttgtttcgttaatatttctgtgggcgtattctactccagcaaatggatacaacgtagtgtgttacttctcgagttgggccatttatagaaacttttccggaaaatttgatgtttcggacatcgatcctcatctttgtactcacgtcaactttgcctttgtagaattgtatgaagatggttcattatatattgtagatccctgggaatccaatgataaaaataatggtggatattatgagggatttaaacaattaaaaaatctgaagaacgcaaatcctggactaaaaatattactcagcttgggaggatggaacgaaggttccaaaaatttctcgatagtggcggctgatcagtcaaaacgagaaaggttagctagagaatgcctagctttaattgaagaatacgattatgatggaatagacatcgactgggaatatcctacgttgagggaaggatcacatccgtctgataaggacaactttgtagaaatgttaaaagacttccaagctatcatgaaaccaaaaggtttattactaagtgcggctgtagctggagctgtagataaaattgaatctgcttatcatgtcgaagaagtagcaaagtatttggatatgataaatgtaatggcgtatgactaccatggggcatttgataatttagtgggacacgtatcgcctcttcatgcctcttctaaggattaccaacatggaaggaatgctacttacacagtagctactggtttagaatactggctatacaaaaacgcagatccttcaaaaatcaatcttggacttcctacttacggaagaacttttactctggcagacagaaccaaaaccgaactatactcagaagtacttggtccaggcgaaagaggactttacacgggaataagaggaagtttgggatatcacgaaatctgcgaattctattctggttccgactcaacttactactgggatgacgaacaaaaggtgcctcatagggtatgggaggatcaatgggctggatacgatgaccagagatcgatacaatataaagtggactttgctgtgagtcacaacctcgctggcgttttgatttggtctttggatacagacgacttccgaggagaatgtggtagaaaatatcctctctcgtatgctgctaaagaaaggctaatgtatcatgaaacaaaaaagaagaatgcaaaataatttcatatttttatatcgatttatgtaaaataggctcttgattatattacttttttggaatttacggaaataaagaaatattgaattacaatgtc

SEQ ID NO: 4223 - DNA, 1383 bp, Diabrotica virgifera
aaaagtattttatttaatgatatattaaatagataaatagggatacataacaaaaaattgtataggtacttaaataattagtttaatcaatcatctccaaggtggtctttttgtactagatcggctaccttcaggttcactttgtgacatttttctactccttgtagaagaaggaccacttggccgtttttgctgagaactgggcggcttattgctttcagatgggggtccatcactgaccgtagcgctagtagatggcgaagtagacttattggcgtcagatttcctaaatacttctctaaaactatcaagtatcccatgtttctttttgtgttctaccaacttgttatttttcataagattgtgtatatcttctacatgctcttttaattgttgctgatctttatggatcaccaagtggtgacctcgtaattcactaggtgtgaaataaaagtgtctggtaagagtagaaatgattattggagacgttaatgaaccgacacaactggcaagtgtaatgatgttttccttatctccatccgatttaatgttattacaaaactgtaatgtaaactgactgtcatcttcttcggtatctttgttgcaaattactaagatgtccgcttcagaaggagtatcgtacgctgagatagttaatgactggactgaaaacctccgagcgtcgcgttgtgtgggtggtgcataaacttttaaatcatatataaatatttttggtttattttttaacttaaaacagttaaaggaattaaactccagccaaatcttttgaatgcttatgtcattagatggtaacttagtgtgcaaaatcccttgatgttgtttaaccattccagaaaagtacataattaaaccagtagtatcatcgctgcaattttccttaattctgtttaaaatttcgaatatcttctcttgatcaaggttgtgcctatcctcatctttgcatgtaattcctatttcagataaagttttcagaaaatctttttcattatctttgtctgcttcagtgtctttgaaaaatgtgtgaactaagaattttggttgatttccgaaatgttcatattcatccggtataagttcggttgaaggatgtacctctatttcttcttcgtaagcagaactacgattacttctcgccattttaattaaaatacatcacaataacagagtaatatcaaataacttcgtaagttagaaacaatagaccgtcgtaacaaaaagtatttcgtcatttgatcgaaaatatctgaaaatcgcctatatttattagaaacagataagataatataattttgataaatttatctataagtatatctaatcagaaatctttggacaaccgttatttccactactatctgaccg

SEQ ID NO: 4224 - DNA, 1383 bp, Diabrotica virgifera
aaaagtattttatttaatgatatattaaatagataaatagggatacataacaaaaaattgtataggtacttaaataattagtttaatcaatcatctccaaggtggtctttttgtactagatcggctaccttcaggttcactttgtgacatttttctactccttgtagaagaaggaccacttggccgtttttgctgagaactgggcggcttattgctttcagatgggggtccatcactgaccgtagcgctagtagatggcgaagtagacttattggcgtcagatttcctaaatacttctctaaaactatcaagtatcccatgtttctttttgtgttctaccaacttgttatttttcataagattgtgtatatcttctacatgctcttttaattgttgctgatctttatggatcaccaagtggtgacctcgtaattcactaggtgtgaaataaaagtgtctggtaagagtagaaatgattattggagacgttaatgaaccgacacaactggcaagtgtaatgatgttttccttatctccatccgatttaatgttattacaaaactgtaatgtaaactgactgtcatcttcttcggtatctttgttgcaaattactaagatgtccgcttcagaaggagtatcgtacgctgagatagttaatgactggactgaaaacctccgagcgtcgcgttgtatgggtggtgcataaacgtttaaatcatatataaatatttttggtttattttttaacttaaaacagttaaaggaattaaactccagccaaatcttttgaatgcttatgtcattagatggtaacttagtgtgcaaaatcccttgatgttgtttaaccattccagaaaagtacataattaacccagtagtatcatcgctgcagttttccttaattctgtttaaaatttcgaatatcttctcttgatcaaggttgtgcctatcctcatctttgcatgtaattcctatttcagataaagttttcagaaaatctttttcattatctttgtctgcttcagtgtctttgaaaaatgtgtgaactaagaattttggttgatttccgaaatgttcatattcatccggtataagttcggttgaaggatgtacctctatttcttcttcgtaagcagaactacgattacttctcgccattttaattaaaatacatcacaataacagagtaatatcaaataacttcgtaagttagaaacaatagaccgtcgtaacaaaaagtatttcgtcatttgatcgaaaatatctgaaaatcgcctatatttattagaaacagataagataatataattttgataaatttatctataagtatatctaatcagaaatctttggacaaccgttatttccactactatctgaccg

SEQ ID NO: 4225 - DNA, 1318 bp, Diabrotica virgifera
  SmartBlast Evalue=5E-75; Info=Alcohol dehydrogenase [NADP+] n=1 Tax=Camponotus floridanus RepID=E2A7N6_9HYME
agtgaaacgaatataacaaaattcaacttcctgctggcttttaacgcaggaataatcagtttgtggtggtattttatgcaattctaattcaattcagttttagtttcagtcgttgtctgacatccaagggcggctgctgcagacagttccggtgaacaaatatcgaataccggcaagatttttttattgtggagatcatttataaataaaatatggctaaaacaatttcttgtggtggattgagtatgcccacggttggattgggcacatgggaagctagagacgacagcgagatagagacagccctagacgctgctttagaactaggctaccgccacatcgacacagctgccgcatacggaaatgaacacgtcatcggaaaagtcttgaaaaaatggttcgattctggcaaactgaccagagacgatctcttcattgtcaccaaactcccagctccaggtatacatcccgatagggttgaaaaatatctgacaaaatcgttggctgatctgcagttggattacctggatctttatcttatacactttcctgtcgggataaaagaaggagaaggggctccacagttcgaaaaagaagagcacaaggcattatggcagaacatggaaaaacaggttgatgctggccgaacaaagacgattggggtctccaatttcaacgtaaaacaaatcgataaatttttgaaattcgccagaatcaagccagcttgcaatcagatcgaacttcacgtgttcctacaacaaccagagctggttcagttctgccagaagaacaacgttgtagtgacggcatattcaccgcttggaaatcccggttacaacaaatttttgaaacgcgttggagcagaggagcgaacagatttagtcaatgtactcaccaacccagtcatcacagaaatagccaaaaaacacaacagaagtaatgcgcaggtcgctctaagattcttaatacagaaaaactgcgtcgtcattccgaaaagtgtcaaccctgcaaggataaagagcaactttgagctctacgattttagtctcgataatgcggatatgaagaaaattgaagctctagatattggagaagaagctcgaattgtggactggagggtttatgctaagattgatgagacaccagaatatccatttgcaagaaagtaataactcagcagatttatgtttgttaataaaagttttaatgatatactgttaacacgaattatacactcaagtaggtatatcaaagcataaatatgttctaaaatgcactgtgttccttataatataaataaaatatgaaacagtaaaaa

SEQ ID NO: 4226 - DNA, 1318 bp, Diabrotica virgifera
  SmartBlast Evalue=5E-75; Info=Alcohol dehydrogenase [NADP+] n=1 Tax=Camponotus floridanus RepID=E2A7N6_9HYME
agtgaaacgaatataacaaaattcaacttcctgctggcttttaacgcaggaataatcagtttgtggtggtattttatgcaattctaattcaattcagttttagtttcagtcgttgtctgacatccaagggcggctgctgcagacagttccggtgaacaaatatcgaataccggcaagatttttttattgtggagatcatttataaataaaatatggctaaaacaatttcttgtggtggattgagtatgcccacggttggattgggcacatgggaagctagagacgacagcgagatagagacagccctagacgctgctttagaactaggctaccgccacatcgacacagctgccgcatacggaaacgaacacgtcatcggaaaagtcttgaaaaagtggttcgattctggcaaactgaccagagacgatctctttattgtcaccaaactcccagctccaggtatacatcccgatagggttgaaaaatatctgacaaaatcgttggctgatctgcagttggattacctggatctttatcttatacactttcctgttgggataaaagaaggagaaggggctccacagttcgaaaaagaagagcacaaggcattatggcagaacatggaaaaacaggttgatgctggccgaacaaagaccattggggtctccaatttcaacgtaaaacaaatcgataagtttttgaaattcgccagaatcaagccagcttgcaatcagatcgaacttcacgtgttcctacaacaaccagagctggttcagttctgccagaagaacaacgttgtagtgacggcatattcaccgcttggaaatcccggttacaacaaatttttgaaacgcgttggagcagaggagcgaacagatttagtcaatgtactcaccaacccagtcatcacagaaatagccaaaaaacacaacagaagtaatgcgcaggtcgctctaagattcttaatacagaaaaactgcgtcgtcattccgaaaagtgtcaaccctgcaaggataaagagcaactttgagctctacgattttagtctcgataatgcggatatgaagaaaattgaagctctagatattggagaagaagctcgaattgtggactggagggtttatgctaagattgatgagacaccagaatatccatttgcaagaaagtaataactcagcagatttatgtttgttaataaaagttttaatgatatactgttaacacgaattatacactcaagtaggtatatcaaagcataaatatgttctaaaatgcactgtgttccttataatataaataaaatatgaaacagtaaaaa

SEQ ID NO: 4227 - DNA, 1292 bp, Diabrotica virgifera
tgtatatttactatattatacaacttcattccgtcagcataaattgataagtttatttaaaattattataaaaacaacgaaaccacaaaatgaatttaatacaaaaagcttaataatttgtactgcgttcagattttattcagattcagattcagcagaatcgtaatagtctttatactcagggatgatggcattgggatctacagtggtagttttaatttcttcttcactctcttcactctcaccttcttcctcatactcactgtcttctttttcagtggtagtttcaatagccacaggatttctttcgttagtattctctttattatcctcattatctttttcttccatatcattctccttggttgtgatctcgataacagtggttgtttcctcgctatcttcatcttctgaattgctttcttctgtagtggttggctcagttgtggtaggagtagtagcttcattagttgtagtttcggtttgagcatcagttgcagacgttatttctggttctaaagtagtagttcttttagttactgcagattgatcatctcttcttaattcctcgacgtactcatctgaagaaagctccttggagcaaattttatgcagaaaacaatcctgctgacaacataaatacccttgtggacattgtgcgtctatgtcgcatttatatgggtttgaaaaatggtacgagtatggccgtgagcaaggatatggccatttttgacagtgtctaggtgtcttctggttcttagacgaatcattgtcaggttggctggatcttctatgaataaaaggattcacagaagggccgttgccaattccataactgtgaatgtttccttgtgaacatattttatgtttaaaacatttctgcggacagcacttataattttggggacattgatcatcgatttcacattcaaattgaaatgttgcagatttgtcgaacggttccttgcagtggaagccactatcttggcaaactaagttggacctatctataaatgctctttttaatgttcttggaggacgaattattttgaatccctctggcaatttgtctagcgcaggatatgaaataacctggttagttttatcattatatagataataactgaagataacttgcaagcacgcaaagaagactagtttctggaacatactggtttactgagtaatacgaatttcactgcgagaaactttgacgaatttgctcactttgtgaccaaatgatatatatgggtgaatttacacacaatttaaagtaagccaatcagtttagt

SEQ ID NO: 4228 - DNA, 1295 bp, Diabrotica virgifera
tgtatatttactatattatacaacttcattccgtcagcataaattgataagtttatttaaaattattataaaaacaacgaaaccacaaaatgaatttaatacaaaaagcttaataatttgtactgcgttcagattttattcagattcagattcagcagaatcgtaatagtctttatactcagggatgatggcattgggatctacagtggtagttttaatttcttcttcactctcttcactctcaccttcttcctcatactcactgtcttctttttcagtggtagttccaatagcaacaggatttatttcgttgctattttctttgttatcctcgttctcttctttaatatcagtctccttggttgtggtcttctcgataatagtggttgtttcctcattttcttcatcttctgaattgctttcttctgtagtggttggctcagttgtggtaagagtagtagcttcctcagttgtagtttcggtttgtgcatcagttgtagacgtcatttctggttctaaagtagtagttcttttagttactgcagattgatcatcttttcttcttaattcctcgacgtactcatctgaagaaagctccttggaacaaattttatgcagaaaacaatcctgctgacaacataaatacccttgtggacactgtgcgtctatgtcgcatttatatgggtttgaaaactggtacgaatatggccgtgagcaaggatatggccatttttgacagtgtctaggtgtcttctggttgttagacaaatcattgtcaggttggctggatcttctaggaataaaaggattcacagaagggccgttgccaattccataactgtgaatgtttccttgtgaacatattttatgtgtaaaacatttctgcggacagcacttataattttggggacattgatcatcgatttcacattcaaattgaaatgttgcagatttgtcgaacggttccttgcagtggaagccactatcttgacaaactaagttggacctatctataaatgctctttttaatgttcttggaggacgaattattttgaatccctctggcaatttgtctagcgcaggatatgaaataacctggttagttttatcattatatagataataactgaagataacttgcaagcacgcaaagaagactagtttctggaacatactggtttactgagtaatacgaatttcactgcgagaaactttgacgaatttgctcactttgtgaccaaatgatatatatgggtgaatttacacacaatttaaagtaagccaatcagtttagt

SEQ ID NO: 4229 - DNA, 1293 bp, Diabrotica virgifera
  SmartBlast Evalue=3E-34; Info=Endonuclease-reverse transcriptase n=1 Tax=Bombyx mori RepID=D5LB38_BOMMO
cgttggcgaccaaatagctaatatacgctctggtgttcattggttgtaactccgttttgctgaaaaccataagttttgccttagcagtattaagttttagcccatattcatcacatgcttcggtcaccctgtttattagtcgttgtaagtcttcttcatcggaggcaatcaataccatgtcatctgcgtatctgagattgttgacattaatttcgttgatttttatgcctgcgtcttcatctaaggcttctttgaaaatgaattcggagtagatattaaaaagtagaggcgataaaatacattcttgcctcactccgcgtagcatttccactgctttcatcgtgttttaaccaattagtatgtttgcacattgatgccaatacaaatttttgataatacggaggtcttggtcatcaattctcacttgttgcagtacacatattagtttatcatgggtgactcggtcaaaggtcttttcgaaatcaataaaacacatgtaaaggaaacatccataaactgtgtcgtaaaaattttggaatttttaataccctccccccttccgtcgtaaagcgtcgtttacagttgacccccccatgccgacgtcgcaattgcaactcatgaccccctttttagagattttttaaaattcaatgtatttctggattttttaaagttagctactccaagtttatttacgaatgtatccaaatcagtattactatgtagctcattaatatccgcgtacttctttctctcaattcattgtacaactaataattagctttattgggacaaaagacaacacttttatcggagttcctgtgctgctttcttaactgcatcatgtaaatcttaatatttattttgttttgattccaatgccatttcttttattaagtataaatagatacaatgtactaactaaatagaatagaatattttatttctattcattcttgtagaattgtttcacacagagtattcagtaaataagtgaacagtttaatatttattgcttccagacgttgttctgaaaagaagcgtttgtgtaaagacatagaacaatgtttattgtttgttagtctgtagcaatattagcaactgctagcaattttattaaggctgtgtgataaaaacaaaatgaaaagtatgcgataaaaataatatactaattattttaattctaaaatattatatatttttatattcgtgaacttcaaacgacgtcggatgtgcactatggccccctcccccctgtcgaataccgtccccccataataagcaaagtccccc

SEQ ID NO: 4230 - DNA, 1267 bp, Diabrotica virgifera
  SmartBlast Evalue=3E-34; Info=Endonuclease-reverse transcriptase n=1 Tax=Bombyx mori RepID=D5LB38_BOMMO
cgttggcgaccaaatagctaatatacgctctggtgttcattggttgtaactccgttttgctgaaaaccataagttttgccttagcagtattaagttttagcccatattcatcacatgcttcggtcaccctgtttattagtcgttgtaagtcttcttcatcggaggcaatcaataccatgtcatctgcgtatctgagattgttgacattaatttcgttgatttttatgcctgcgtcttcatctaaggcttctttgaaaatgaattcggagtagatattaaaaagtagaggcgataaaatacattcttgcctcactccgcgtagcatttccactgctttcatcgtgttttaaccaattagtatgtttgcacattgatgccaatacaaatttttgataatacggaggtcttggtcatcaattctcacttgttgcagtacacatattagtttatcatgggtgactcggtcaaaggtcttttcgaaatcaataaaacacatgtaaaggaaacatccataaactgtgtcgtaaaaattttggaatttttaataccctccccccttccgtcgtaaagcgtcgtttacagttgacccccccatgccgacgtcgcaattgcaactcatgaccccctttttagagattttttaaaattcaatgtatttctggattttttaaagttagctactccaagtttatttacttactatgtagctcattaatatccgcgtactttttttctctcaatttactgtacaactaattagctttattgggacaaaagacaatacttttataggagttccgatatgctttcttaactgcatcatacaaatcttgatacttattttgttttgatttcaataccatttctttcattaagtataaatacaatgtactaactaaatagaatagaatattttatttctattcattcttgtagaattgtttcacacagagtattcagtaaataagtgaacagtttaatatttattgcttccagacgttgttctgaaaagaagcgtttgtgtaaagacatagaacaatgtttattgtttgttagtctgtagcaatattagcaactgctagcaattttattaaggctgtgtgataaaaacaaaatgaaaagtatgcgataaaaataatatactaattattttaattctaaaatattatatatttttatattcgtgaacttcaaacgacgtcggatgtgcactatggccccctcccccctgtcgaataccgtccccccataataagcaaagtccccc

SEQ ID NO: 4231 - DNA, 1222 bp, Diabrotica virgifera
  SmartBlast Evalue=2E-43; Info=Putative gut cathepsin L-like cysteine protease n=10 Tax=Callosobruchus maculatus RepID= Q717S1_CALMS
aaagaggttaaaaagacattgtttaaatatgaaaagaatagttgtaatcttgattttattctttgttgcagcaaattgtgagtatcaagaatgggaaaaatttaagacgaaatactccaaagtttacgcgacactagaagaagaaagccaaaggtttgcaatatttcaggaaaatttaaagttaatccaggaacataatgttaaatacgaaaaacatgaaacatcgtttaccatggaaattactagattttcagacaaatcatataaggagcttacaagaaggttcgaagaatttaacattgacaattttgatgacgctgaaaccacaacttctaacgatgtacttgaatcaacaacttctagatctcctattcctcattactgcaataacgaaagcatatatccttatcggcactttaaaaattttgaggacgatgatgatgttccagaatcagtcgatcttagattaaaaggatatgttttgccaccgagggatatgggtgatcttgaagagcattgggcattttcaatttcttcagctatggaaatagaaaccgcatggcacaatcttacctatgaatatttaagtacccaatttctaattgactgtactgaaagttatcaagaggcgtacaatcaaatgtactatgatggaatacccaatgaaatagattatccctttaaaaatggaaaaggtgaatgtaaaccaatctgcaaaggccgatgtcttaatcatcactatttatctagtgaagatttaattaaaaaaacaatagcactacttgctcccgtaaccgtctatttcgatggaggcgatctgccattttataaacaaggaataattgatggttcaaactgtccgcgcagctttattccacatccttcaacgtggagaaaaccttggagtgctgttatcataggttacggcaatgatggtagtgacggcagtggaactgattactggattttaaaaaactcttggggtgattcttggggagaagagggatactttaaattaatcagaggaaaagaggcttgtggcatgatgcggttgcctatatggccttcccttcaagaaccaaacggaagctgcgattaaaatttataagaatatagctggttcctaaaaaactgatacgactcttagtacgatttgatcattttgagcagtgtatttgattggtttgacattatattatatttgttatgacagacaaataat

SEQ ID NO: 4232 - DNA, 1221 bp, Diabrotica virgifera
  SmartBlast Evalue=2E-42; Info=Putative gut cathepsin L-like cysteine protease n=10 Tax=Callosobruchus maculatus RepID= Q717S1_CALMS
aagaggttaaaaagacattgtttaaatatgaaaagaatagttgtaatcttgattttattctttgttgcagcaaattgtgagtatcaagaatgggaaaaatttaagacgaaatactccaaagtttacgcgacactagaagaagaaagccaaaggtttgcaatatttcaggaaaatttaaagttaatcaaggaacataatgttaaacacgaaaaacatgaaacatcgtttaccatggaaattactagattttcagacaaatcatataaggagcttacaagaaggttcgaagaatttaacattgacaatttcgatgacgttgaatccacaacttctagcgatgtacttgaatcaacaactcctagatctcctattcctcattactgcaataacgaaagcatatatccttatcggcactttaaaaattttgaggacgatgatgatgttccagaatcagtcgatcttagattaaaaggatatgttttgccaccgagggatatgggtgatcttgaagagcattgggcattttcaatttcttcagctatggaaatagaaaccgcatggcacaatcttacctatgaatatttaagtacccaatttctaattgactgtactgaaagttatcaagaggcgtacaatcaaatgtactatgatggaatacccaatgaaatagattatccctttaaaaatggaaaaggtgaatgtaaaccaatctgcaaaggccgatgtcttaatcatcactatttatctagtgaagatttaattaaaaaaacaatagcactacttgctcccgtaaccgtctatttcgatggaggcgatctgccattttataaacaaggaataattgatggttcaaactgtccgcgcagctttattccacatccttcaacgtggagaaaaccttggagtgctgttatcataggttacggcaatgatggtagtgacggcagtggaactgattactggattttaaaaaactcttggggtgattcttggggagaagagggatactttaaattaatcagaggaaaagaggcttgtggcatgatgcggttgcctatatggccttcccttcaagaaccaaacggaagctgcgattaaaatttataagaatatagctggttcctaaaaaactgatacgactcttagtacgatttgatcattttgagcagtgtatttgattggtttgacattatattatatttgttatgacagacaaataat

SEQ ID NO: 4233 - DNA, 1238 bp, Diabrotica virgifera
  SmartBlast Evalue=1E-60; Info=Reverse transcriptase n=1 Tax= Anopheles gambiae RepID=Q868R6_ANOGA
gcagtagacgcagcgatctggattagagaacgcggcacaaataagtagaagaggtgggtggtacttgttctattggacattaaaaatgccttcaactcggcgaactggggcctcatcatcgacaggattgtcgagctgggggccccggattacatgtccaatataataaaggactacctatcggaaagaagcgtatgcataacgaagaaaaataagatgaatatgactgctggagtaccccaagggtcagtcctgggacccacattatggaacatattatacaatggggtactagaggtaaatagaacactaggagtaagggcaatagcatacgcagacgacctagccctactaatcgaggacgacacgaatcggggcatcatacataaagtaaacacagcaatggaaaaaaccgcgaaatggatagagaacaacgatttaaaattggcagtagaaaagactgagataattatcttgagaggacggcggaatcgaaaagacattaattttcggttcagagactccgaactaaaaccccagaaaacagttaagtatttgggaataatcttcgacgacagaaggtcattcggcccacatatacaggaagcatgtgggaaagcggaggcaatgacctcagccctacaaaaattaatgccgaatataggaggccctggatcacacaaacgggcagtaatgctacaatccattatgtcaataatattatacggggctccagtatggcatgaagttgtaaataaagccaaatacagagacatgcttctcagagcacaaagaaaacccctgatcagagtgtgcagcgcgtacagaaccgtatcaaccgttgctctacaggtagtggccggagctgtgccggtgcacattctgacagaggagagggtacgaatgcatcgaaggggtaacggagctataagttcaggaccagaagaaagaagaagcctggaaagttggcaggatcagtgatcaagagaaacaggcaaagccgcctggacgaggacccttatccctgatgtagtaaggtggtatgaatgcagacacaggcgcgttaactattatttcacacaatttttgacggggcatggatccattcggtcatatgcatatagtataagaaataccgaggacgatctgtgtaccgagtgtggagtggtggatgacgcgcaccacgtgatattcgtatgccctgtatatcatgcagggcgaacctcgcagctgagaat

SEQ ID NO: 4234 - DNA, 1176 bp, Diabrotica virgifera
  SmartBlast Evalue=7E-53; Info=Endonuclease/reverse transcriptase n=1 Tax=Drosophila melanogaster RepID=Q9N9Z1_DROME
gcagtagacgcagcgatctggattagagaacgcggcacaaataagtagaagaggtgggtggtacttgttctattggacattaaaaatgccttcaactcggcgaactggggcctcatcatcgacaggattgtcgagctgggggccccggattacatgtccaatataataaaggactacctatcggaaagaagcgtatgcataacgaagaaaaataagatgaatatgactgctggagtaccccaagggtcagtcctgggacccacattatggaacatattatacaatggggtactagaggtaaatagaacactaggagtaagggcaatagcatacgcagacgacctagccctactaatcgaggacgacacgaatcggggcatcatacataaagtaaacacagcaatggaaaaaaccgcgaaatggatagagaacaacgatttaaaattggcagtagaaaagactgagataattatcttgagaggacggcggaatcgaaaagacattaattttcggttcagagactccgaactaaaaccccagaaaacagttaagtatttgggaataatcttcgacgacagaaggtcattcggcccacatatacaggaagcatgtgggaaagcggaggcaatgacctcagccctacaaaaattaatgccgaatataggaggccctggatcacacaaacgggcagtaatgctacaatccataatattataccgggccccagtgtggcatgaggtcgtaaataaagccaaatacagagccatgcttctcagagcgcaaagaaaacccctgatcagagtgtgcagcgcgtacagaaccgacagaggagagggtacgaatgcatcgaagggctaacggagctataagttcaggaccagaagaaagaagaagcctggaaagttggcaggatcagtgatcaagagaaacaggcaaagccgcctggacgaggacccttatccctgatgtagtaaggtggtatgaatgcagacacaggcgcgttaactattatttcacacaatttttgacggggcatggatccattcggtcatatgcatatagtataagaaataccgaggacgatctgtgtaccgagtgtggagtggtggatgacgcgcaccacgtgatattcgtatgccctgtatatcatgcagggcgaacctcgcagctgagaat

SEQ ID NO: 4235 - DNA, 1200 bp, Diabrotica virgifera
  SmartBlast Evalue=2E-37; Info=Chymotrypsin-like proteinase 6D n= 2 Tax=Tribolium castaneum RepID=D0R8R5_TRICA
tgcggacaaagtacacacacattctttttattgtactttacatgatctgataattcttgttgttatcattaccttaattaacatagtaaatttcactcagtttgaactgtatataaaaaaagaattagtagatatttagagttttataattagaaatatggtgggacttaaggtttttgttttatttgcgctattagcaacaacctatggatttcatcaaataaaatttagaaatactcgcaatggcttaggtttggatggtgctacagaggctacagatggacaattcccttgggtagtttcacttcaatccagttatgagcgcattaatacacatgtttgtggaggtgtcatcttaactgaaaattgggttcttacatctgccgaatgtgaaggtgctgttaaggtagtggccggtgctgttaaaccgcgtttagccgatcctaataaacagactgttgatgttgaaagatgggtggttcatccagactataactcacaaatagttgggcccaacgatatcgctttagttaaactaaagcaaccattgaaatttaccgatgccgttaaagctgctaatttgcccgagcaaggagctgcagttactggattagctgatgttgttggatacggcaacagcgcaagacctgatttcaacaatttgacctacatatcggacttgccccttataagctacgacgattgcaatcaagctcttgaagatgtattgcaagaaaagagttctttggacgaaaagagcaacatttgcgcaggtgtattggcaaatggagctaataactgcgatggagataccggtagccctcttacccaagataattttgtcattggtatcaccagttggtttatctctccttgtcagggcatgggagcccctaatgtattcaccaatgtagccaactttgttgactggatcaatgaaaacatttcacaatagaattgaataatttttttaaaatatatattaaatttattattttttaaatcttaaatgggttattatttttatttattattttaccgtggtagtgtcctggttgagcactacaaaaatgtataaaactagttacattatctaagacacatctgataaaaatattagaaagtgaattgggaaagtagcaaggaagcctctgtaaaccatacattagatgttcatagtgaaatatatgttatttaaat

SEQ ID NO: 4236 - DNA, 1200 bp, Diabrotica virgifera
  SmartBlast Evalue=3E-37; Info=Chymotrypsin-like proteinase 6D n= 2 Tax=Tribolium castaneum RepID=D0R8R5_TRICA
tgcggacaaagtacacacacattctttttattgtactttacatgatctgataattcttgttgttatcattaccttaattaacatagtaaatttcactcagtttgaactgtatataaaaaaagaattagtagatatttagagttttataattagaaatatggtgggacttaaggtttttgttttatttgcgctattagcaacaacctatggatttcatcaaataaaatttagaaatactcgcaatggcttaggtttggatggtgctacagaggctacagatggacaattcccttgggtagtttcacttcaatccagttattcgcgtattaatacacatgtttgtggaggtgtcatcttaactgaaaattgggttcttacatctgccgaatgtgaaggtgctgttaaggtagtggccggtgctgttaaaccgcgtttagccgatcctaataaacagattgttgatgttgaaagatgggtggttcatccagactataactcacaaatagttgggcccaacgatatcgctttagttaaactaaagcaaccattgaaatttaccgatgccgttaaagctgctaatttgcccgagcaaggagctgcagttactggattagctgatgttgttggatacggcaacagcgcaagacctgatttcaacaatttgacctacatatcggacttgccccttataagctacgacgattgcaatcaagctcttgaagatgtattgcaagaaaagagttctttggacgaaaagagcaacatttgcgcaggtgtattggcaaatggagctaataactgcgatggagataccggtagccctcttacccaagataattttgtcattggtatcaccagttggtttatctctccttgtcagggcatgggagcccctaatgtattcaccaatgtagccaactttgttgactggatcaatgaaaacatttcacaatagaattgaataatttttttaaaatatatattaaatttattattttttaaatcttaaatgggttattatttttatttattattttaccgtggtagtgtcctggttgagcactacaaaaatgtataaaactagttacattatctaagacacatctgataaaaatattagaaagtgaattgggaaagtagcaaggaagcctctgtaaaccatacattagatgttcatagtgaaatatatgttatttaaat

SEQ ID NO: 4237 - DNA, 1189 bp, Diabrotica virgifera
  SmartBlast Evalue=2E-96; Info="Aldose reductase, putative n=1 Tax=Pediculus humanus corporis RepID=E0VNI1_PEDHC"
agataataattcgtatattacgtactgtttacttttgaaaaacaatatactgatattaatttcatatagatactagtcttgtaattatataaataaaagcgtgttgaataaattatatagttatgataaaaaattagaaagaagaagatttactcctgcaatgtaaatggatactcaggattatcttttaattcttcagcatggcagactctaacgttacagttaaagtcatcaataacagccatttcttcatctgttaaactaaagtcaaaaatatcaatattttgcttaagtctgccggcattagatgatttggggataggtatggtgccgtgttgatagacatatcgcaaaacaacttgagcactactctttttgtatttttcgccaatttgaaccaatctaggatcttgcaaagacagcattttatcgcctggtttagcccacggtctcgcaggggaacctagtggtgagtatgccaatatttgtattccacgactcttgcaaaactgaataagctttttttgattaagaaatggagtaacctctatttcattcataactggttttatggtacatacatctaatattctctgcacttgctttgaattaaaatttgacaaaccgatgctcttgaccaaaccaagtcggacacattcttccatacctttccaggtcttacagaaatcatattctatattttgagaatctttaaatgggagttgaatgttgaaatctttgttcttagttgcacaaggccagtgaatcaaatacaaatcaacataatcaagcccaaaattttttaaagattctttgcatgctggaactactttttcttcttcgtgaaaaatattccataattttgtaacgacaaacagttcttctcttttgacagttttatcttgaatttttgctcttaaaccttcgcctatttctttttcgttcccgtaaagccatgcgcaatcgaacagtcgataaccaaggtcaattgcggttttcacagtttctttaacttctccaggagccgccaaccatgtaccgaggccaaagcttggacagtgggctccattgtttagagttatattaggtactgacattttatttatcctttatatggaggcaagcgccaacttgtatatatgtaacaaaaggacttaaaactgcccacaggtgaatatgtgattcagac

SEQ ID NO: 4238 - DNA, 1189 bp, Diabrotica virgifera
  SmartBlast Evalue=3E-96; Info="Aldose reductase, putative n=1 Tax=Pediculus humanus corporis RepID=E0VNI1_PEDHC"
agataataattcgtatattacgtactgtttacttttgaaaaacaatatactgatattaatttcatatagatactagtcttgtaattatataaataaaagcgtgttgaataaattatatagttatgataaaaaattagaaagaagaagatttactcctgcaatgtaaatggatactcaggattatcttttaattcttcagcatggcagactctaacgttacagttaaagtcatcaataacagccatttcttcatctgttaaactaaagtcaaaaatatcaatattttgcttaagtctgccggcattagatgatttggggataggtatggtgccgtgttgatagacatatcgcaaaacaacttgagcactactctttttgtatttttcgccaatttgaaccaatctaggatcttgcaaagacagcattttatcgcctggtttagcccacggtctcgcaggggaacctagtggtgagtatgccagtatttgtattccacgactcttgcaaaactgaataagctttttttgattaagaaatggagtaacctctatttcattcataactggtttcatggtacatacatctagtattctctgcacttgctttgaattaaaatttgacaaaccgatgctcttgaccaaaccaagtcggacacattcttccatacctttccaggtcttacagaaatcatattctatattttgagaatctttaaatgggagttgaatgttaaaatctttgttcttagttgcacaaggccagtgaatcaaatacaaatcaacataatcaagcccaaaattttttaaagattctttgcatgctggaactactttttcttcttcgtgaaaaatattccataattttgtaacgacaaacaattcttctcttttgacagttttatcttgaatttttgctcttaaaccttcgcctatttctttttcgttcccgtaaagccatgcgcaatcgaacagtcgataaccaaggtcaattgcggttttcacagtttctttaacttctccaggagccgccaaccatgtaccgaggccaaagcttggacaatgggctccattgtttagagttatattaggtactgacattttatttatcctttatatggaggcaagcgccaacttgtatatatgtaacaaaaggacttaaaactgcccacaggtgaatatgtgattcagac

SEQ ID NO: 4239 - DNA, 1133 bp, Diabrotica virgifera
  SmartBlast Evalue=2E-50; Info=Pancreatic triacylglycerol lipase n=1 Tax=Camponotus floridanus RepID=E1ZYV2_9HYME
caagaagtaaaagaataatttaattctatacaaaatatacattaaatcacattaatttttagcatatggtggcttcctattggtttggaggaaatatgatccctgtgcccctttgtcaactttatattgccccatatatgaaattggcgaatcgttgcactttcctttagtgaagtcgtcatacgagccgcattttctggccttgaagttacccgttaatatcgattcaatatagaacttaatggataagaaatgggcacaattaccgagcacgtccatttcgcagccaggttggtggttctttccaccatttgggtaataatccgcatcacctaagctattcaaatatcctataagaccaccacaagtgtgaataacgtggacaaattgtgcactcccgggcgtaagacggtttctggtgttttctgttgtgaatgatggaccagctggatccaaacccataatgtgatccaattttccattgagaattctaccagctacaccagccacgtgagctcccaaggagtgtccaacgataatcattctgcttaagtttgctccagtattttgaacaaggtgttctattgaatgtccaagtacatttccaattggttctacattgtcgtaggctattttataaattatactatctgcgaacgtactccaatcgacaacaagcatgttaacgtcatattttgacagataggcattttttaaacttatcagagtttcggaggagatgttgtccagccatccatgaatatagaacaccgtgtctttgtctttcgagaaatcagatctattgatttcgcctttgtcggaaatatttagatgtgtaccatgaagtaggtctttttgggtaaacaaatagaatttgatgtctgcttctgtagctctaagcgaagcatgttctgaggaaataatggtaataaaaatgaaaaataaaaaacctttaatcactttcatcatctcgctacttgaatttgtaaaaaataaaaatcggattaaagcaaatgtcacagttttttattatatattctttgataagttatctatatatgacatgtctagatcttacaaatgaaaattgtgagttgtcagaataaatattaataattttcaatagattgttg

SEQ ID NO: 4240 - DNA, 1133 bp, Diabrotica virgifera
  SmartBlast Evalue=2E-50; Info=Pancreatic triacylglycerol lipase n=1 Tax=Camponotus floridanus RepID=E1ZYV2_9HYME
caagaagtaaaagaataatttaattctatacaaaatatacattaaatcacattaatttttagcatatggtggcttcctattggtttggaggaaatatgatccctgtgcccctttgtcaactttatattgccccatatatgaaattggcgaatcgttgcactttcctttagtgaagtcgtcatacgagccgcattttctggccttgaagttacccgttaatatcgattcaatatagaacttaatggataagaaatgggcacaattaccgagcacgtccatttcgcagccaggttggtggttctttccaccatttgggtaataatccgcatcacctaagctattcaaatatcctataagaccaccacaagtgtgaataacgtggacaaattgtgcactcccgggcgtaagacggtttctggtgttttctgttgtgaatgatggaccagctggatccaaacccataatgtgatccaattttccattgagaattctaccagctacaccagccacgtgagctcccaaggagtgtccaacgataatcattttgcttaagtttgctccagtattttgaacaaggtgttctattgaatgtccaagtatatttccaattggttctacattgtcgtaggctattttataaattatactatctgcgaacgtactccaatcgacaacaagcatgttaacgtcatattttgacagataggcattttttaaacttatcagagtctcggaggagatgttgtccagccatccatgaatatagaacaccgtgtctttgtctttcgagaaatcagatctattgatttcgcctttgtcggaaatgtttagatgtgtaccatgaagtaggtctttttgggtaaacaagtagaatttgatgtctgcttctgtagctctaagcgaagcatgttctgaggaaataatggtaataaaaatgaaaaataaaaaacctttaatcactttcatcatctcgctacttgaatttgtaaaaaataaaaatcggattaaagcaaatgtcacagttttttattatatattctttgataagttatctatatatgacatgtctagatcttacaaatgaaaattgtgagttgtcagaataaatattaataattttcaatagattgttg

SEQ ID NO: 4241 - DNA, 1640 bp, Diabrotica virgifera
  SmartBlast Evalue=1E-114; Info=Lactase-phlorizin hydrolase n=1 Tax=Culex quinquefasciatus RepID=B0WNN6_CULQU
gtaatataataatttatttattaaaaactatcaattatctacacaagaatctaccaaacatttagttttaatcacatttgcgtagtatttcgaagaatccttagctattcttggcagtgaagggtcagattggtttacatagtagatgcccagtttgccattaaatccttgggtccattcgaagttatctatgatactccatagagtatatgccgtaacgtttactccgtcatgaattgcatctaacatgtgactcatgtatgcctgaataaacttaattctatgctcatcttgtaatgttccacttctatcagacacaccgttttcactaataacaatttcaatatctccgtaagtcttttttatccatctaagtaattttccaaaaccccatggtacttttttaaaccaaccaattgctgcagtttcccatgtagatttttgatacgcatcaactccagcgtcatcatcccaactaacaattaaagttggttcagctcgagctttgaccatcaatgatgtatagtggttaacagctaaataatcatatgttcctttaattagctcaatttcctcttcagagaaagctggcaaacgagattccttaaatccttgttttttactaaaatctgcaacgttgtcgatcataatttgtggccagtttccgtatacaattggattagcatacatgccgtacacaaattgacgtttatgttcagctgcagtttcatcagcttcactctcggtttctggttcgtaccaatcggaatcaataacaattgtaattctggattttaattgttgtctgtatgaacggtcatacaatctccaggttttagcgtgagccaacaagacgtgtctagcacaaacgtactctccaattcctggagaaactactcccggagcgtatccccctactccgtatccggcgtgacagatctgtttaggttcgttaattgttacccaactatcgacgtattctccaaaagttttgaaacaaaactctgcgtaatcttggaaccagtcaacaacttttggatttctccaacctccttgtttctcaagagctgttggtatatcccaatggtacaaggtaacaaaagattttattcccttggcacgcagttccttaaataaatttacataatacttaacacctcttggctaatattgtcaagggttccgtcaggtaagattctggaccaagctattgaaaatctatagtagtccacaccaacttcttccatacaacgaacatcttctttataaagatggtaagaatcagtagcgacatcaccgttagttccatcatctacgcggtcaggatgttcgtggaagaaagtatcccagacctgttctccttttccatccaaattccaagctccttcaatctggtaagcagccgtggcaacaccaaaagtaaaaccttttggaaatttgcggttggttattgtgtagttagcaaattcatcgtctccatctgcagctccaagagccaacacgctcaaaaacactaaaaagcagccaactaacttcatttttctcagaagcttgatgccgactgagacaaatttgaaaccagtgtatttaatataaataaattaaaatttcttaatcttgccttgagagaaatctcaagt

SEQ ID NO: 4242 - DNA, 605 bp, Diabrotica virgifera
  SmartBlast Evalue=3E-44; Info=Beta-glucosidase (Fragment) n=1 Tax=Tenebrio molitor RepID=Q9GSE6_TENMO
gttagtcaagaaggtgttaactattatgtaaatctatttaaagaactgcgtgccaaaggaataaaatcatttgttaccttgtaccattgggatataccaacagctcttgagaaacagggaggttggcgaaatccaaaagttgttgactggttccaagactacgcagagctttgttttaaaacttttggagaatacgtcgatagttgggtaacaattaacgaacctaaacagatctgtcactctggatacggaaatggaggatacgctccgggagtagtttctccaggagttggagaatacgtttgtgctagacacgtcttattggctcacgctaaagcctggagattatacgatgtttcatacagacaacaattaaaatccagaattacaattgttattgattccgattggtacgaaccagaaactgagagcgaagctgatgaaactgcagctgagcataaacgtcaatttgtgtacggcatgtatgctaatccaattgtatacggaaactggccacaaattatgatcgacaacgttgccgagtttagtaagaaacaaggatttaaggaatctcgtttgccagctttctctgatgaggaaattga

SEQ ID NO: 4243 - DNA, 1115 bp, Diabrotica virgifera
  SmartBlast Evalue=1E-126; Info="Fructose-1,6-bisphosphatase, isoform B n=13 Tax=Drosophila RepID=Q7KT33_DROME"
ttaatttacctatatagttgaagtagagtagatagtaagtaagtgaatgtacgttgtgaatgacggaagccggtttgttacagagaggaggatggagtccaacacgataacgttgacgagatttttcttggcggaacaacaaaaatttccagaagccacaggtgaattgacccagctgctgacttctattcaaacagctgttaaggttatcagtagcgccgttagaagagctggtattaccaaattgtttggtaccgtaggtgaaacaaatgtacagggagaagaagttaaaaagttggacgtattggccaacgaattatttatcaatatgcttaagtcatcttatacagtagcattgcttatatctgaagaaaatgaaacaattttggaggtagagactgaacaccgaggaaagtatatagtagccttcgatccattagatggttcctcgaatatcgactgtctggtatcgataggttcaattttcgccatttacagaaaatccgacaacacagttccagccctcgatgacacactaatgtccggaaggaatgtagtagcagccggatatgcgctttatggcagtgcaactatgctggtcatatcttctggatctggtgtgcatggtttcatgctggatgccaccataggagaatttgttttgactgaacacaacatgcggattccgaaaaaaggaaaaatctactctataaacgaagggtactaccacgaatgggatgatgccataagagaatacgtcgatgccaagaaagatccttctaaggggaaagcctatggtgccaggtacgtaggttctatggtcgcagatgttcacagaactattaaatatggaggaatctttttataccctgcaacgaagtcttcccctaagggcaagcttagactgatgtacgaatgtgttccgatggcctttttgctcgaccaagcaggaggattagctactgatggcaagattaatatattagatatcaaacctactaaccaccatcagagaagtcctatttttctggggtctatagaagatgtagaggaggttcaaagttatatcaataaacattgtgaatgtaaaaaataggttaagagatttgtttcaa

SEQ ID NO: 4244 - DNA, 1115 bp, Diabrotica virgifera
  SmartBlast Evalue=1E-126; Info="Fructose-1,6-bisphosphatase, isoform B n=13 Tax=Drosophila RepID=Q7KT33_DROME"
ttaatttacctatatagttgaagtagagtagatagtaagtaagtgaatgtacgttgtgaatgacggaagccggtttgttacagagaggaggatggagtccaacacgataacgttgacgagatttttcttggcggaacaacaaaaatttccagaagccacaggtgaattgacccagctgctgacttctattcaaacagctgttaaggttatcagtagcgccgttagaagagctggtattaccaaattgtttggtaccgtaggtgaaacaaatgtacagggagaagaagttaaaaagttggacgtattggccaacgaattatttatcaatatgcttaagtcatcttatacagtagcattgcttatatctgaagaaaatgaaacaattttggaggtagagactgaacaccgaggaaagtatatagtagccttcgatccattagatggttcctcgaatatcgactgtctggtatccataggttcaatttttgccatttatagaaaacccgacaacacagtaccagccctggatgacacactaatgtccggaaggaatgtagtcgcagctggatacgccctttacggcagtgcgaccatgctggtcatatcttctggatctggcgtgcatggtttcatgctggacgcaaccataggagaatttgttttgactgaacacaacatgcggattccgaaaaaaggaaaaatctactctataaacgaagggtactaccacgaatgggatgatgccataagagaatacgtcgatgccaagaaagatccttctaaggggaaagcctatggtgccaggtacgtaggttctatggtcgcagatgttcacagaactattaaatatggaggaatctttttataccctgcaacgaagtcttcccctaagggcaagcttagactgatgtacgaatgtgttccgatggcctttttgctcgaccaagcaggaggattagctactgatggcaagattaatatattagatatcaaacctactaaccaccatcagagaagtcctatttttctggggtctatagaagatgtagaggaggttcaaagttatatcaataaacattgtgaatgtaaaaaataggttaagagatttgtttcaa

SEQ ID NO: 4245 - DNA, 1106 bp, Diabrotica virgifera
  SmartBlast Evalue=1E-106; Info=Alcohol dehydrogenase n=1 Tax= Aedes aegypti RepID=Q16M07_AEDAE
aaggtaaaataaatgcaaatataaaaaatttattaaacttttacaattgcttttcctgtgttttctccttttaacattccagtaaaagctttgaacatattttcgaatccctcagtgatggtctcatggtatttgatcttaccctgtttgatccattccaggttctgattaataccttccatccatctgtcatgccatctgctaacgttgaatccttccattttgagttgtttatttgtaaatcctcgttggagcataggagcaagtggtgtttcagtatcgttgtaacttgaaattgatccacatactgatattctaccgtagaggttcatttgttgtataactgcggaactaagtactccgccaacattgtcaaaataacagtctacgcccttgggtgcagcattttttagttcttccgctacatttgccgttttgtaattgataaaatggtcaaatccaagttcctccgtcaaccattttcctttttcgtctgatcctgcaatgcctataactgtgcatcctttaatttttgcaatttgaccaacatggctgccaacagctccggcagctcctgaaactacaacagtctcacctggttttggttgacatatctcaagaaatccaaaatatgctgtgtttcctggcattcctagtactccaagacaaagtgaaggaggcaacccttcaagatctggaaccaagcgaagtcgttcgtcattggaaactgtatgagtttgccatccaaaggtaccaacaacgtatttacctggagggtactttgcatttttgctctctaatattttagcaacttgagttcccatcatggttttcccaaccacagacatttcagatatgtaggctctcatgtatgggtcgacgctgagatagacagcttctgttaaaaactctccatattttattgatggcaactcatattcctccattttgaagtcatcttcttttggaaatccttcgaagaccttgtttaacacgaacctcttacctttgaccatgtttagaaactcggttaaatttttaagtagtactacttctacggcagattttttatattttttatttcttataatgatgatatgtatatg

SEQ ID NO: 4246 - DNA, 1106 bp, Diabrotica virgifera
  SmartBlast Evalue=1E-107; Info=Alcohol dehydrogenase n=1 Tax= Aedes aegypti RepID=Q16M07_AEDAE
aaggtaaaataaatgcaaatataaaaaatttattaaacttttacaattgcttttcctgtgttttctccttttaacattccagtaaaagctttgaacatattttcgaatccctcagtgatggtctcatggtatttgatcttaccctgtttgatccattccaggttctgattaataccttccatccatctgtcatgccatctgctaacgttgaatccttccattttgagttgtttatttgtaaatcctcgttggagcataggagcaagtggtgtttcagtatcgttgtaacttgaaattgatccacatactgatattctaccgtagaggttcatttgttgtataactgcggaactaagtactccgccaacattgtcaaaataacagtctacgcccttgggtgcagcattttttagttcttccgctacatttgccgttttgtaattgataaaatggtcaaatccaagttcctccgtcaaccattttcctttttcgtctgatcctgcaatgcctataactgtgcatcctttaatttttgcaatttgaccaacatggctgccaacagctccggcagctcctgaaactacaacagtctcacctggttttggttgacatatctcaagaaatccaaaatatgctgtgtttcctggcattcctagtactccaagacaaagtgaaggaggcaacccttcaagatctggaaccaagcgaagtcgttcgtcattggaaactgtatgagtttgccatccaaaggtaccaacaacgtatttacctggaggatactttgcatttttgctctctattatttgagcaacttgagttcccatcatagttttcccaaccacagacatttcagatatgtaggctctcatgtatgggtcgacgctgaggtagacagcttctgttaaaaactctccatcttttattgatggcaactcatattcctccattttgaagtcatcttcttttggaaatccttcgaagaccttgtttaacacgaacctcttacctttgaccatgtttagaaactcggttaaatttttaagtagtactacttctacggcagattttttatattttttatttcttataatgatgatatgtatatg

SEQ ID NO: 4247 - DNA, 1094 bp, Diabrotica virgifera
  SmartBlast Evalue=8E-67; Info=Glutathione peroxidase n=1 Tax= Bombyx mori RepID=Q4H1F9_BOMMO
aaaaatacctttattggtgcaaaattgattaacaattattgtaagaaataaaatactagaaagcgaatacagtcaaatctaaagctatacctacagaattttgaaaacaaaagcattaaaatgaaacaaataaaaaagacattgaataggtatataaacgattttttaacagtttttagcataaataaaattgtaggtatcacttataaatattttttagattacatgacttagataaaaagcaaatatacaagtaacattatttaccaatatttttcaagtgacttcactaaatctttgggattcgtacttggtccatgtctctcaactggttgcccatttttgtcaacaatgaacttggtaaaattccacttgataaagtctccaagggtgcctccttgtttgtatttcagataattccatagaggatgagagtcatcaccattaacattgattttttgaaacacatcaaactttacgtttttgttttgcacgaactggcagatggtggcgttatctcctggttcttcattcgcaaactgattacacggaaacgcaagtatcttcagccctttggattcgccatattcatcaaacaaatcatttaattctgcatagttattttttgtgtaaccacattgggaggctacattcactattatgcagacatgtcctttgtatttttctaaagagaccacttcacctttgatatcttttgcactgaaatcgtaaatggaggaggcttctttgtagttctccggatttgacatctttggattgtttgatataagagccaaactacgaaaggctacagctgctttgcagacggttctataactgagaattaacatttgtatttcttattaaatattgatttaatgattaagtatgattcccgggagtaatttgaaactaaattataggttatgttatgccctaagtaggggttgttatcctgctttgtactgtgggttgttacttgtttgtagacagaataatttatgtgtatttatctttctttgttcaacatttttatttttaaacttaatcagctgacctatgccgctgtgttgccattgttaagcctcgccgcc

SEQ ID NO: 4248 - DNA, 1068 bp, Diabrotica virgifera
  SmartBlast Evalue=8E-67; Info=Glutathione peroxidase n=1 Tax= Bombyx mori RepID=Q4H1F9_BOMMO
aaaaatacctttattggtgcaaaattgattaacaattattgtaagaaataaaatactagaaagcgaatacagtcaaatctaaagctatacctacagaattttgaaaacaaaagcattaaaatgaaacaaataaaaaagacattgaataggtatataaacgattttttaacagtttttagcataaataaaattgtaggtatcacttataaatattttttagattacatgacttagataaaaagcaaatatacaagtaacattatttaccaatatttttcaagtgacttcactaaatctttgggattcgtacttggtccatgtctctcaactggttgcccatttttgtcaacaatgaacttggtaaaattccacttgataaagtctccaagggtgcctccttgtttgtatttcagataattccatagaggatgagagtcatcaccattaacattgattttttgaaacacatcaaactttacgtttttgttttgcacgaactggcagatggtggcgttatctcctggttcttcattcgcaaactgattacacggaaacgcaagtatcttcagccctttggattcgccatattcatcaaacaaatcatttaattctgcatagttattttttgtgtaaccacattgggaggctacattcactattatgcagacatgtcctttgtatttttctaaagagaccacttcacctttgatatcttttgcactgaaatcgtaaatggaggaggcttctttgtagttctccggatttgacatctttggattgtttgatataagagccaaactacgaaaggctacagctgctttgcagacggttctataactgagaattaacatttgtatttcttattaaatattgatttaatgattaagtatgattcccgggagtaatttgaaactaaattataggttatgttatgccctaagttggggttgtttgtagacagaataatttatgtgtatttatctttctttttctttgttcaacatttttatttttaaacttaatcagctgacctatgccgctgtgttgccattgttaagcctcgccgcc

SEQ ID NO: 4249 - DNA, 1071 bp, Diabrotica virgifera
  SmartBlast Evalue=7E-98; Info="CG6543, isoform A n=6 Tax= melanogaster group RepID=Q7JR58_DROME"
agcatcttataaaaatttaataaaaatatatataatacatttcttcaaaaaatgatcaacaagtagaaaattatataaattattcatgagtaaagttggcctttctcttttcaataaatgcagccattccttctttttggtccttagtagcgaacagggcgtggaacattctcttctcaaagtgcaaaccttccttcaacgtggtctccaaagctgtattcacactttctttagcgatgatattggcgatctgtgagtttcctgctattttttcggcaagctttacagtttcagtcaaaagttcggcggctggtacaaccttgctaaccagacccattttttcagcatcttgggctgttacctggttaccagataaaactatctccattgccttagatttgccaacggttcgggtaagcctttgggtgccaccagcaccaggaatgacaccaagaagaatttcgggctgtccaaacttagctttatccccagcgtaaatgatgtcgcacatcatggccaactcacaaccaccaccaagagcgtatccatttactgcagcaagaagaggcttcttcatgttagcgataagctgccaagcaccaataaaatcttcagtgacacattttgcaaaggtattggataccatctccttaatatcagctccagccgcaaaagctttttcgtttccggttatgactacagcccccacggatttgtcggtgtcaaaggagttcaaagcttcagatacttcggatatcaacccattgcagagggcgttgagtgctttgggtctgttgagttgaatcagtccaacattttgcttttctccagtcttggaaactttaataaactcgtagttttcttttgttgcagctacactaaataacctaacattttttgccacttgtccatatttgaaagaattattgccaaaaactttagcagcgacaatacgactcacagttgcggcactcatttttttgtgatattgttgaattcaatagagacaaaaataaaatgaaaatggactttgaaaaccggttaatagaatccaaatctgtttaaattgag

SEQ ID NO: 4250 - DNA, 1076 bp, Diabrotica virgifera
  SmartBlast Evalue=5E-98; Info="CG6543, isoform A n=6 Tax= melanogaster group RepID=Q7JR58_DROME"
agcatcttataaaaatttaataaaaatatatataatacatttcttcaaaaaatgatcaacaagtagaaaattatataaattattcatgagtaaagttggcctttctcttttcaataaatgcagccattccttctttttggtccttagtagcgaacagggcgtggaacattctcttctcaaagtgcaaaccttccttcaacgtggtctccaaagctgtattcacactttctttagcgatgatattggcgatctgtgagtttcctgctattttttcggcaagctttacagtttcagtcaaaagttcggcggctggtacaaccttgctaaccagacccattttttcagcatcttgggctgttacctggttaccagataaaactatctccattgccttagatttgccaacggttcgtgtaagcctttgggtgcctccagctccaggaatgacaccaaggagaatttcgggttgtccaaacttagctttatccccagcgtaaatgatgtcgcacatcatagccaactcacaaccgccaccaagagcgtatccatttacggcagcaagaagaggcttcttcatgttagcgataagctgccaagcaccaataaaatcttcaatcacacattttgcaaaggtattggataccatctccttaatatcggctccggcagcaaaagctttttcgcttccagttatgacaacagcccccacggatttgtcggtgtcaaatgagtttaaagcttcagatacttcgcatatcagcccattgcagagggcgttgagtgctttgggtctgttgagttgaatcagtccaacattttgcttttctccagtcttggaaactttaataaactcgtagttttcttttgttgcagctacactaaataacctaacattttttgctgcttgtccatatttgaaagaattattgccaaaaactttagcagcaacaatacgactcacagttgcggcactcattttttgtgatattgttgaaattgaattcaatagagacaaaaataaaatgaaaatggactttgaaaaccggttaatagaatccaaatctgtttaaattgag

SEQ ID NO: 4251 - DNA, 1050 bp, Diabrotica virgifera
tagactacttaaaatcatttacaagaaatataaaaataaattataataaagaattaataaagaatattatgatctgtatttatttattatgtctttacaaagattacaaagattatttacacttacagagttacaaaaatttctttacaatataaactatttaaaatcatttacaagaaatagaacaataaattataataaagaattaaaaagaatagtatgctattatttacaccagtcaatgagagcaaggtcaggctattacctccaaattctatcctactgcatggattttaatgaaattttgaaaatagttctacttatctcctaattcaaagtctaccctatgccgatatgcgcttttatcttgggggtggaaaattttttgtcaaaacaaccacggaagtgggtagaaaacctattccttagcaaaaactgttctctaatttgttttcaaaaattcaatactctttgagttaattgggagagttcatttcaatttttattgaaaaatgacaccttttcggatgttttctttgcgaacacctgaaaaaccatgcatccgactaaaaaaactatatcaaacatttttgtagctcataaaaaacaaagagattcgttacttcaaaaatcttctaattataagacaaaaagagatatggttggtgaaaagagtttgttctttggtgcccgctcaaatcggtgtattcaacttaaaataacagggaaacggttgattttaagtgtataatgctaccatgcctttggtagtgttttaaaaggtatttaaatggcgattacgttcaaactaagcgagatatgctgcaaaaaagttgatgactaatgtattttaagaaaaaatgattactcaccaccaaacaccacctcatcaaccaaagtttaaatgcatcgttttccttctacaacacctcttataatattgttacttctatgttcaaactgttgaacgggttcaaaatgaactgtttttgaagacaataagatcaagttatacagcacacctttaaacattcttagaaatcttccttt

SEQ ID NO: 4252 - DNA, 1058 bp, Diabrotica virgifera
tagactacttaaaatcatttacaagaaatataaaaataaattataataaagaattaataaagaatattatgatctgtatttatttattatgtctttacaaagattacaaagattatttacacttacagagttacaaaaatttctttacaatataaactatttaaaatcatttacaagaaatagaacaataaattataataaagaattaaaaagaatagtatgctattatttacaccagtcaatgagagcaaggtcaggctattacctccaaattctatcctactgcatggattttaatgaaattttgaaaatagcctctacttatctcctaattcaaagcctaccctatgccgatgtgcacttatatcttggaggtggttccgatttcttcttgggggtggaaaattccctgtcaaaataaccacggaagtgggtagagaacctaattcttagcaaaaactgttctataatttgttttcaaaaattcaacactttttgagttaatttcaatttttattgaaaaatgacaccttttcgggtggtttttttgctaataccttaaaaaccatgcatccgactaaaaaaactatataaagcattttgtagctcataaaaaacaaagagattcgttacttcaaaaatcttccaattataagacaaaaagagatagttggtgaaaagagtttgttctttggtgcccgctcaaatcggtgtattcaacttaaaataacagggaaacggttgattttaagtgtataatgctaccatgcctttggtagtgttttaaaaggtatttaaatggcgattacgttcaaactaagcgagatatgctgcaaaaaagttgatgactaatgtattttaagaaaaaatgattactcaccaccaaacaccacctcatcaaccaaagtttaaatgcatcgttttccttctacaacacctcttataatattgttacttctatgttcaaactgttgaacgggttcaaaatgaactgtttttgaagacaataagatcaagttatacagcacacctttaaacattcttagaaatcttccttt

SEQ ID NO: 4253 - DNA, 1848 bp, Diabrotica virgifera
ttcttcgttatccgcgccagacctcgcaagcctaaaaaggctattctgatagtcgatatgttcaaaataaatattctgatatttttaattgttgttagttcgagctgcattaattgccagctggatatttttcaagatctaccactagaagctgactcacaggaatttgatgagttggaacaacaaataaacaatgacatttgggatgaggttgaaaaccaacaccaagaactcgattccccggagaaactcctacaaaagatttgtgcactatacgatttcgaaataaaaactgaaagagtcgaatgtaaagatgttaaaatcgttttaaaaagtcttaacgtaaataatcacgtaatccacaaaaggcaagctgaggatgaattggaaggctcaggagacgattctcctattcaaactgaagaggaaaaacctgaagaatcagacacaaatcctgaagaggctaaaactgaagaaccactagaaacaacagctgctgaagcaagccaaaaggaaaaagttgtagaggaaaatattgctcctgttctgccagaatctgataaagcgactaaaactgaagaaccactagaaacaacagctgctgaagcaagccaaaaggaaaaagttgtagatgaaaatattgttcctgttctgccagaatctgataaagcggctaaaactgaagaaccactagaaacaacagctgctgaagcgagtacagctgaagaacaaagaattaaaccttttaagcctttcaaaaaacaagcactcgaaattccactagaggaaccaattaaagatgattctattcaaagctccacagcagcgccctccgttgaaattacttcgaagcaagagcaccatgaagaagaaaaatccatagaagaggtcacaaaaatatcacctgaaatcaaaaatgaagaagcaacaactgctcaagctcattccgaagcacctttgaaacaaccggagttggatatcccagaaatggtagctcccaaagaggttccagttaatgtattagttaaaaatcaagatgaatctactaatgcacctaaattagaaataccagtaaaggaagcggaatcaccagtaaaagaagacgaagcatcatctaaacagcacatcgaaacaagtgaaactaagaaagatgatattcaattaccagacgaagaaattattctgcatcaaagcggaaatgctattttgaatgacaataaagacggtatgtctaacgctgagaagacagttagaaaaatggaagcaaacgaaagcattaagtctcaagtgtcagatatcgaagaacccaaagctggagctacgagcgaaggtgccattggtggaaaagataccaaattattgataatcatcggtggtctagttgcagcagtgggagtcgcagcttttgcttataacattatgaaaaagaggaaagctactgctgcagagtccagagttcctacccaaatgaacggaaatggggacaggaatgatcccgaagaaggacgagagatgaaacctttgatgaagtctcctcagccaaacagcagtgtcgaatataaagatgaaaaataggaagtgtgtgagtgggaaacaaaaactctaatatttattatgttatattaatgaataggttgcattatgttaaccgtataagcatggacaaatgcatcaaagtacaaacgggatctgagaggtctgcacgagttttactgacgaatttttattaattctaacaattcggaaatacaacggaattcctaacataatgcttatatctattgactagatgacgaggggtcgcttttgttatttttaaaataatttattaataaaaaattttcatct

SEQ ID NO: 4254 - DNA, 1078 bp, Diabrotica virgifera
  SmartBlast Evalue=7E-85; Info=Dihydropteridine reductase n=1 Tax=Culex quinquefasciatus RepID=B0XIL5_CULQU
caatccgtatttactacaatcaaataatcgttaagacaagattgattagtaattagtctctcagatttagttctcgttctcaaggtagtcagtggaaacaagcacagtaaaaaccaacaagtggggggtgtactgtggaaacaagtggttttctcatttcactaagaaaatgtcttacgccggacgtgtaatcgtttatggaggtagaggagccctcggcgctaaatgtatatcacattttaaagcaaataatttctgggtaggatctatagatttagccgaaaatgcagaggcagatgtaaacattttagtgaagagggaagatagtcttcaagatcaggaaacatcaatcctatcttcagttaattcctcattaaatggttccaaactggatggaatattttgtgttgctggtggatgggctggaggaaatgcttctaaagatctagtaaaaaattctgaactgatgtggaatcaaagtgtttgcagttctctcatagctgcctctcttgcagcacagtgtttgaaagaaggtggtattattcaattaaccggggctaaagctgcattggatgctactccaggtatgataggatatggcctagccaaagctgcagtacatcacttaactaaatccttgtcccagaaagacggtggtctgccaaacaatgcagtagcagtggccattttacctgtgactttggacacacctatgaacagaaaatggatgccaaaagctgacttttctacctggacacccttggaatttgttgcagacttattcataagatgggcctcaggaaaagatagacctcagagtggcagtttgttgaaacttgaaaccactaaccaccaaacagatgttacacctgcttaatcaccagatctgatatacagtgaaaacatgatattaagaaaggaccaaggctaatctctcgaattttattccattagacatttgctgggtatactattattattgttttaagtatactgatttttgtcccatttttgatcaacttgtgttgaatttttttgtagatctttattttttataatgttgttcagaataaaatat

SEQ ID NO: 4255 - DNA, 1029 bp, Diabrotica virgifera
  SmartBlast Evalue=6E-85; Info=Dihydropteridine reductase n=1 Tax=Culex quinquefasciatus RepID=B0XIL5_CULQU
caatccgtatttactacaatcaaataatcgttaagacaagattgattagtaattagtctctcagatttagttctcaaggtagtcagtggaaacaagtggttttctcatttcactaagaaaatgtcttacgccggacgtgtaatcgtttatggaggtagaggagccctcggcgctaaatgtatatcacattttaaagcaaataatttctgggtaggatctatagatttagccgaaaatgcagaggcagatgtaaacattttagtgaagagggaagatagtcttcaagatcaggaaacatcaatcctatcttcagttaattcctcattaaatggttccaaactggatggaatattttgtgttgctggtggatgggctggaggaaatgcttctaaagatctagtaaaaaattctgaactgatgtggaatcaaagtgtttgcagttctctcatagctgcctctcttgcagcacagtgtttgaaagaaggtggtattattcaattaaccggggctaaagctgcattggatgctactccaggtatgataggatatggcctagccaaagctgcagtacatcacttaactaaatccttgtcccagaaagacggtggtctgccaaacaatgcagtagcagtggccattttacctgtgactttggacacacctatgaacagaaaatggatgccaaaagctgacttttctacctggacacccttggaatttgttgcagacttattcataagatgggcctcaggaaaagatagacctcagagtggcagtttgttgaaacttgaaaccactaaccaccaaacagatgttacacctgcttaatcaccagatctgatatacagtgaaaacatgatattaagaaaggaccaaggctaatctctcgaattttattccattagacatttgctgggtatactattattattgttttaagtatactgatttttgtcccatttttgatcaacttgtgttgaatttttttgtagatctttattttttataatgttgttcagaataaaatat

SEQ ID NO: 4256 - DNA, 1029 bp, Diabrotica virgifera
ataattggatggaagcaaaactttttgattgtcgtttgaattactgtgaagacaatatttaagttaattattataacttgttacaagaaataaatcatattaaaaaggtaacataaatattaactagaagaacaagtatttcctgtgtaacattttaatttctgcatttcctgtgttaataacccagatagcatgtaaacttgtggcaaatttgattcttctttgatttaatttgctgcgtcaaatatgacgaggtaagtttgtgtcaagtttgctgcaatattgttatgacaaagatgatgattcaagtttgtagcaactttgctgcaagcgtacagttgcaaagccacgtcacgcgtgccatctatttgattgacttacacgttacggtcggttcggttcggtttcgttcttaccctgactgatgtcacgcccacgaaaacgagagtgttgccacgggttgtaaatttccctttctgcgagaattttcaacgtaaaagggaaaaagttaacttataagggaatctttgctccagtacaaattgtaaaatatttataaaaatcaaaatatttgaaaataattcaacatattttcacagattttttaaataggagcataggagggaattttatcataaaagtgggaatttttaaggtacgttgagggaaaaagcttactcgacagctggcaacacgggaaaagtaacctgccaatgccatcctgccaagcggtgataatttgtggttaggtatgtcctatcctatgttgatatttttctttgagttttttacaacatttaccgtacaattctccgagactattactttaattactaagctgaagcttgttttcttcagtttttcataagacccacctgcttgtggtgattaggtacagattggtattatttttgctttggtgaaattgaggtaagtttttttttatgtttttcgtagcttctaactgtatttacatacatactatctaaaataaacacattataatatattttttataaataagtttta

SEQ ID NO: 4257 - DNA, 1014 bp, Diabrotica virgifera
ataattggatggaagcaaaactttttgattgtcgtttgaattactgtgaagacaatatttaagttaattattataacttgttacaagaaataaatcatattaaaaaggtaacataaatattaactagaagaacaagtatttcctgtgtaacattttaatttctgcatttcctgtgttaataacccagatagcatgtaaacttgtggcaaatttgattcttctttgatttaatttgctgcgtcaaatatgacgaggtaagtttgtgtcaagtttgctgcaatattgttatgacaaagatgatgattcaagtttgtagcaactttgctgcaagcgtacagttgcaaagccacgtcacgcgtgccatctatttgattgacttacacgttacggtcggttcggttcggtttcgttcttaccctgactgatgtcacgcccacgaaaacgagagtgttgccacgggttgtaaatttccctttctgcgagaattttcaacgtaaaagggaaaaagttaacttataagggaatctttgctccagtacaaattgtaaaatatttataaaaatcaaaatatttgaaaataattcaacatattttcacagattttttaaataggagcataggagggaattttatcataaaagtgggaatttttaaggtacgttgagggaaaaagcttactcgacagctggcaacacgggaaaagtaacctgccaatgccaagcgtgatatttgtggttatgtcctatccatgttgatatttttctttgagttttttacaacatttaccgtacaattctccgagactattactttaattactaagctgaagcttgttttcttcagtttttcataagacccacctgcttgtggtgattaggtacagattggtattatttttgctttggtgaaattgaggtaagtttttttttatgtttttcgtagcttctaactgtatttacatacatactatctaaaataaacacattataatatattttttataaataagtttta

SEQ ID NO: 4258 - DNA, 983 bp, Diabrotica virgifera
  SmartBlast Evalue=2E-51; Info=Angiopoietin-like 1 n=1 Tax= Tribolium castaneum RepID=D6WEJ6_TRICA
tgatttttgtttagtaagtcacaatgatttcgtctatacttcttctcatatttgtttactcgagtgaattatgttgtgtcagaaaaattatctgctgctgcccctgccgatgtaaaattcacaaaactattggacgttaagtttgaaagtagaaccagttcttgagaatgattttggaaggtttctctatcctcaaactgaagatatcgatttaggaaccaaaatgaatactttcaagttcccttaaagttgtcatttgggatagataggcaaaaatggaaattacaaagaaaacgaaaaaactatttcaagtatttcaagtatgtttgaccaatgtaaatatttggtaggtagaagtcaaacaccgttatgtcgtttcaatccagttgcgaaaaattcagaaaataatcatccaagaagttgcagagaaatctagaagctggaaacaataaatctggtgtataccaaattaaaccacgtaccagcagcaaaccattcgctgtactgtgtgatatggaaactaagggtggtggctggactcatattcaaaagagatttgacggatcacaggacttttatctaccttggagagattacaaattcggttttggtgatctagtgggtgaattttggcttggacttcaaaatatttatcacatgactgcattcgatagaaacgaacttcttatagagttaacagacacggacaaaaatattagtatgcacaatattcaacgttctcaattggctgcgaaaaggatggctacccgctcaaggaacttactggatactcaggcaatgcaggggatggtttaaaataccatatcaatgcaaagtttacaacattggatgtggatcaagatacatattctggaaattgtgcacaatcatgtgagggcgcttggtggtatgtatcttgccattacagcaaccttaatggaaaacatatgacagttgtacttcctaatgcatattcagcacat

SEQ ID NO: 4259 - DNA, 971 bp, Diabrotica virgifera
  SmartBlast Evalue=2E-51; Info=Angiopoietin-like 1 n=1 Tax= Tribolium castaneum RepID=D6WEJ6_TRICA
tgatttttgtttagtaagtcacaatgatttcgtctatacttcttctcatatttgtttactcgagtgaattatgttgtgtcagaaaaattatctgctgctgcccctgccgatgtaaaattcacaaaactattggacgttaagtttgaaagtagaaccagttcttgagaatgattttggaaggtttctctatcctcaaactgaagatatcgatttaggaaccaacggagaatatttgcaagtccccctaaagttgtcctttgggattgataggcaaaatggcattcaagtatatgacaaaaccattttaagtgtgtttgaccaatgtaaatatttggtaggtagaagtcaaacaccgttatgtcgtttcaatccagttgcgaaaaattcagaaaataatcatccaagaagttgcagagaaatctagaagctggaaacaataaatctggtgtataccaaattaaaccacgtaccagcagcaaaccattcgctgtactgtgtgatatggaaactaagggtggtggctggactcatattcaaaagagatttgacggatcacaggacttttatctaccttggagagattacaaattcggttttggtgatctagtgggtgaattttggcttggacttcaaaatatttatcacatgactgcattcgatagaaacgaacttcttatagagttaacagacacggacaaaaatattagtatgcacaatattcaacgttctcaattggctgcgaaaaggatggctacccgctcaaggaacttactggatactcaggcaatgcaggggatggtttaaaataccatatcaatgcaaagtttacaacattggatgtggatcaagatacatattctggaaattgtgcacaatcatgtgagggcgcttggtggtatgtatcttgccattacagcaaccttaatggaaaacatatgacagttgtacttcctaatgcatattcagcacat

SEQ ID NO: 4260 - DNA, 969 bp, Diabrotica virgifera
  SmartBlast Evalue=4E-15; Info=Cytochrome b561 domain-containing protein 2 n=1 Tax=Harpegnathos saltator RepID=E2C7A5_9HYME
aaacccctcaccacaacgcaccgacaccgagtatgattcaacttcaacaagagtgcaaccattcgatatagaatcacaatctcatatcgattttgcaccagttaataatcagaatcagaacaactgtgatagcttagccgcgaaagaaatgagtgcaacgaaagaacaacaaagtaaattggggggagccgataaagagaaaaaacacaagaaaggccctcgacctccgcctccccctggattaaaagatgatctaacaacaattgcacatgtttctgtggtgattttcgtagggcttattttgtatttatgttttgcacggccgtttgaattcttcacgtggcatcctttgttgatgtctgtagggtggatgcttataatgatagaaggcgtcctcttcatatccaaagaaaatccgataggaagaagactgaacttgggccgccttttaaaagttcgttaccattggatagctttaacaattagttctattttagttacgatcggtttcgtaatagtagttataagcaaaaacaaccacggcaaggaacattttaaatccttacatgcgattttcggtctcataggtttattagggtgtatacctgccttaataaatggtactgtagctttgtttgatgtcgaattgaagcgatacatcaagccagctttaaatacagctatacacgtagccagtggcagcgtagtggtcatttttggaggattgtctctaattttgagcgtttatacgaattggtttaagaggaattcagataataataagtatctgtttctgttaggtttagttacttctatttatatattagggtgggtcgtacaaagacctatgcgaaaaacgttgagaaagtttttttaaatttgaaaatatatgataatttaactctaaagtattacatcgagattgtctaaactgaaagaatgatactccgttcctattgtacaaataaa

SEQ ID NO: 4261 - DNA, 969 bp, Diabrotica virgifera
  SmartBlast Evalue=3E-15; Info=Cytochrome b561 domain-containing protein 2 n=1 Tax=Harpegnathos saltator RepID=E2C7A5_9HYME
aaacccctcaccacaacgcaccgacaccgagtatgattcaacttcaacaagagtgcaaccattcgatatagaatcacaatctcatatcgattttgcaccagtaaataatcagaatcagaacaactgtgatagtttagacgcgaaagaaatgagtgcaacgaaagaacaacaaagtacattggggggagccgataaagagaaaaaacacaagaaaggccctcgacctccgcctccccctggattaaaagatgatctaacaacaattgcacatgtttctgtggtgattttcgtagggcttatcttgtatttatgttttgcacggccgtttgaattcttcacgtggcatcctttgttgatgtctgtagggtggatgcttatgatgatagaaggcgttctcttcatatccaaagaaaacccgataggaagaagactaaacttgggccgccttttaaaagttcgtttccattggatagctttaacaataagttctattttagttacgatcggtttcgtaatagtagttataagcaaaaacaaccacggcaaggaacattttaaatccttacatgcgattttcggtctcataggtttattagggtgtatacctgccttaataaatggtactgtagctttgtttgatgtcgagctaaagcgctacatcaagccagctttaaatacagctatacacgtagccagtggcagcgtagtggtcatttttggaggattgtctctaattttgagcgtttatacgaattggtttaagaggaattcagataataataagtatctgtttctgttaggtttagttacttctatttatatattagggtgggtcgtacaaagacctatgcgaaaaacgttgagaaagtttttttaaatttgaaaatatatgataatttaactctaaagtattacatcgagattgtctaaactgaaagaatgatactccgttcctattgtacaaataaa

SEQ ID NO: 4262 - DNA, 1008 bp, Diabrotica virgifera
  SmartBlast Evalue=5E-44; Info=Endonuclease-reverse transcriptase n=1 Tax=Bombyx mori RepID=D5LB38_BOMMO
gctgttttatatcaatatattaatattatgtgtgtgtcggcaacgtgtaatggagaagaaaaggttcttaggttcaatgaagtgttgccattttcagtcatttacgtgcaagaagaagtttgagattattgtacgaatgagattgttgattctgtccaacagtcagattctttcaaaatattatatttttgaggtgttgtttgatttttttgtaaacaaatataaaaaaatattttttatatccttatatcaatttctgtaccaattagcaatctgtactggaatcaaagatcgtctatcctgacggaggcaggagaatttgacaatatcaaaatcaaacgtggggtctgtcagggatgtatactgtcaccactgctgttcaacatataatctgaggaaatctttaaagaagcagtggatgatgttgaaaccggaattcgaattaacggagaatgtatcaataacataagatacgcagacgacacgatggtattcgccgactgttctgaagtgctccaggaattaatgaatagcatcaccgaagtaagtcagcgatagacttcgactaaataggtactaagaaaacaaactatatgatgatctctaagaaggaacagcaatttggtcgaatcagtgtgaacggtcaacaaatataaagagtaaaaacatacacataccttggtacgaacgtcaatgaacattgggatcattccctagaaatcaaaagtaggatagcgaaagcaagatctgcatttcaaaaaatggctaagctattaaaattttatgatttatcaatactcataaaaatcaggttactacgatgttaaatctttcctatactgttgtacggagttgagtcgtggactctcaaagacgtcaccctgcagaaaattgatgctttcgaaatgtggctttatcgtcgaatcctgaagatatcttatatcgaccacattactaatcagcgtgcttttttgagaatgcaaaaagaaaagagcttttgaccactac

SEQ ID NO: 4263 - DNA, 917 bp, Diabrotica virgifera
  SmartBlast Evalue=8E-36; Info=Endonuclease-reverse transcriptase n=1 Tax=Bombyx mori RepID=D5LB38_BOMMO
gctgttttatatcaatatattaatattatgtgtgtgtcggcaacgtgtaatggagaagaaaaggttcttaggttcaatgaagtgttgccattttcagtcatttacgtgcaagaagaagtttgagattattgtacgaatgagattgttgattctgtccaacagtcagattctttcaaaatattatatttttgaggtgttgtttgatttttttgtaaacaaatataaaaaaatattttttatatccttatatcaatttctgtaccaattagcaatctgtactggaatcaaagatcgtctatcctgacggaggcaggagaatttgacaatatcaaaatcaaacgtggggtctgtcagggatgtatactgtcaccactgctgttcaacatataatctgaggaaatctttaaagaactgttctgaagtgctccaggaattaatgaatagcatcaccgaagtaagtcagcgatagggacttcgactaaatactaagaaaacaaaatatatgatgatctctaagaaggaacagcaatttggtcgaatcagtgtgaacggtcaacaaatataaagagtaaaaacatacacataccttggtacgaacgtcaatgaacattgggatcattccctagaaatcaaaagtaggatagcgaaagcaagatctgcatttcaaaaaatggctaagctattaaaattttatgatttatcaatactcataaaaatcaggttactacgatgttaaatctttcctatactgttgtacggagttgagtcgtggactctcaaagacgtcaccctgcagaaaattgatgctttcgaaatgtggctttatcgtcgaatcctgaagatatcttatatcgaccacattactaatcagcgtgcttttttgagaatgcaaaaagaaaagagcttttgaccactac

SEQ ID NO: 4264 - DNA, 963 bp, Diabrotica virgifera
  SmartBlast Evalue=1E-122; Info=Ribosomal protein L6 n=1 Tax= Chrysomela tremulae RepID=D1M7Y3_9CUCU
gttggtttttactgtggtccaccttttatatttgacatcctgaaagatggttgagaaaaaggctgtacagaagcccgctggggatgcaccaaaaaaggtgcacaaaccaggaaaacctagaaactatgatttgggaaatggagtactcagattctctaggtctaaaatgttccacaaaaaagcattatacaaattcgttggcaagaaagtagaagctaccaagaaacctcaaaagccccaggttattgaaaaaccaattggtggagagaaaaatggaggaaagagatttgttttggtcaagaaacgtagagcatcctatcctacccaagacaaaattaaggccaggccagctaggagaacatttagccaacacacgaggtctattagaaatacaatcactccaggaacagttctcatccttttagctggttctcacaaaggaaagagggttgtattccttaaacaactgtactctggtctacttttggtaactggaccttttggaattaatgcctgtccattgagacgtattagccaacgttatgtaattgctacatctaccaaaattgacgttagtggagtacagctgccagaaaacctaaatgatgaatattttgcaagaaagaggcagaagagatcaaagaaagaagaaggtgatattttccaatccaaaaaagaaggttacaaagtaagcgaagataggaaagctgaccaaaagaaagtagatacacaagttctggctgcaatcaagaagcactcagaccgcaaagtacttttagcttatttgtcagccatgtggggactcagatcatcacagtacccacacagattgaagttttagataggataccataaattgtttatcttttgacttgtatagagaggaaagtgataaataaattatggatttataaatgaggtttttttatgtgactgttgttataatacaataatttaattctt

SEQ ID NO: 4265 - DNA, 963 bp, Diabrotica virgifera
  SmartBlast Evalue=1E-122; Info=Ribosomal protein L6 n=1 Tax= Chrysomela tremulae RepID=D1M7Y3_9CUCU
gttggtttttactgtggtccaccttttatatttgacatcctgaaagatggttgagaaaaaggctgtacagaagcccgctggggatgcaccaaaaaaggtgcacaaaccaggaaaacctagaaactatgatttgggaaatggagtactcagattttctagatctaaaatgttccacaaaaaagcattgtacaaatttgttggcaagaaggtagaagctaccaagaaacctcaaaagccccaggttattgaaaaaccaattggtggagagaaaaatggaggaaagagatttgttttggtcaagaaacgtagggcatcctatccaacccaagacaaaattaaggccaggccagctaggagaacatttagccaacacacaaggtctattagaaatacaatcactccaggaacagttctcatccttttagctggttctcacaaaggaaagagggttgtattccttaaacaactgtactctggtctacttttggtaactggaccttttggaatcaatgcttgcccattgaggcgcattagccaacgatatgtaattgctacatctaccaaaattgacgttagtggagtacagctgccagaaaaccttaatgatgaatattttgcaagaaagaggcagaagagatcaaagaaagaagaaggtgatattttccaatccaaaaaagaaggttacaaagtaagcgaagataggaaagctgaccaaaagaaagtagatacacaagttctggctgcaatcaagaagcactcagaccgcaaagtacttttagcttatttgtcagccatgtggggactcagatcatcacagtacccacacagattgaagttttagataggataccataaattgtttatcttttgacttgtatagagaggaaagtgataaataaattatggatttataaatgaggtttttttatgtgactgttgttataatacaataatttaattctt

SEQ ID NO: 4266 - DNA, 1018 bp, Diabrotica virgifera
cgacactacaaaggagttactccgttacttatggcgttgttgtggctacacatgcactgtttcaacaagttctagcttgcagctcagcagagtaacttgttttgtaaaataggtacatactattctacgaaaatggagtggagtggagtaatgtgaaaataattgaatttttaacagtgtttgaaacagaaccttgtttatgttatccccgacaaaaatcacataaaaatcgtggtgttcatggtgacgcttggcgtcgaattgtgcaatcattatcttttccagcgacggtagaagatttgaaaaagaaaaaaacacacttatgggatactataggacccatttaaataaatataaaaaatcgttaaaatctggcatgggaacgaatgaggtatataaaacaagctggtttgcatttgatgtcattatcgtgttcgttttctgtgcatttttatcatccaccatcttcttttgagtcttggtttttgcttgaaccgtttataaaataataaattcataaaataataattagcacacataaaatataacagcgtagcagcttcgacttccatcttgaaattattggattaaaaaacgcgttttctgctgactacgcgctaaaataagtgtggccagtcactttaatgcgcagtttattccatcatttttggtgtgttaattaaagcgaaaatggacgttagatgttaacgttactgtggctccagcattatgaattgaataccaaagtaatcacaacactatgtaggtttcaaattggggattccttatgtggggttccaaaatacattggcatcagaaaatttgcaatggtatttgaatttaggaagaaaatgaaactaatcatcagtttagtcaatttctgataaattgaggaaagtatctcattattttatttacactgtaccattaaatgtgtaaattacacagaatattagagaaaaatttagatttgtgacaatttcttcacttgtaaaaaaacaaagcataagattcttat

SEQ ID NO: 4267 - DNA, 824 bp, Diabrotica virgifera
cgacactacaaaggagttactccgttacttatggcgttgttgtggctacacatgcactgtttcaacaagttctagcttgcagctcagcagagtaatttattgtgtgaaataggttacatagatactattctacgaaaatggagtggagtaacgagaaaatacttgaatttttaacagtgttcgaaacataaacttgcttatgggatcaccgacaaaaatcacataaaaatcgtggtgttcattgtgacgctgcatttttatcatccaccatcttcttttgagtcttggtttttgcttgaaccgtttataaaataataaattcataaaataataattagcacacataaaatataacagcgtagcagcttcgacttccatcttgaaattattggattaaaaaacgcgttttctgctgactacgcgctaaaataagtgtggccagtcactttaatgcgcagtttattccatcatttttggtgtgttaattaaagcgaaaatggacgttagatgttaacgttactgtggctccagcattatgaattgaataccaaagtaatcacaacactatgtaggtttcaaattggggattccttatgtggggttccaaaatacattggcatcagaaaatttgcaatggtatttgaatttaggaagaaaatgaaactaatcatcagtttagtcaatttctgataaattgaggaaagtatctcattattttatttacactgtaccattaaatgtgtaaattacacagaatattagagaaaaatttagatttgtgacaatttcttcacttgtaaaaaaacaaagcataagattcttat

SEQ ID NO: 4268 - DNA, 913 bp, Diabrotica virgifera
tttgtgtcattatttattatttatttacacaatattcagtattatttcaatacagtgtgtaatatgttctataaattacaaaaacagattcactaaggaaacaaaaatccccacaaccttctaaaatggttcggcattgtttctgactgcatcttggcagtgcctaagcaaaaagagagttaatgagagttttgatggcatcgtcgataattggcatcaaaaagttaccatgctcatcgatgaatttagccacgttgtcgttgagaagagtattgaccaaagctgtgaattctgggttgtccaagagaccattcaagttgaatgtaatagatcctacgttcaaaactacgtccaccttcgaaacttgaattttgggtatttttgagagatcggctacggcatttattgatagtttcacatctccaatattgatgttttgttttccactaccgtaaagtggtaccagctccagaaccactacgttgacggcagctccgaagttgatagtaagatcaggaaccaaaactgatatgttcagttgttgcgtgatgagattggttgatacggcagtggatactatcttatgtataccagagatagcaatgtctttaatatcaatggttccggctagagcctcagagttctggtccatgtgtatatcagcaattgtcatgggatcagacatcttagaaatggccccatttagagtgctgttgataatatcgcctataaaatctcttagttgctcctccgtttcaaactgttgtgcaaattcatttgaattaagatactcaattgatggcattgccacaacggcacaagccaaagccaaaagcactaaaaattgtttcattttgttatgtaaaagtgttaatgatgtatgttgatctaaaatgaaactctgcattaaatc

SEQ ID NO: 4269 - DNA, 913 bp, Diabrotica virgifera
tttgtgtcattatttattatttatttacacaatattcagtattatttcaatacagtgtgtaatatgttctataaattacaaaaacagattcactaaggaaacaaaaatccccacaaccttctaaaatggttcggcattgtttctgactgcatcttggcagtgcctaagcaaaaagagagttaatgagagttttgatggcatcgtcgataattggcatcaaaaagttaccatgctcatcgatgaatttagccacgttgtcgttgagaagagtattgaccaaagctgtgaattctgggttgtccaagagaccattcaagttgaatgtaatagatcctacgttcaaaactacgtccaccttcgaaacttgaattttgggtatttttgagagatcggctacggcatttattgatagtttcacatctccaatattgatgttttgttttccactaccgtaaagtggtaccagctccagaaccactacgttgacggcagctccgaagttgatagtaagatcaggaaccaaaactgatatgttcagttgttgcgtgatgagattggttgatacggcagtggatactatcttatgtataccagagatagcaatgtctttaatatcaatggttccggctagagcctcagagttctggtccatgtgtatatcagcaattgtcatgggatcagacatcttagaaatggccccatttagagtgctgttgataatatcgcctataaaatctcttaattgctcctccgtttcaaactgttgtgcaaattcatttgaattaagatactcaattgatggcactgccacaacggcacaagccaaagccaaaagcactaaaaattgtttcattatgttatataaaagtgttaatgatgtatgttgatctaaaatgaaactctgcattaaatc

SEQ ID NO: 4270 - DNA, 910 bp, Diabrotica virgifera
  SmartBlast Evalue=4E-66; Info=Polyadenylate binding protein 2 n= 1 Tax=Bombyx mori RepID=Q0ZAL2_BOMMO
cacatttgtggcgtttaggtttattaaaccgattgccattggtttttttcggccatttatttgaggatttctagttctaggtgactgataggcgcgaagtggttgggatataagccggtaatttaaaaaataaaaaaataataatcagaaaaaaaagtatcaacgcattaccagttatggccgataatgaagacttgggtttaggtgaggatcacatagattccttcgaagacgctaacggaatgcacgacgagaatctgttaaatgacacagatggggatggaactgctgcagatgatccagagttggaagccatcaaggcacgacaggaatggaagaagaggccgagaaactgaaacagttacaaaatgaagtggataaacagatgaatatgggaagtccaccaggacttacaagcccattgaatatgtcactggaggagaaaatggaagtggacaacagaagtatttatgttggtaatgtggactatggggcgacggctgaagaactagaacaacatttccatggatgtggttccatcaacagggttactatactttgtaacaaatatgataatcatcccaagggtttcgcttatatcgaattcggtgatagggactccgtacaaactgcaatggcaatggatgaatcattatttagaggaagacagattaagataatgcagaaaaggacgaacagaccaggaatctcgacgactaatcggcctccgagaggcagaggttcattcagaggcagccgaggaatcagtcgaggtttttactcgggatatcgacccatacgccgagcaagacgaggatattttgctccgtattgactggtttgtaagaaagcactgtttttcttgtttttccaatcaatcacaccctcattgcttttctaagttaatatt

SEQ ID NO: 4271 - DNA, 883 bp, Diabrotica virgifera
  SmartBlast Evalue=4E-72; Info=Polyadenylate-binding protein 2 n= 3 Tax=Aculeata RepID=E2AU35_9HYME
cacatttgtggcgtttaggtttattaaaccgattgccattggtttttttcggccatttatttgaggatttctagttctaggtgactgataggcgcgaagtggttgggatataagccggtaatttaaaaaataaaaaaataataatcagaaaaaaaagtatcaacgcattaccagtgaggatcacatagattccttcgaagacgctaacggaatgcacgacgagaatctgttaaatgacacagatggggatggaactgctgcagatgatccagagttggaagccatcaaggcacgggtacgagaaatggaagaagaggccgagaaactgaaacagttacaaaatgaagtggataaacagatgaatatgggaagtccaccaggacttacaagcccattgaatatgtcactggaggagaaaatggaagtggacaacagaagtatttatgttggtaatgtggactatggggcgacggctgaagaactagaacaacatttccatggatgtggttccatcaacagggttactatactttgtaacaaatatgataatcatcccaagggtttcgcttatatcgaattcggtgatagggactccgtacaaactgcaatggcaatggatgaatcattatttagaggaagacagattaagataatgcagaaaaggacgaacagaccaggaatctcgacgactaatcggcctccgagaggcagaggttcattcagaggcagccgaggaatcagtcgaggtttttactcgggatatcgacccatacgccgagcaagacgaggatattttgctccgtattgactggtttgtaagaaagcactgtttttcttgtttttccaatcaatcacaccctcattgcttttctaagttaatatt

SEQ ID NO: 4272 - DNA, 866 bp, Diabrotica virgifera
gatgctctttttataaaatgcgtataacataatattacattgcttgtaaataaaaccacactgaaaactatttaaacgatatttacacaacagatatacataaataaaattggtaaataatttcaacattcagttgtgaacatttagttttggtattttggtatattatcaagtttttacttggaaattaaaaatatacatttgttatacagggtgtttcattaagaatcgtccacatagccactagagaaaccttagagcaaaatacggagatttaagctaaaacacttgaatgaaatgtggctccctaccgagttacagggtatttatttataaatttcaaaacttttgtacccagtactttaaaaccatttaagaaatcattgtcgtactcggcaggaagtgcagacactgtacactccactaaactatgtcaaataaatgtttgtgaaagtattggagaatcgaaaaattgcactaaaacagcaattccgccagtagcgtagaatttgggaagggtcaaccattcactttgccccatcgtacgcctctagcagcagccagaaacgtttatttaacataatttagcagggtgtacagtacccacacttctcgtcaagtacgacaaggacatgttaaatggctttaaagtactaaatacaaatagtttaaatttctaaataaaacactctgtaattcagtaaggggccacattccattcaagcgttttaggtcaaatctccgtattttgtgctaaggtttctccagccacatatggacaattcttaatgaaacaccctgtatattattagcaatattcagaaacaaataaatcctacactgatcccaatgctttgatcccattg

SEQ ID NO: 4273 - DNA, 858 bp, Diabrotica virgifera
gatgctctttttataaaatgcgtataacataatattacattgcttgtaaataaaaccacactgaaaactatttaaacgatatttacacaacagatatacataaataaaattggtaaataatttcaacattcagttgtgaacatttagttttggtattttggtatattatcaagtttttacttggaaattaaaaatatacatttgttatacagggtgtttcattaagaatcgtccacatagccactagagaaaccttagagcaaaatacggagatttaagctaaaacacttgaatgaaatgtggctccctaccgagttacagggtatttatttataaatttcaaaacttttgtacccagtactttaaaaccatttaagaaatcattgtcgtactcggcaggaagtgcagacactgtacactccactaaactatgtcaaataaatgtttgtgaaagtattggagaatcgaaaaattgcactaaaacagcaattccgccagtagcgtagaatttgggaagggtcaaccattcactttgccccatcgtacgcctctagcagcagccagaaacgtttatttaacataatttagcagggtgtacagtacccacacttctcgtcaagtatgacaaggatatgttcaagtactaaatacaaatagtttttaaatttctaaataaaacactctgtaattcagtaaggggccacattttattcaagcgttttaggtcaaatctccgtattttgtgctaaggtttctccagccacatatggacaattcttaatgaaacaccctgtatattattagcaatattcagaaacaaataaatcctacactgatcccaatgctttgatcccattg

SEQ ID NO: 4274 - DNA, 889 bp, Diabrotica virgifera
acccttacagtgtcacactgtgcatagacaccccggccttctctacactctgtttcgtctgtcatcagaaaaaagacagtaccttgatccatcggtgaacaatattattctccaatcgtcattattccaaacaacatgttcgagcaaaattcaatcttggccttctatgatctctggtcaataatgggccagtgggtgcccttccagggcgcaggccgtttgcggcaagtcttctccttatcgtattttgactgattctcaagttgataacgatccagaaattcattttgtagagaagctttgtttcagtgtacgaagtgtcaaaaaccggcattgattaggagttgtaaaccttctacggccttgacctggtcttcttgagttgcttccagtaacaataagacttttgaaatggttgactgagtgacagtaaaccgttcagcgagttcaacttgactgtatccttattcgcgaagaataacgattctaatgcactcagtgtctgtcaaatttcgattttcttgctgctggtggttcatttcaaaagaaaaaacacttaagaaacttgaaaaacgactttgagcatccagaagaacgtattccagcccaactaaattcgaattaaaatgaagcacaactagcattttttcaatttctttacgaaaactaataaaaacatcagcgttttttaccgttctttcgataaattttacaacataccggaggtaacaataacatattatcacaaaaatcgaaacattaacattatttgagttaacaggatttttaaaattatgcgtcaattttggcgcgcagtgtattttaacatcggaaaaaggatattttcgaagcatcagaagttttcagacgttcttgaaattaagtcaac

SEQ ID NO: 4275 - DNA, 860 bp, Diabrotica virgifera
acccttacagtgtcacactgtgcatagacaccccggccttctctacactctgtttcgtctgtcatcagaaaaaagacagtaccttgatccatcggtgaacaatattattctccaatcgtcattattccaaacaacatgttcgagcaaaattcaatcttggccttgtatgatctctggtcaataatgggccaatgggcaagtcttctccttatcgtattttgactgattctcaagttgataacgatccagaaattcattttgtagagaagctttgtttcagtgtacgaagtgtcaaaaaccggcattgattaggagttgtaaaccttctacggccttgacctggtcttcttgagttgcttccagtaacaataagacttttgaaatggttgactgagtgacagtaaaccgttcagcgagttcaacttgactgtatccttattcgcgaagaataacgattctaatgcactcagtgtctgtcaaatttcgattttcttgctgctggtggttcatttcaaaagaaaaaacacttaagaaacttgaaaaacgactttgagcatccagaagaacgtattccagcccaactaaattcgaattaaaatgaagcacaactagcattttttcaatttctttacgaaaactaataaaaacatcagcgttttttaccgttctttcgataaattttacaacataccggaggtaacaataacatattatcacaaaaatcgaaacattaacattatttgagttaacaggatttttaaaattatgcgtcaattttggcgcgcagtgtattttaacatcggaaaaaggatattttcgaagcatcagaagttttcagacgttcttgaaattaagtcaac

SEQ ID NO: 4276 - DNA, 810 bp, Diabrotica virgifera
gtaattttctagccgtttctgcagaccaaaatagagaagattatataagagactcttttattagtgggattctttctaataacataagacaacgtttactagaaaacaacagtattactctgcaagatgccatactgaaagcccaatctctggagtcagcttcaaaacactctgaggcttatatcactcctgtacaaattattaatgcgatttcattagaaaccaaagagctaactaattatcttctgccgctgtgaaaagttggaaattttacttttgtggattaactgaaagacatcctcgtagcctataccctgctagagacaaagtttgcaagaaatgcttgaaagttggacatttttccaaggtatgtaggcttcagatgtccaattcagcgtcggctgccgttttagctactactacatctagttcgaatcttagaaaccttgctgctgtccctcaatgcttatctaagtgttactaaaataaagctgaatggaaatacagctgaaagtttaatagacacaggtagttctgagtcatatatcagtaagaattatgcattgtctataaaagtgaaaacatttagaagtcatgcaagcatactaatggcttcaacagcgctcagattgactatctcaggacattgctttgttaatttagaaataaacggacattcctataaaaatgtcaaattatcaataattcacgatttatgtctctagactttatttaaaacgtagaaaactatgaataggataagagcgggagtcgctccagtaaaatcaaacatggtaaaaggaggaaaat

SEQ ID NO: 4277 - DNA, 804 bp, Diabrotica virgifera
gtaattttctagccgtttctgcagaccaaaatagagaagattatataagagactcttttattagtgggattctttctaataacataagacaacgtttactagaaaacaacagtattactctgcaagatgccatactgaaagcccaatctctggagtcagcttcaaaacactctgaggcttatatcactcctgtacaaattattaatgcgatttcattagaaaccaaagagctaactaattatcttctgccgctgtgaaaagttggaaattttacttttgtggattaactgaaagacatcctcgtagcctataccctgctagagacaaagtttgcaagaaatgcttgaaagttggacatttttccaaggtatgtagtgtgtaggcttcagacgtccaattcagcgtcagctgccgttttagctactacatctagttcgaatgttagaaatcttgctgctgctcgtcaatgcttatctaaaagtgttactaaaataaagacagctgaaagtttaatagacacaagtagttctgagtcatatatcagtaagaattatgcattgtctataaaagtgaaaacatttagaagtcatgcaagcatactaatggcttcaacagcgctcagattgactatctcaggacattgctttgttaatttagaaataaacggacattcctataaaaatgtcaaattatcaataattcacgatttatgtctctagactttatttaaaacgtagaaaactatgaataggataagagcgggagtcgctccagtaaaatcaaacatggtaaaaggaggaaaat

SEQ ID NO: 4278 - DNA, 1581 bp, Diabrotica virgifera
agaattatgtacatggtgtgtttaggttttatattctatattatcctttctaaggaaaaaataacaagcgtatgttaagtataagactcatgtactcttcacgcatataggtgagctgcaaatcaatcatttttattattataataaaatcaaattgatcacaatctcacaatcgatggtatcttacaggtcatcaaacataggaaaaggttcttggtttatggtaacaagacaagttaactaattaatatcctgaagaaccccatagagacacgtcggtacaagcgtacaaatatatctgaaattgcgaaggtaactcacgtagcaaatcaaggagagggaacctcagttgaacgcgttggtgcgaatagtaaacatccatttaaaatgaattatgctcgaaatcattagttttgcgatattgccagataaaaccgtcgaatagttgtttatttagaaaatattttttatattattatttcttttaataaacatgaatattacaagagccgggaaaaatgaggcacaaagtgcacaatcccatgaaattatacactttgttttaaaatatatgcagaaggaaattttactgtgaaactggtaacaaataaaaatccgaaaaacctttgacacccgattgatctgacaacgtcgcataaccaaatttttcgattaccgatatgatgtgttttgtaacgcgtcattaaatttaacatttattttttcttaattttggttataataaataattttaatcctgatttggagggatagtttttaaacggttcagtctaacgattgttggatatgtgaatgtaatatgtaatgttaaaatccttctttatctttattattattataaacaaataaagagcaaattaggctaagggtatacttagtgtgttgtacattatctcttattttcatttgcttgcggattactgagtcgtcagtcgtcaatgataatatttgcgaaataaacctttccataaatgcttaaatatactcacagacaaaaataatacatattttatcttcaatcattattttttatttttattcctgaatttactatggaccgttttacatataaaaattttcgttaagggatatacgtagaatagtcaagcacaacttatttagcaataaaaattacaaaacttttcaaaaagaaaaaaatgtagttcagaacggtactcaaagtataatgtgagatatttttgtctgtgagtgtatatataatttgtataagtactcctttacgatccttcgatttaaattacacatagtacccaaattcgagaaatttttcacataataaatcctacttgtattgataactattgatgttaaaatcgcccttctagtactgtttctctcctgcattgctgactttgattgaggaaggagggtacgatttgaaatcaacatttcaagcacatttttgtgatttttttaactatggcagaaatatattatgtactttcaaattaaataatctatttcagcacaattcaaagaatattcaaacaaatttcaaggcaaaatattgaaaaatgaccaacgatagcaaattttaac

SEQ ID NO: 4279 - DNA, 788 bp, Diabrotica virgifera
tttttatagatctccagagagagtactttactctatacgtagaagctttgtcaaagcaagcagtctcagcgaggaaacacgccatacaccttagctgtgaagtactggataaaccacataccttacatttattggcaaatacaaaagagagtaatatatcgagtttaaagtatctattctcggcaactttaaagtattttctgaagaatccatctaaagaactactggataaagttatcgagaatatgaatagcatcgatgttaacgataaagaaactttggatagtttaaaggacgttactatacctgtcaaatacagagcacaatatatcgagaaatgttggaagtactttgaaggattgaaacaaaaggggttaaaataactgaatatttgaatgctttcctgaatcacatgtctgcagatatattattgatatcgatattgtctgcgtcatttacaagagatattatcaaccgttacttccctgttatagaggaacgtccaagttctatcgatgagtttgttatacgtgtgttacaaactcgtgtagccgaaagaaacaaaaacttccaaattgtgtttgatattttgtcgaaattctctgataatatgagaatttcattttttaaatcattcattaacaataatcccgaccaacaattactaattttgaaattggtataaaaacttcactttgatcgacagttttggtgaacatgtatctctgaaattgaattcgtttaaattggagaatttatctgttgatgatctagccaccaaaactgta

SEQ ID NO: 4280 - DNA, 782 bp, Diabrotica virgifera
tttttatagatctccagagagagtactttactctatacgtagaagctttgtcaaagcaagcagtctcagcgaggaaacacgccatacaccttagctgtgaagtactggataaaccacataccttacatttattggcaaatacaaaagagagtaatatatcgagtttaaagtatctattctcggcaactttaaagtattttctgaagaatccatctaaagaactactggataaagttatcgagaatatgaatagcatcgatgttaacgataaagaaactttggatagtttaaaggacgttactatacctgtcaaatacagagcacaatatatcgagaaatgttggaagtactttgaaggattgaaacaaaaggggttaaaataactgaatatttgaatgctttcctgaatcacatgtctgcagatatattattgatattgactgcgccattcataagcgacattatcaaccgttacttccctgttatagaggaacgtccaagttctatcgatgagtttgttatacgtgtgttacaaactcgtgtagccgaaagaaacaaaaacttccaaattgtgtttgatattttgtcgaaattctctgataatatgagaatttcattttttaaatcattcattaacaataatcccgaccaacaattactaattttgaaattggtataaaaacttcactttgatcgacagttttggtgaacatgtatctctgaaattgaattcgtttaaattggagaatttatctgttgatgatctagccaccaaaactgta

SEQ ID NO: 4281 - DNA, 858 bp, Diabrotica virgifera
  SmartBlast Evalue=7E-23; Info=Peritrophic membrane protein 2 (Fragment) n=1 Tax=Holotrichia oblita RepID=C4N882_9SCAR
ttacgagataatatatttatttatttatttgactgtatacaaaaataaattttcgacaaaagttgctgagttttgctaaaaacagtaaatacaaatttaaaaactctttggtgttactttacaatcaactctatcaggaaagtcgcaagtaagttcttcttcgtcccacaaagtaccaggtgggcatgtaaattcaatagcctgtcctcgtacacattcgtaatatttagcacaatcatcttcatctgcgaaaaaggttccgtctttttggccatcgcaaattgaatttggggtagtagaaggtccagatgtggtagttgtaactggagcacgactgcagtcaacttcttcaggaaaatcacaatagtttttgatatgattccataatctattgtgaggacaagtttcaagatatctgagtccgtggtcacattcgtaatattctgagcaattaccaggaacgaaatcatacgtaatttcattagaagggtatggacaatgaggatctggagtaaaatctgttggccgagttggatctgtcactgttgtacgtggaggctctgttccagctgagggatcgattttgcaatcaacattggatttaaagtcacaatattgtttctcttggttccaccatagatctgctgggcattccataatatttgcctttccagcaaaacactcaatatactcagcgcaattaactggatctggatagaaggttgcttcatttccaggtgtaggacattcaaaatcaatttctgccgcagtacatgctgcaattgccaaatagcatgctgttaggagatatttcattttgatttttttatatccagtacaacaatctataggccactt

SEQ ID NO: 4282 - DNA, 672 bp, Diabrotica virgifera
  SmartBlast Evalue=1E-15; Info=Peritrophic membrane protein 2 (Fragment) n=1 Tax=Holotrichia oblita RepID=C4N882_9SCAR
ttacgagataatatatttatttatttatttgactgtatacaaaaataaattttcgacaaaagttgctgagttttgctaaaaacagtaaatacaaatttaaaaactctttggtgttactttacaatcaactctatcaggaaagtcgcaagtaagttcttcttcgtcccacaaagtaccaggtgggcatgtaaattcaatagcctgtcctcgtacacattcgtaatatttagcacaatcatcttcatctgcgaaaaaggttccgtctttttggccatcgcaaattgaatttggggtagtagaaggtccagatgtggtagttgtaactggagcacgactgcagtcaacttcttcaggaaaatcacaatagtttttgatatgattccataatctattgtgaggacaagtttcaagatatctgagtccgtggtcacattcgtaatattctgagcaattaccaggaacgaaatcatacgtaatttcattagaagggtatggacaatgaggatctggagtaaaatctgttggccgagttggatctgtcactgttgtacgtggaggctctgttccagctgagggatcgattttacatgctgcaattgccaaatagcatgctgttaggagatatttcattttgatttttttatatccagtacaacaatctataggccactt

SEQ ID NO: 4283 - DNA, 750 bp, Diabrotica virgifera
  SmartBlast Evalue=2E-35; Info=Putative gut cathepsin L-like cysteine protease n=10 Tax=Callosobruchus maculatus RepID= Q717S1_CALMS
cgcaagtttgacatttcacttcatgaacgaaattctacgttttagttgaatttaaaccagaggtcaccatgaaaacagtattaatcgcaatagtaatctgttgttggctttttaatgaggctctctgtggcgttcaagatgattggaacaactttaaaaccaagtacaacaaaacatataagaatgaagttgaagaaaatgagaaatttaccgttttcaaggataacctagaagaaatccgccgtcacaacagccgctatgaggatggtttagaaacgtataaaaaaggtattactgttttcgcagatttaagtaaaagacaatttgacaaaaagtatcagctaagcagacctggagtaacgagtataatatatccaaaaacctggaaaacccgtcaagtagataaaaatttaaccaaggtagatgtagattggagaaaagaaggtgcggttactccagtgaagaatcaaggaatatgtggttcatgttggatatttagtgcggtcggcgttttagagagctaccacttcagaaaaaccggaaagctaatatccctcagcgaacaaaatgtcgtcgattgtttttctagcaactcgtgtttgggaggacttccagaagacgcccttactttcatacaaaaaaatggtgtaagtacggaagctgaatatccctataaagataaacagatggcttgtaaaccttcatctaataaaacacgcatcgattttaaatcttatcagtatataaatg

SEQ ID NO: 4284 - DNA, 744 bp, Diabrotica virgifera
  SmartBlast Evalue=7E-35; Info=Putative gut cathepsin L-like cysteine protease n=10 Tax=Callosobruchus maculatus RepID= Q717S1_CALMS
cgcaagtttgacatttcacttcatgaacgaaattctacgttttagttgaatttaaaccagaggtcaccatgaaaacagtattaatcgcaatagtaatctgttgttggctttttaatgaggctttatgtggagttgaagatgattggaatgattttaaaatcaagtacaaaaaaacctatgaggataaagaagaaaagaagagatttagcgacttcaaagataacttaaaggaaatccgccatcacaacaatcgctatgagaagggtttagaatcgtacaagaaaggcattactgtgtttgcagatttaagtagaatagagtttgagagcaaatatcagctggatagacctatgatgatgactagatattcacaaagctggaaaaatcgttatatagataaaaatttaaccaaggtagatgtagattggagaaaagaaggtgcggttactccagtgaagaatcaaggaatatgtggttcatgttggatatttagtgcggtcggcgttttagagagctaccacttcagaaaaaccggaaagctaatatccctcagcgaacaaaatgtcgtcgattgtttttctagcaactcgtgtttgggaggacttccagaagacgcccttactttcatacaaaaaaatggtgtaagtacggaagctgaatatccctataaagataaacagatggcttgtaaaccttcatctaataaaacacgcatcgattttaaatcttatcagtatataaatg

SEQ ID NO: 4285 - DNA, 809 bp, Diabrotica virgifera
  SmartBlast Evalue=6E-15; Info=Transposable element Tc3 transposase (Fragment) n=2 Tax=Camponotus floridanus RepID= E2AKN2_9HYME
tacttaattacatttgttttcaagatcacgattatttgtgctatgagctttttgaagtttatacgaggttgtcataagtttttacgaggttttttaatccctgaagatgtataggtacgtcgtggattgttaatccgataaaatgtcttattatctatacactcctggtgaaaaatccaaaatcgctaaaaagtaattataggaaaaataagtaacccaaaggaaagtaaaagtaacgcaaaaaaattaacattgctcgaagaattaaacaaaagaaacaataaaattttaattgtccacagctggctgtttttaggttttcaattcaaggatttcaataagttgctgaatctgttcttgcagtatctgttcctattatttattcaacgctattttcagctcttgaatcgcttctagcaatggttgcctctttttaatcttttcccctaaaatgtcccataaatgttctaatggattcatgtcaggactacaagcgggctaatccaagacggggattccgacagtatttaggtagtccatgacgattcgcgcagtatttggacgcacattatcctgcattaataagaaattatccccaacgaaaggggcgtaggggcaacattgtcctccagatactgtcgtatgtatctgttagagttccatgttcaatttttttgaagttatacttcttgaggcgcgattgggagtgaatttttgttattctgcgcgcatgcgcacacagacagtatggagttcgttgctaaatgttttaagttatgtatgtattagtccaaaaaaggtgtggaaag

SEQ ID NO: 4286 - DNA, 667 bp, Diabrotica virgifera
  SmartBlast Evalue=3E-17; Info=Transposable element Tc3 transposase (Fragment) n=2 Tax=Camponotus floridanus RepID= E2AKN2_9HYME
tacttaattacatttgttttcaagatcacgattatttgtgctatgagctttttgaagtttatacgaggttgtcataagtttttacgaggttttttaatccctgaagatgtataggtacgtcgtggattgttaatccgataaaatgtcttattatctatacactcctggtgaaaaatccaaaatcgctaaaaagtaattataggaaaaataagtaacccaaaggaatgttcccattcttcattcatcgctattttcagctcttgaatcgcttctagcaatggttgcctctttttaatcttttcccctaaaatgtcccataaatgttctaatggattcatgtcaggactacaagcgggctaatccaagacggggattccgacagtatttaggtagtccatgacgattcgcgcagtatttggacgcacattatcctgcattaataagaaattatccccaacgaaaggggcgtaggggcaacattgtcctccagatactgtcgtatgtatctgttagagttccatgttcaatttttttgaagttatacttcttgaggcgcgattgggagtgaatttttgttattctgcgcgcatgcgcacacagacagtatggagttcgttgctaaatgttttaagttatgtatgtattagtccaaaaaaggtgtggaaag

SEQ ID NO: 4287 - DNA, 1280 bp, Diabrotica virgifera
  SmartBlast Evalue=4E-70; Info=Deoxyribonuclease ii n=1 Tax= Aedes aegypti RepID=Q16M58_AEDAE
ggtttattttctcagttaaaatttttaaagttaacaaatattggtaatttattaataaaatatggaaccctagtatacccccagagggaaacttgctgaaaaatgttgctaaatagtttgcaaaataagacggaattattctctatagaatatatatattatataaaattttatacattaatcactgtcggaatatcaaaggactcctttcttgggcactcttctacggcactaattaacttgtggaaatttgtagataatttttgattttgtaggcacacagttccaccacccctttccagttgatgttgcgcacgattgatatctcctacacaactccacgaactgctggaatttgaagttacagcccatttggaatggtcgctagtcgtattaaatgatacgttaacgacagacatattgatcttctgaatattgtttaccttatatacacggctacaattggaatgtaatctaccagccccatttggccatgtttcaaccactaaatcttgttttaagtatggagccaccagatcttcgtacagttcctggttgaattttctgtgtttggcgaatgaggtaaaggccactttcttctttgaatagatttgggcaacacgatagaatggagcggacttaacagtgacattttgagctgcacttgctagatctggtacacgagttttaatatctgagagtacctgctgcaggtagatgtggggttggttgtactgaagttgaagacctactgcatttatgtttgttaaattcattgtaacacaaagaaaggtttgcccatatttgacgcccgtgctaggaaaggagtagctattgcccacttcaggaaatttaggaacggaatgaattaaccagtaacctcctgctgtatttgaaataacaactcctttcgtgtgacctttcgctgcagatattggatgatttggtggttcatcgttgtacaaaatataacttaatttggttctattgtaataaaagtcatgaagagtgtttccaataagggaactattatcaccaatcgaacgtttagaaaaagtccatgtcgatgaattggtagatgttaaataaatatgtccaagaccagccttaattatatctccacgaccactttggataggtattttgtatgcaacaaaccaatctacatcacgattgttttcgtctttacaactcagagcatttgttcttccagcgataaaatacaagcaaagaaaaaacagtatttgtgaagacattgcaagagcgaagtgacaaatgtg

SEQ ID NO: 4288 - DNA, 720 bp, Diabrotica virgifera
  SmartBlast Evalue=6E-12; Info="SI:dZ69G10.3 (Novel protein similar to human transmembrane protease, serine 3 (TMPRSS3)) n= 1 Tax=Danio rerio RepID=UPI0001E91CD5"
gacactgacacaatgttagtcagtgattgcgattactattaaaattctaattatatgttttaatagtttccgattaagtaaaataagttaatacatatttttgcaatatgacacctgctattgtttgtgatattttagtgattgcgtgttttgtgcactctgttttagctaccaatataataaagaataataatctacagcaaatagattttggcttggataaagaacaggattttccttaccaagtatccgtccatttgaattataacaaccaatttgtttgtggagcagtagtaatcgctgaagatcaagtacttactttggcgcattgtctttattacgattggggaggtcttttaccgcctataataatatctgttaatagcggcggaaaaatgttaaatactgaagagtatgaatctttttctgtatctgatataagatttcataaagagttcaacacatctgagatgaaatatgatttagccgtgttagatataccagttaagttgatgtcaaaaaactcacccatcattcccataggattacaaagtgattcgatgccttccaggtacgacaactgtatagctaggatggaataacgtttcgctaatcaggaggtgatagatgtggtcttgactgattgtaacattgaaacgtctacaaaaatgtgcgcaaaacataaggcggaaaatgaaactttatgtaacatggttcctg

SEQ ID NO: 4289 - DNA, 717 bp, Diabrotica virgifera
  SmartBlast Evalue=6E-10; Info="SI:dZ69G10.3 (Novel protein similar to human transmembrane protease, serine 3 (TMPRSS3)) n= 1 Tax=Danio rerio RepID=UPI0001E91CD5"
gacactgacacaatgttagtcagtgattgcgattactattaaaattctaattatatgtgttaatagtttccgattaattaaaataagttaatacatatttttgcaatatgacacctgctagtgtttgtgatattttagtgattatgtgttttgtgcactctgttttagctaccaataacataaataataatctacagcaaatagattttggcttggaggaagaacaggattttccttatcaagtatccgtccatttgaattataacaaccaatttgtttgtggagcagtagtaatcgctgaagatcaagtacttactttggcgcattgtctttattacgattggggaggtcttttaccgcctataataatatctgttaatagcggcggaaaaatgttaaatactgaagagtatgaatctttttctgtatctgatataagatttcataaagagttcaacacatctgagatgaaatatgatttagccgtgttagatataccagttaagttgatgtcaaaaaactcacccatcattcccataggattacaaagtgattcgatgccttccaggtacgacaactgtatagctaggatggaataacgtttcgctaatcaggaggtgatagatgtggtcttgactgattgtaacattgaaacgtctacaaaaatgtgcgcaaaacataaggcggaaaatgaaactttatgtaacatggttcctg

SEQ ID NO: 4290 - DNA, 709 bp, Diabrotica virgifera
gaactttgcgattgttattgttgttatgtgttatgttttttagtttttacgtttcaattcaattgttctgttcctgtcttcctttcactggttctggtttaagttcaattcaactcaactaaaattcggtgcccatgatgtgttatatgttgtagttgtattggaaacatcgtctacagtaaacttttaggtttgaaaatccctctcaaaatcttgaaggctacacccaagcagaatattaagagaattagacaatagatataagtacagacactgatcgctgaggcaagacaaaagtgtttcctccagtgttaacgaaggacataacccataaaaagaagaaaatatggtggggttattgtgaccttgtttcatgttaatatggttctgaattgaaaatatattcctagtacaccacttgtacacttggttactctactctggagtataaacacaatactgaaacagataaaatcatgtctgatcaaatagaagtaaaacaagaatttagtgaagtgtgtaaaaaagaagaagacgatgatgaggtgggtgatgcactacaggatacctttaaaatcgagatcaaggaggagcctaagagggaaagtgccagtgatacatttgattctgcagaccttaacgagtatcctataaaaactgaagaagaacaagatggtgtctcttgcgaagacatccaaaatgatgcacg

SEQ ID NO: 4291 - DNA, 698 bp, Diabrotica virgifera
gaactttgcgattgttattgttgttatgtgttatgttttttagtttttacgtttcaattcaattgttctgttcctgtcttcctttcactggttctggtttaagttcaattcaactcaactaaaattcggtgcccatgatgtgttatatgttgtagttgtattggaaacatcgtctacagtaaacttttaggtttgaaaatccctctcaaaatcttgaaggctacacccaagcagaatattaaaagaattagacaatagatataagtatagacactgatcgctgaggcaagatgtgtttgatccagagttaacgaaggacataaccagtaaaagaagaaaatatggtgggaatatgctatgactttgtttcattgttctgaattgaaaatatattcttagtacaccacttgtacacttggttactctactctggagtataaacacaatactgaaacagataaaatcatgtctgatcaaatagaagtaaaacaagaatttagtgaagtgtgtaaaaaagaagaagacgatgatgaggtgggtgatgcactacaggatacctttaaaatcgagatcaaggaggagcctaagaaggaaagtgccagtgatacatttgattctgcagaccttaacgagtatcctataaaaaccgaagaagaacaagatggtgtctcttgcgaagacatccaaaatgatgcacg

SEQ ID NO: 4292 - DNA, 717 bp, Diabrotica virgifera
gccggtacagtttttttgaaaatataatcgaatagtgacaatttttacaaaggtttaacttgacgcgaaagtatggaatcgatagagcttaggctcgacgcacacttacgcgtcttcaagtcgcgtgcacactgcgagcaagtcgcgtgcacactgcgagcaagttgcgggcgcttggcttgtttgttttccgtcaatgtacatttgagtgatttctcagtgtcaatacgttgaaatccatcgcgcggtcaatgtgtactcactgactgcctagcacagactgccaaaccgcccgacttgtgcaagtagcttgcacgccgcggctccgttcgagtgtgcagtgcctaattacaactcatgtactgctgaaccaccagcgaccgaacgcagcttgcacgcgacttgaagatacacaagtgtgcatcaagcgttagtgacactggtctcaagtattcccgataagcataaatgcagatatttttaacattgttttcggatataatatcctcgaaggtaaattttaacaccacgatagaaggaattaatataagctgatagaatcagaaaaattaaaaacgaagatcgtgcactacagtgaacatcttcaacagcatgttacattttttatacttacaaatacacatttattataggtaagaaacgtaaaaggctttagaaaaagaaccgagtaaaatcatatcaatttatcataatata

SEQ ID NO: 4293 - DNA, 695 bp, Diabrotica virgifera
gccggtacagtttttttgaaaatataatcgaatagtgacaatttttacaaaggtttaacttgacgcgaaagtatggaatcgatagagcttaggctcgacgcacacttacgcgttttcaagtcgcgtgcacactgcgagcaagttgcgggcgcttggcttgtttgttttccgtcaatgtacatttgagtgatttctcagtgtcaatacgttgaaatccatcgcgcggtcaatgtgtactcactgactgcctagcacagactgccaaaccgcccgacttgtgcaagtagcttgcacgccgcggctccgttcgagtgtgcagtgcctaattacaactcatgtactgctgaaccaccagcgaccgaacgcagcttgcacgcgacttgaagatacacaagtgtgcatcaagcgttagtgacactggtctcaagtattcccgataagcataaatgcagatatttttaacattgttttcggatataatatcctcgaaggtaaattttaacaccacgatagaaggaattaatataagctgatagaatcagaaaaattaaaaacgaagatcgtgcactacagtgaacatcttcaacagcatgttacattttttatacttacaaatacacatttattataggtaagaaacgtaaaaggctttagaaaaagaaccgagtaaaatcatatcaatttatcataatata

SEQ ID NO: 4294 - DNA, 690 bp, Diabrotica virgifera
taatattattaatgaacaaaaaaaataatttgtttaaacaggtaaaaaatcatattttctcaaaaaacttctattttttttattcaattctaattaatcgtctactcctataaggataaaacatgtctgtatctttaaaattaaagtaactttttttaattgttgtaaacaaattaatggaaattaaaaaactattcctactttttgtctaatcgtcccagaataactatccatttctttcatgtcattaaataattttaaaacaaaatttttgcattagaattttcaaataaaatagttaatttttttaatataagtatgttgaagtataaatcttctactttcatttggcttccgtagaattgccttatcttcattatttcttctatgttattgcagaaaggatatctgggataaacaaatggaataactttgaaaccaattgatggatctcaaaggtttgagatccaatttgaggggtctcaaattttgaaggtttgttaagtactccaatactcagctttgggtgaaataccaaaattatcagttaattttgataatagttattaacacatagcgtttttgtcttattatttgagaagcaacaaattgactttttaacttttttaagtttttaaaaaatcaaattttgtagttttgtgtcagctatttagctttataatgaggcgc

SEQ ID NO: 4295 - DNA, 678 bp, Diabrotica virgifera
taatattattaatgaacaaaaaaaataatttgtttaaacaggtaaaaaatcatattttctcaaaaaacttctattttttttattcaattctaattaatcgtctactcctataaggataaaacatgtctgtatctttaaaattaaagtaactttttttaattgttgtaaacaaattaatggaaattaaaaaactattcctactttttgtctaatcgtcccagaataactatccatttctttcatgtcattaaataattttaaaacaaaatttttgcattagaattttcaaataaaatagttaatttttttaatataagtatgttgaagtataaatcttctactttcatttggcttccgtagaattgtattattattatgttattgcaaaaaaaatatctgggataaacaaatggaataactttgaaaccaattgatggatctcaaaggtttgagatccaatttgaggggtctcaaattttgaaggtttgttaagtactccaatactcagctttgggtgaaataccaaaattatcagttaattttgataatagttattaacacatagcgtttttgtcttattatttgagaagcaacaaattgactttttaacttttttaagtttttaaaaaatcaaattttgtagttttgtgtcagctatttagctttataatgaggcgc

SEQ ID NO: 4296 - DNA, 702 bp, Diabrotica virgifera
tcctggagggactctttcgttgttatgtctgcgtctccattatttgtttgtcacgctctctctgcaagaaccatatattactcgaaggattttacgtttccacaccagcaatttatttacttctttttcgttggcatccatgattcgcttccatacgtgactgctggccatattattatggttttgtatatctggcacctcgttagagaagttttgatctcattaaacgttgcattgcaaagaaagatctgtttttaaacttttaactagttcgaaggtatgatcgtttatagtaacattttgtcttattcgccttcgtttttggtttgtcttcaatggcgagaacgatttttgcagccctagcagctatgtctggtatgattttaagattaatttttcgcatgacatattttaaggccaggttaaacagcaatggggacagcggatctccctgtctcagtccggaatttacacagaaagcattttttcatcttattctaacttgtgcaaaggagttacttacacacatttacgttaccgcagctaatttcttaggtatgtccagctcaactataccattccatagtcttggacgaattgtaactgagtcataagcatgtttgaaatctataaagatctgatgcatgccttattacactaatcttacgaatatgtcaacggtacggctaggcagaactcaag

SEQ ID NO: 4297 - DNA, 679 bp, Diabrotica virgifera
tcctggagggactctttcgttgttatgtctgcgtctccattatttgtttgtcacgctctctctgcaagaaccatatattactcgaaggattttacgtttccacaccagcaatttatttacttctttttcgttggcatccatgattcgcttccatacgtgactgctggccatattattatggttttgtatatctggcacctcgttagagaagttttgatctcattaaacgttgcattgcaaagaaagatctgtttttaaacttttaactagttcgaaggtatgatcgtttatagtaacattttgtcttattcgccttcgtttttggtttgtcttcaatggcgagaacgatttttgcagccctagcagctatgtctggtatgattttgggataaggccaggctaaacagcaatggggacagcggatctccctgtctcagttcggaatttacacagaaagcattttttcatcttattctaacttgtacaaaggagtttcttacacacatttacgttaccgcaactaatttcttaggtatgtccagctcaactataccattccatagtcttggacgaattgtaactgagtcataagcatgtttgaaatctataaagatctgatgcatgccttattacactaatcttacgaatatgtcaacggtacggctaggcagaactcaag

SEQ ID NO: 4298 - DNA, 682 bp, Diabrotica virgifera
ttagataagtacacatcgattaatagcggagaaccacaagataagtagagaaaaataaatatataaagattaaaagaggagtgaaacagggatgcatgttgttcccatatatttttaatatttaaccttaatagcgaagctatctttatgaaagcattatcagaggaagaatgcggtatattaataaacggaaaaatattacacaatataagattcgcagatggtaccattattttagctggcattgtataatcactacaagtggtgtcatggtgcgggaacgccgttccggcactggctaagaaaaaaaaatttaggttttgtaaataaatcacggaatttttgaattaagcaaatgcatacacattttaaaatatgcagacgtaacttgtattaaaaaaacatagagtaatattttacttgtaaaaaagttaaggaaagtgcgttcctgaactgctaattttgccatgacaccactgatcactacaacacatttggtaaataaagcaaatcaatgccgtatctaatacatacttgaaatatccgtgaaaagaacaatttcatgatcattacaaagctacatatactagccatcgaaggaaaacaatttatagtaaataaaaagtataaatccaaataatttaaaattggtgaaacataatgtaaagaatactaacgggac

SEQ ID NO: 4299 - DNA, 645 bp, Diabrotica virgifera
ttagataagtacacatcgattaatagcggagaaccacaagataagtagagaaaaataaatatataaagattaaaagaggagtgaaacagggatgcatgttgttcccatatattgcatatcccgcagaggaagaatgcggtatattaataaacggaaaaatattacacaatataagattcgcagatggtaccattattttagctggcattgtataatcactacaagtggtgtcatggtgcgggaacgccgttccggcactggctaagaaaaaaaaatttaggttttgtaaataaatcacggaatttttgaattaagcaaatgcatacacattttaaaatatgcagacgtaacttgtattaaaaaaacatagagtaatattttacttgtaaaaaagttaaggaaagtgcgttcctgaactgctaattttgccatgacaccactgatcactacaacacatttggtaaataaagcaaatcaatgccgtatctaatacatacttgaaatatccgtgaaaagaacaatttcatgatcattacaaagctacatatactagccatcgaaggaaaacaatttatagtaaataaaaagtataaatccaaataatttaaaattggtgaaacataatgtaaagaatactaacgggac

SEQ ID NO: 4300 - DNA, 655 bp, Diabrotica virgifera
  SmartBlast Evalue=4E-46; Info=Mitochondrial acyl carrier protein 1 isoform B n=1 Tax=Tribolium castaneum RepID=D6WXY4_ TRICA
cgtcattatccatctgctttgccatttccatcttcatttttcattttctactgccataaaaataatttaactggtgcagttttagaaattataagaaatggctagtttattagcgaaaagctttagggcagtgtgtagaaactcctcgtctttacgatctttcagtacaaggcctttggcagtcacattagtaaatagatgcagtgatattttacaaaatagctcacaaagtaaacctggttctttgatcgatatacagagacttgtttcaccacaacagagaagttacagttctaagccaccactgactttgcaactcattggtgaaagagttttgttagtattaaaattgtatgacaaaattagtccagaaaagctgactttgaactcccacttcatcaatgatcttggattagattccctagaccatgtcgaagtcatcatggcgatggaagatgaattcggctttgaaatcccagatgctgatgccgaaaaattactgagacctgcagatattgtgcggtacgttggggacaaagaagatatctatgaataagtaatgaaatatgtaaaaatataaagtaaattactgtactcctgtcatatagtgttaattaagtttattaaatattattaaataaaatattaaattatt

SEQ ID NO: 4301 - DNA, 646 bp, Diabrotica virgifera
  SmartBlast Evalue=3E-47; Info=Mitochondrial acyl carrier protein 1 isoform A n=1 Tax=Tribolium castaneum RepID=D6WXY5_ TRICA
cgtcattatccatctgctttgccatttccatcttcatttttcattttctactgccataaaaataatttaactggtgcagttttagaaattataagaaatggctagtttattagcgaaaagctttagggcagtgtgtagaaactcctcgtctttacgatctttcagtacaaggcctttggcagtcacattagtaaatagatgcagtgatattttacaaaatagctcacaaagtaaacctggttctttgatcgatatacagacaagattctattcaccagaggtaataaaacctaaaccttctgaagaagaaatcaaacaaagggtgctgaaagtgtgttcttcatatgataaagtaactgcagaaaagctgactttgaactcccacttcatcaatgatcttggattagattccctagaccatgtcgaagtcatcatggcgatggaagatgaattcggctttgaaatcccagatgctgatgccgaaaaattactgagacctgcagatattgtgcggtacgttggggacaaagaagatatctatgaataagtaatgaaatatgtaaaaatataaagtaaattactgtactcctgtcatatagtgttaattaagtttattaaatattattaaataaaatattaaattatt

SEQ ID NO: 4302 - DNA, 635 bp, Diabrotica virgifera
tatcaatattaatatcacaagacagtgagaataaagtgacaataatccgacaatttttcgaaagcttgttgcccagcaaggaaatattcagacgaaggtatcaataaaatgttagtaaaaattattttataaatacagttttattcatgaaataatcttaccgaagtacactcgagtgcttaaaattgccgatttttatccgaaattgccgattttattttttgcggaaagattaaaatgtaatggttgctcgtgtaagagtcgagcgcgtacaaaattgccagtatggcacgctcgtgtaagagtcgagcgcgtaccttaaggggttattagatatacaaaataaattgaattgttcaaatgcttttaataaacatgctaaaatcaatgcttgtgttgtgactttatcgagtattgtttctgatgcaatgtcactattagtcttacactagctttataaattattgataagttgaagtttgaaaaaactggcagaagcgttaataacactttgtggtttcgctacacaggccatattgtataagatgctaagtaacgcaaccaatataggccaggaaatgaaccattctggttcgcctatttttttcgtccagcatggatttacttgaaatttt

SEQ ID NO: 4303 - DNA, 603 bp, Diabrotica virgifera
tatcaatattaatatcacaagacagtgagaataaagtgacaataatccgacaatttttcgaaagcttgttgcccagcaaggaaatattcagacgaaggtatcaataaaatgttagtaaaaattattttataaatacagttttattcatgaaataatcttaccgaagtacactcgagtgcttaaaattgccgatttttatccgaaattgccgattttattttttgcggaaagattaaaatgtaatggttgctcgtgtaagagtcgagcgcgtacaaaataaattgaatttttcaaatgcttttaataaacatgctaaaatcaatgcttgtgttctgactttatcgagtattgtttctgatgcaatgtcattattagtcttacactagctttctaaattattgacttcatctcatcattaacacttcagtgttaatgataagttgaagtttgaaaaaactggcagaagcgttaataacactttgtggtttcgctacacaggccatattgtataagatgctaagtaacgcaaccaatataggccaggaaatgaaccattctggttcgcctatttttttcgtccagcatggatttacttgaaatttt

SEQ ID NO: 4304 - DNA, 602 bp, Diabrotica virgifera
  SmartBlast Evalue=3E-43; Info=UPF0139 membrane protein pMsmaA27 n=1 Tax=Harpegnathos saltator RepID=E2C9C5_9HYME
tgtgaacattagatcgaaaaataatcaaaatattattcacattaaaaggtatgtgcgtatttaactaatacattatcatagttcattgttgaagactcttgttaacatctaatatcaattgaaatgaatgccgatccccgcagacctgaaaaagtatcaagatatgttccaaaagctaccaatgggactggccaagaagacctcacccctgattacatgaatatcttgggtatgatctttagcatgtgtggtcttatgatgcgtttaaaatggtgtgcttgggtagctctatattgctcctgcatcagcttcgccaattctagaattacagacgacaccaaacagatcctgagttcgtttatgttatctatatctgcaatcgttatgtcgtacttacagaatccacaacctatgactccaccatgggcttctgcaactagttagaacttattgcaaacatcgaagaaaccaaaaatgtaactttcaattttaatttctattgatgtatattgttaggagcatattatgttaaaggattatagcaatggtagattatgtacaaactgttaatttgaaataaaattcatattataccgtaaaaa

SEQ ID NO: 4305 - DNA, 602 bp, Diabrotica virgifera
  SmartBlast Evalue=3E-43; Info=UPF0139 membrane protein pMsmaA27 n=1 Tax=Harpegnathos saltator RepID=E2C9C5_9HYME
tgtgaacattagatcgaaaaataatcaaaatattattcacattaaaaggtatgtgcgtatttaactaatacattatcatagttcattgttgaagactcttgttaacatctaatatcaattgaaatgaatgccgatccccgcagacctgaaaaagtatcaagatatgttccaaaagctaccaatgggactggccaagaagacctcacccctgattacatgaatatcttgggtatgatcttcagtatgtgtggtcttatgatgcgtttaaaatggtgcgcctgggtagctctgtattgctcctgcattagcttcgccaattccagaataacagatgacaccaaacagatcctgagttcgtttatgttatctatatccgcaatcgttatgtcgtacctacagaatccacaacctatgactccaccatgggcttctgcaactagttagaacttattgcaaacatcgaagaaaccaaaaatgtaactttcaattttaatttctattgatgtatattgttaggagcatattatgttaaaggattatagcaatggtagattatgtacaaactgttaatttgaaataaaattcatattataccgtaaaaa

SEQ ID NO: 4306 - DNA, 1203 bp, Diabrotica virgifera
ggttttgtcttgtgacccttttttggggtattttaaaatatacctttaatctagtatttttgtaaaatattggttatttgacatttatttttccttatgtttattatttatatttattgttcataactgaattgtacactgccctgtatcagctttattcttttctttttatatgtaaaaattcttaataactcatcatattttccgttaagtttttgacgaatttgaaatgtggcaacagcgcaataatttataattcggcgctttggtgaaatttgtgaagatcatgacctagttactgtagttctaatttgattgttcactagagccacattgtttttgatagtgactaatctttgcagtattcacatgtgactcttcctgtaactgaccatttcctaggtcctagagaaacacctacgttttctatttgtgagtacaaactgccgggaaaagggctcttagcgtatatttcgttgacaatttagatataggtaaacagtctgacagttcgcattatcagatacatatctgttgttcgtagtagatacgcaggatgtacatataagttcattttaatgactaaagagcaaacctaggaacattttgatagtttttcatgggaccatataaaaatggcatccaacatgtgtataaagtgttttcttcgtgcttgtctccttgttcattttttaactgcgtaaattttacaatctcctcacttattactttgtcgacgtatatatccgtttatatacgtctactgattccgaaatgagtgtatgagcccagtatacataaaagaacaaattcacgttttctcccagtcaatattaattgcatagaaatcaggatatatccgtcctcacttctactggaaacaagtgtataggatttgacatggttgtgtaaggtcagcatgaagtagtacgttatttttccattcagtgtaagtttaatacaagtgtgataaaggttacaataatctactttaatgttagaactttgtatggatatatcagtcatcaaatttagtggaaacaaaggatctgatatccactgacaaaaagttatgatatcattaaatttaacaattgtacttatgttatcgatgtaaaatattcaaacataaagagtgcattaaacaagttgatgacgtataaatccggaaaactctaatttctctatgaatcagtggagttt

SEQ ID NO: 4307 - DNA, 999 bp, Diabrotica virgifera
  SmartBlast Evalue=0.000000005; Info=Endonuclease-reverse transcriptase n=1 Tax=Bombyx mori RepID=D5LB38_BOMMO
aatctttcataaataacgttcacctaagcttagcagtaatgtattttatttaacaatattctaaaaataaacattatttctacaatgtaatatttagtgataagtaactgtatttgttggaacagttgcgtttgtttatcagttgttaatggaaatcctatcaaaaatatttttgtaccacatgtgataaagaacattttatcggttagaaagatgtttcttgtaaataccaggaagttagtcatacatatttacattgtttatttgtgtaggatttcgtaatgcataaagagagaactcggttcagggtcttcaatgattacaatgaaattgataaaggagcattactcaagtctgcataactgttgtatgtttaaaattaaactaacatttatttttttcccaaaattattctattttatattcgaagactttaatgaatattggagttattttttactgttttattatttattgcgtctttgttatattatgttttttgtttcttgaaactcatttaatttgctgcttctgttgagccttttgaatttgtgtttaatttatttttacaccacgcgtattaaaagctttttcttcttcttcgggtgccatttcctctacggaggttgacaatcatcatagctattttaatttttgaggcagcagctctaaataaaccattctctcaggttcttcaaccatgaaattcgtcttcttccgatgcttcttctgccatctatctttccttgcattatgagtcgcaggatgccatacttctcgcccgcatcacatgtcccagatactgtagctttctctctttaattgtaagttcaacttccttctctttacttattcttctcagtacttcattgttccgtaactatatatatccaggaaaccctcataattcttctataggtccacatttcaaaggcgttaagtcgtctcattgtctctagatttaacgtctatgattccactccatagtatagttcactg

SEQ ID NO: 4308 - DNA, 919 bp, Diabrotica virgifera
  SmartBlast Evalue=1E-112; Info=Ribosomal protein S6 n=2 Tax= Cucujiformia RepID=D1M807_9CUCU
ttattaagcaacaacgtttatttcatacattgtcttaaaatataaaaaattacaatttacttctgaccactctgcgtgctggatttactatcacgcatactggcagacctacgcctcttcaacatctcacgacgagccttggattccttcttacgttgagccaatagtttagcatatgcatcttcttgttctttacgtttaaggcacctcttcttcttcaaagcaagacgatgacgttttctttgcaaaacaacgggtgtaataagacgttggattttgggggccttggttcttaacttcttaccttctttttgggccaaaggtctctttactacatattgacgtacatcgtcttctttgctaaggttgaagagcttacggattctggatgctctcttgggtcccaggcgacgtgggatggtggtgtcagtaagtccgggaatttcttgttctccttttcttacaatgactagggccaacacgctgaggttcccatcaacaatgcacccacgaactgatttccttttacgttcaccggtacgtctgggtctgtagcaggagtgaccttttgaaagtaaaagtcttactctaccgtttgtaagaacaccttgtttcatggggaatccttgtttgtcgttacctccagatattttcaagatgtagcccttccattcgtcaccaagagcatcagcctcaacttcttgacccatgcgtttttcgtaaaagatacgaattttgtgttcgtcaacaacttcgaaaagtttttggcaacccgtggccgggtacgatacgttcaacttcatattgacttattttgcactcgaaaactactatttcacactttatttttggcaaattacactaaatacgggaaaaacttctcgttagtgtgcacatggaactgccatgtttcaaaaag

SEQ ID NO: 4309 - DNA, 545 bp, Diabrotica virgifera
  misc_feature (7)..(7): n is a, c, g, or t
  SmartBlast Evalue=2E-67; Info=Ubiquitin-60S ribosomal protein L40 n=75 Tax=Eukaryota RepID=RL40_DROME
ttttttnttttttaggattgatgtcatttcctataattagttaaataaatgttcaagtaacatctggaattgtaagatattaacattgtaaaaaataacctcgtaatagtctactttagcttcttcttggggcgcaagttgttggtgtgtccacacttcttctttctgcagttggtggcccttgggtgtaacctggcgtaacatttacggcagatcatcttctcgcagttgtacttcatggctaaaatacgaagggaaggctcgatgagacctcctctcagtcggagcaccaagtgaagggtggattccttctggatgttgtagtctgacaaggtacgtccatcttcgagttgttttccagcgaagatcaaacgttgctggtctggggggataccttctttgtcttggatcttagctttaacattttcgattgtatcggatggctcaacctcgagggtgatggttttaccagtgagagttttcacgaaaatttgcattgtggaagtgtttattccacaacgtgctaacttccgaatgaaaaagac

SEQ ID NO: 4310 - DNA, 544 bp, Diabrotica virgifera
  misc_feature (7)..(7): n is a, c, g, or t
  SmartBlast Evalue=2E-67; Info=Ubiquitin-60S ribosomal protein L40 n=75 Tax=Eukaryota RepID=RL40_DROME
ttttttntttttaggattgatgtcatttcctataattagttaaataaatgttcaagtaacatctggaattgtaagatattaacattgtaaaaaataacctcgtaatagtctactttagcttcttcttggggcgcaagttgttcgtgtgtccacacttcttctttctgcagttggtggcccttgggtgtaatctggcgtaacatttacggcagatcatcttctcgcagttgtacttcatggctaaaatacgaagggaaggctcgatgagacctcctctcagtcggagcaccaagtgaagggtggattccttctggatgttgtagtctgacaaggtacgtccatcttcgagttgttttccagcgaagatcaaacgttgctggtctggggggataccttctttgtcttggatcttagctttaacattttcgattgtatcggatggctcaacctcgagggtgatggttttaccagtgagagttttcacgaaaatttgcattgtggaagtgtttattccacaacgtgctaacttccgaatgaaaaagac

SEQ ID NO: 4311 - DNA, 516 bp, Diabrotica virgifera
cagaagtcatcaatttagcagaagatcttattaaatgcactagttctttcttccaagataattttgataacggatatttaacccaggaagaattattattgattttttcgaaaacgcacacggctctgctgatcctcccagcattgctaaaacgtatacagaagatatcgaaggactactcaattttttaactaaaatccatccagcattaactcccaagtatctgaaaagtcgctgtacaagattaaaaaactaagattaataaacagctattattatccgctttctctactgatcacagtgaatacagcagcgacgcctctgctgaaatttaatacaacattcaactgtatactgcaatggaacctaaatgggtattacacccatttagaagaacttaaattaattatagctaagtttaaaccatctgtaatatgcctacaagaaacccacttcaaagaagataactgtcataatttaagaaactatactccgtactataagaacagaataact

SEQ ID NO: 4312 - DNA, 494 bp, Diabrotica virgifera
cagaagtcatcaatttagcagaagatcttattaaatgcactagttctttcttccaagataattttgataacggatatttaacccaggaagaattattattgattttttcgaaaacgcacacggctctgctgatcctcccagcattgctaaaacgtatacagaagatatcgaaggactactcaattttttaactaaaatccatccagcattaactcccaagtatctgaaaagtcgctgtacaagattaaaaaactaagattaataaacatcataattcactgatcagaacagtgacacctcttttgacatttaatacaacattcaactgtatactgcaatggaacctaaatgggtattacacccatttagaagaacttaaattaattatagctaagtttaaaccatctgtaatatgcctacaagaaacccacttcaaagaagataactgtcataatttaagaaactatactccgtactataagaacagaataact

SEQ ID NO: 4313 - DNA, 544 bp, Diabrotica virgifera
gagtttgtttatatatagttatcgttttcccactaatgtctttccggggtgtacctagaacattttttgggccacaataattctccattcgttttatgtgctctcaccaacgatttctatttaaaggaatgagaagtcccagatccgtaaatctgaaaattctcgtggaaccaatttctggatacttcctttatctctgccttttacaatttataaggcaaggagacgacgaataaagaagacgaaagggacattacaatatgcaatcacattccatctactcgtctaggaataattccagcgaaagttgtgaccccacgaatgggagccatttatatagcccgcctagacacgttaaattaaataaacaaaaaaatatattcaaacagtctagtttcctaaacaggtgcaaaatttatgtaggtcataggcatgatgttcttgatgctactttttgggattccccggtaagctacggtcttcagagattaaaggggtgggtttttaaaataacaattattattaaaagatattattgggcgcc

SEQ ID NO: 4314 - DNA, 465 bp, Diabrotica virgifera
gagtttgtttatatatagttatcgttttcccactaatgtctttccggggtgtacctagaacattttttgggccacaataattctccattcgttttatgtgctctcaccaacgatttctatttaaaggaatgagaagtgccaaggagacgacgaataaagaagacgaaagggacattacaatatgcaatcacattccatctactcgtctaggaataattccagcgaaagttgtgaccccacgaatgggagccatttatatagcccgcctagacacgttaaattaaataaacaaaaaaatatattcaaacagtctagtttcctaaacaggtgcaaaatttatgtaggtcataggcatgatgttcttgatgctactttttgggattccccggtaagctacggtcttcagagattaaaggggtgggtttttaaaataacaattattattaaaagatattattgggcgcc

SEQ ID NO: 4315 - DNA, 503 bp, Diabrotica virgifera
aattttattagaagtgatctttccaaactgaagaaattattgaaggctgattgaatttaagcccttcaagaaccagaaactacgcttttgaagaagttgttatgcagttactggtattaataccaataatcgattggaagagccgtcctgaagcacatgtaaaaaatcaaaaggaatcctttcatgatttaaaacattgcgtgccacgctttactcgggagaatagtctcaggggccattgatatccacggtcataaagtatacacatacgcgtatatcaaaatgcgacgtggcccctggcaaaatatctgtgtctctcatatatgagcgacgtggcacgcaatgtgttaagaaaaagataccttctttcgatgggattatagagagtgggtaatcacaaatagacaatatcgataattttttatgaatattgcaacacaaaaaaaatgaatgttttgcaacccttgcccataaaagaataaattactggtactagagtccat

SEQ ID NO: 4316 - DNA, 434 bp, Diabrotica virgifera
aattttattagaagtgatctttccaaactgaagaaattattgaaggctgattgaatttaagcccttcaagaaccagaaactacgcttttgaagaagttgttatgcagttactggtattaataccaataatcgattggaagagccgtcctgaagcacatgtaaaaaatcaaaaggaatcctttcatgatttaaaacattgcgtgccacgctttactcgggagaatagtctcagggcaaaatatctgtgtctctcgtaaatgagcgacgtggcacgcaatgtgttaagaaaaagataccattcgatgggattatagagagtgggtaatcacaaatagacaatatcgataattttttatgaatattgcaacacaaaaaaaatgaatgttttgcaacccttgcccataaaagaataaattactggtactagagtccat

SEQ ID NO: 4317 - DNA, 485 bp, Diabrotica virgifera
tgcaatcaagttattgcagtaaaccttaatatgcagctaattacaaatttatttttatttgagtataagaaaaattattggaaaaaatcctttgtaaaaggtataaaaacttttattaaaatcactttaagggctacatcacaacaaaacgcttttgattttcttacaaaatcatcatcagtgtaatattaaacctaaaaataagtataaccgttttaatgaatacaaagttgatatttgttgatgttaatcttttgtacatttaattattatacctgctcttatgtatgtttacctcttgaaacttaaagtcaccactcaaatacaaatgactttgtaatatgattgagattaaggttttctgcaacaacttgatggcgactgtagttcaacttaagttgagatataagtaaagtcaattaaatcatggcataggtggttccatgacatctcgtaacgcgacggttcgtggccggacagttggt

SEQ ID NO: 4318 - DNA, 445 bp, Diabrotica virgifera
tgcaatcaagttattgcagtaaaccttaatatgcagctaattacaaatttatttttatttgagtataagaaaaattattggaaaaaatcctttgtaaaaggtataaaaacttttattaaaatcactttaagggctacatcacaacaaaacgcttttgattttcttacaaaatcatcatcagtgtaatattaaacctaaaaataagtataaccgttttaatgaatacaaagttgatatttgttgatgttaatcttttgtacatttaattattatacctgctcttatgtatatttacctcttgaaactttagattaaggttttctgcaacaacttgatggcgactgtagttcaacttaagttgagatataagtaaagtcaattaaatcatggcataggtggttccatgacatctcgtaacgcgacggttcgtggccggacagttggt

SEQ ID NO: 4319 - DNA, 448 bp, Diabrotica virgifera
aagcttttacatatttaattaaaattgtataatttataaaatttatgaaaaacataatggaaatattttaaaaattataaaggttaatgaagcatagtacagataaaacgtaagtgtataataacgggaatgataaataggcacaaatatagttaacatatagaaacactgtggcagacaaccataattaaaagagaacgcatgtatataaataagaataatatttaatcgggtaaacttaaaactcaatggacttctatcgatttcaaataaaaggtatgattattataacaattttaaaaaagaaaaaaaaacataccttttcataggtgaaaactttatcgattcttcaagtgtcgaaattatgtaaaatatttagtaattaataagacagctacaacttctcagttgaaacgcagtgatttaacgaagtcgtctttagaggata

SEQ ID NO: 4320 - DNA, 429 bp, Diabrotica virgifera
aagcttttacatatttaattaaaattgtataatttataaaatttatgaaaaacataatggaaatattttaaaaattataaaggttaatgaagcatagtacagataaaacgtaagtgtataataacgggaatgataaataggcacaaatatagttaacatatagaaacactgtggcagacaaccataattaaaagagaacgcatgtatataaataagaataatatttaatcgggtaaacttaaaactcaatggacttctatcgatttcaaataaaaggtatgatttgacgacgatgatgacattttcataggtgaaaactttatcgattcttcaagtgtcgaaattatgtaaaatatttagtaattaataagacagctacaacttctcagttgaaacgcagtgatttaacgaagtcgtctttagaggata

SEQ ID NO: 4321 - DNA, 603 bp, Diabrotica virgifera
aagactttcaagatgagtagactagtgatacttcttattgtcactgtatttgtcgaatatagtttaggaggtacagacgatagtgcttgtccaccactagttaaatttagaaaaggatgcaatatttgtatctgcagtccaaacggttatgattatacctgtacacagaacaaatgccatccaacgaaacggaacgacaacttggaaagactattatcagatgaggattattataaggatgatatgagcaatgccattgattcaaaatctacatctgactcatctgaaattgatgaagatgaaagtgatgaagaatatgaaatgcccgatgaaaaggaagtcccttccagagataacaacgaacttgacagcgacgacgtgagtgatgatgatgatgatgatgaggatgatgatccagattttgatccagacagtttttacgacaactttgatagtgaggatgatgacaactatgttggaaagggaaggcctgttactcggagaagatataaaaagttcccttaatttttttttgtaaacaacatgacattgagaactatttaaaaaaatattatttctattaattatattatttatatattt

SEQ ID NO: 4322 - DNA, 635 bp, Diabrotica virgifera
  SmartBlast Evalue=5E-19; Info=Nuclear antigen-3B n=1 Tax=Human herpesvirus 4 type 2 RepID=Q80P19_EBVG
ggggacacggttcaggtgtaggttttttgcagcttccatcagcttgtttaactgtgccggaaggacagtacggtgctggttgtaaacaggttccatcgggctgtctttcagttccaaatggacaaggctgtggtgttggtcttcgacaagatccgtcaggttgtcgaatagttccagaagtacaaggtgcaggagtcggtttttcacaactgccgtcgggaagtcttgtagtaccaaatggacatggggcaggtgttggacgttcacatgatccatctggttgtctaatagtgcctgaaggacagggtctaggtgtaggccttccacagctgccatcgggttgtcttatagtgccaaatggacatggagctggggttggacgtgaacatgagccatcaggttgtcgaacggtgcccgaaggacatggagcaggagtaggtctctcacagctgccatctggttgtcttatggttccaaacggacatggtgcaggtgctggacgttcacaagatccatctggttgtcgaatggtacctgaaggacaaggtttaggtgtaggtctttcacagctgccatcgggctgccttatagtaccaaatggacatggagcaggtgttggccgttcacaaaatccg

SEQ ID NO: 4323 - DNA, 330 bp, Diabrotica virgifera
aactggcgcatgtccagtgaggaaacctgttatgactctgagctgattcctgcttgttttcagcagtaactcagccctactagcacatgtccgtccgatatacatcttgccatgtgtttgaccgggtataccctcccagtgtgagttgtgttggcttcggatccaggctttttttcgttcgcggacggtgctttttggcactcccacggccggctctggacccaggtattttgtagctgatgctctcctggcaagtgcatcagctctttcattgccgtatatgccccaatgacctggaacctaatcagtataacactgttatgttgcgcc

SEQ ID NO: 4324 - DNA, 307 bp, Diabrotica virgifera
aactggcgcatgtccagtgaggaaacctgttatgactctgagctgattcctgcttgttttcagcagtaactcagccctactagcacatgtccgtgctatatatatcacactcccagtgtgagttgtgttggcttcggatccaggctttttttcgttcgcggacggtgctttttggcactcccacggccggctctggacccaggtattttgtagctgatgctctcctggcaagtgcatcagctctttcattgccgtatatgccccaatgacctggaacctaatcagtataacactgttatgttgcgcc

SEQ ID NO: 4325 - DNA, 549 bp, Diabrotica virgifera
tagagtgaaaaatgttttacatttttagtaattttatttttgttattctattagttttttaagtagtttagagttttagagtaactactttaagagtttggctatgtcaagtgatttgctgtagttgacttcgttgttggtaaattttgaacaacattttcctatggaatatgtctggcatttgttttcatgcactaaatcagttttcttcttttcagttctgggtaataaattatcatacgcttttttcaaatgtatgtcaatcaactttctgacaaaagcatcagaatgctgaatttcagcttgtactttacgaaacatcaaatataaaatatttttaattatagctgtgatctatttccataaaatatagtgtcagttgttcctaatatacatcacaatgaaaagataatgaatttgtcgtgtctaaattcttactcagatatgctgtatcaagagtagagttgttggaataccaaatgtttctgggatgagggatgactgacaaattctggatagactcctctcgaacaaacctgaataacattt

SEQ ID NO: 4326 - DNA, 243 bp, Diabrotica virgifera
ttaatttttcgtcatatgtgaaatttataactcttttcttttcctccatttcactgtacatatacaaataacatacaagactatatttattatatacaaacttaatgcacgcacaaataactaactaactactaaataaaataactatataacagtacaaaactgaataaaaccaaattggcaaacaaacaataatgacaaataatcgaaaaagtaagggaaatgtcatcttattcttctttt

SEQ ID NO: 4327 - DNA, 234 bp, Diabrotica virgifera
ttaatttttcgtcatatgtgaaatttataactcttttcttttcctccatttcactgtacatatacaaataacatacaagactatatttattatatacaaacttaatgcataaataactaactactaaataaaataactattaacagtacaaaactgaataaaaccaaattggcaaacaaacaataatgacaaataatcgaaaaagtaagggaaatgtcatcttattcttctttt

SEQ ID NO: 4328 - DNA, 1308 bp, Diabrotica virgifera
  SmartBlast Evalue=1E-126; Info=Mitochondrial malate dehydrogenase 2 n=2 Tax=Culicidae RepID=B0WMC8_CULQU
aaacaattatttatttcagaaatgcagatgacagatttctacttcttatacagttgttaattttggctataaaaaattgtccgttacacgaacgactagaaaaccctttactttactgaaaaaataatacaaaaagaacaaaaaataaacataaatttaacattagatgttattctattggttggcgaacttgacaccagcttcgatgttcttcttaagttctggaagtgctttcttgagcaaatcttgttcgaaatcgctgagttttccaagacccaagttcttctcgagtccgttcttgcctaagactagaggtgtggagaaataagaggcttcggtaacgtctgattggacgtaggctggttcgatgacgtttggttctcctttgagacctctgaggagggagttggcgaatctggcaccggcgtatgccatggagagggttgcggatcctgctccagctttggcttttactacctcagtaccagcttcttgtatccttacggtcaaagcttgaagttggtcagcggggaatgatactgaaggagtggctctggagattaggggaatgatggtgacgccagagtgacctccgatgacgggaatgttaacgtctttggggttaagtcctttggcttctgcgatgaaggtgttggcacggacgatgtccaaggtggagataccaaacacacgtttggggtcaagtttaccagcctttttgagtacttcacaggcaatagggacagcggagttgacagggttggtaatgataccaataagcgcacatggcgctacttcagctgcgcattcggccaacgcttttacaattccggcgtttgtgttgaacagatcgtctctggtcataccaggtttcctgggtacaccagctggaataataattacgtcggcgcctttcaaagcatccttaagacattcaggaccattgaatccctttactttagctgcggtctcaatgtgagacaaatcagcagctactccaggagtgtgtacaagatcgtacagagacaactggctgaccaaagggttgatcttcaagagcaaagaaaggggttgaccaataccgccagaggctccacatactgctactttgaagttgttctgttttgatgtgctgaagcttctagttgctactacagttggtcttacaattctggaaaacatttttgaatttatagtttaacttttaacctcttcaaatttggaaaaactttgacctttcccagtagaggtcgaccaaaagcagacagagatgtgaaagaaatggcagataagaaaagtgatttttcc

SEQ ID NO: 4329 - DNA, 1305 bp, Diabrotica virgifera
  SmartBlast Evalue=1E-126; Info=Mitochondrial malate dehydrogenase 2 n=2 Tax=Culicidae RepID=B0WMC8_CULQU
caattatttatttcagaaatgcagatgacagatttctacttcttatacagttgttaattttggctataaaaaattgtccgttacacgaacgactagaaaaccctttactttactgaaaaaataatacaaaaagaacaaaaaataaacataaatttaacattagatgttattctattggttggcgaacttgacaccagcttcgatgttcttcttaagttctggaagtgctttcttgagcaaatcttgttcgaaatcgctgagttttccaagacccaagttcttctcgagtccgttcttgcctaagactagaggtgtggagaaataagaggcttcggtaacgtctgattggacgtaggctggttcgatgacgtttggttctcctttgagacctctgaggagggagttggcgaatctggcaccggcgtatgccatggagagggttgcggatcctgctccagctttggcttttactacctcagtaccagcttcttgtatccttacggtcaaagcttgaagttggtcagcggggaatgatactgaaggagtggctctggagattaggggaatgatggtgacgccagagtgacctccgatgacgggaatgttaacgtctttggggttaagtcctttggcttctgcgatgaaggtgttggcacggacgatgtccaaggtggagataccaaacacacgtttggggtcaagtttaccagcctttttgagtacttcacaggcaatagggacagcggagttgacagggttggtaatgataccaataagcgcacatggcgctacttcagctgcgcattcggccaacgcttttacaattccggcgtttgtgttgaacagatcgtctctggtcataccaggtttcctgggtacaccagctggaataataattacgtcggcgcctttcaaagcatccttaagacattcaggaccattgaatccctttactttagctgcggtctcaatgtgagacaaatcagcagctactccaggagtgtgtacaagatcgtacagagacaactggctgaccaaagggttgatcttcaagagcaaagaaaggggttgaccaataccgccagaggctccacatactgctactttgaagttgttctgttttgatgtgctgaagcttctagttgctactacagttggtcttacaattctggaaaacatttttgaatttatagtttaacttttaacctcttcaaatttggaaaaactttgacctttcccagtagaggtcgaccaaaagcagacagagatgtgaaagaaatggcagataagaaaagtgatttttcc

SEQ ID NO: 4330 - DNA, 1273 bp, Diabrotica virgifera
  SmartBlast Evalue=1E-126; Info=Mitochondrial malate dehydrogenase 2 n=2 Tax=Culicidae RepID=B0WMC8_CULQU
aaacaattatttatttcagaaatgcagatgacagatttctacttcttatacagttgttaattttggctataaaaaattgtccgttacacgaacgactagaaaaccctttactttactgaaaaaataatacaaaaagaacaaaaaataaacataaatttaacattagatgttattctattggttggcgaacttgacaccagcttcgatgttcttcttaagttctggaagtgctttcttgagcaaatcttgttcgaaatcgctgagttttccaagacccaagttcttctcgagtccgttcttgcctaagactagaggtgtggagaaataagaggcttcggtaacgtctgattggacgtaggctggttcgatgacgtttggttctcctttgagacctctgaggagggagttggcgaatctggcaccggcgtatgccatggagagggttgcggatcctgctccagctttggcttttactacctcagtaccagcttcttgtatccttacggtcaaagcttgaagttggtcagcggggaatgatactgaaggagtggctctggagattaggggaatgatggtgacgccagagtgacctccgatgacgggaatgttaacgtctttggggttaagtcctttggcttctgcgatgaaggtgttggcacggacgatgtccaaggtggagataccaaacacacgtttggggtcaagtttaccagcctttttgagtacttcacaggcaatagggacagcggagttgacagggttggtaatgataccaataagcgcacatggcgctacttcagctgcgcattcggccaacgcttttacaattccggcgtttgtgttgaacagatcgtctctggtcataccaggtttcctgggtacaccagctggaataataattacgtcggcgcctttcaaagcatccttaagacattcaggaccattgaatccctttactttagctgcggtctcaatgtgagacaaatcagcagctactccaggagtgtgtacaagatcgtacagagacaactggctgaccaaagggttgatcttcaagagcaaagaaaggggttgaccaataccgccagaggctccacatactgctactttgaagttgttctgttttgatgtgctgaagcttctagttgctactacagttggtcttacaattctggaaaacatttttgaatttatagtttaacttttaacctcttcaaatttggaaaaactttgacctttcccagtagaggtcgaccaaaagcagacagagatg

SEQ ID NO: 4331 - DNA, 534 bp, Diabrotica virgifera
  SmartBlast Evalue=7E-49; Info=Ribosomal protein L35 n=3 Tax= Cucujiformia RepID=D1M838_9CUCU
gtttggcaagcttgtcaacttctttatagtttatttttcaaagaattaacatgggtaaagttaagtgtgccgatcttaggactaaagataaaaaagagctaactaaacagctcgatgagttaaaaacagaacttaccagcctccgggttgcgaaagttaccggtggagctccatcaaaactttcaaaaatccgtgtggtacggaaagctattgcccgtgtatacattgttatgcaccagaaacaaaaagaaaacttgaggaagttgtacaaaaataagaaatacaagcctctcgaccttagacctaagaagacccgttctatccgccgtgctctatccacacatgaacagaggatcaagacacctaaagaaatccgtaagcgctctgcattccctgcaaggaagttcgcattgaaagcttaggttgtattctgttaaataaatactttattataaaaaaaaaaaaaaaaaaaaaaaaaaaaaaaaaaaaaaaaaaaaaaaaaaaaaaaaaaaaaaaaaaaaaaaaaaaaaaaaa

SEQ ID NO: 4332 - DNA, 527 bp, Diabrotica virgifera
  SmartBlast Evalue=7E-49; Info=Ribosomal protein L35 n=3 Tax= Cucujiformia RepID=D1M838_9CUCU
aagcttgtcaacttctttatagtttatttttcaaagaattaacatgggtaaagttaagtgtgccgatcttaggactaaagataaaaaagagctaactaaacagctcgatgagttaaaaacagaacttaccagcctccgggttgcgaaagttaccggtggagctccatcaaaactttcaaaaatccgtgtggtacggaaagctattgcccgtgtatacattgttatgcaccagaaacaaaaagaaaacttgaggaagttgtacaaaaataagaaatacaagcctctcgaccttagacctaagaagacccgttctatccgccgtgctctatccacacatgaacagaggatcaagacacctaaagaaatccgtaagcgctctgcattccctgcaaggaagttcgcattgaaagcttaggttgtattctgttaaataaatactttattataaaaaaaaaaaaaaaaaaaaaaaaaaaaaaaaaaaaaaaaaaaaaaaaaaaaaaaaaaaaaaaaaaaaaaaaaaaaaaaaa

SEQ ID NO: 4333 - DNA, 451 bp, Diabrotica virgifera
  SmartBlast Evalue=5E-49; Info=Ribosomal protein L35 n=3 Tax= Cucujiformia RepID=D1M838_9CUCU
gtttggcaagcttgtcaacttctttatagtttatttttcaaagaattaacatgggtaaagttaagtgtgccgatcttaggactaaagataaaaaagagctaactaaacagctcgatgagttaaaaacagaacttaccagcctccgggttgcgaaagttaccggtggagctccatcaaaactttcaaaaatccgtgtggtacggaaagctattgcccgtgtatacattgttatgcaccagaaacaaaaagaaaacttgaggaagttgtacaaaaataagaaatacaagcctctcgaccttagacctaagaagacccgttctatccgccgtgctctatccacacatgaacagaggatcaagacacctaaagaaatccgtaagcgctctgcattccctgcaaggaagttcgcattgaaagcttaggttgtattctgttaaataaatactttatt

SEQ ID NO: 4334 - DNA, 366 bp, Diabrotica virgifera
cacacacacacacacacacacacacacacacacgacacgacgacacacacacacacacacacacacacacacacacacacacacacacacacacacacacacacacacacacacacacacacacacacacacacacacacacacacacacacacacacacacacacacacacacacacacacacacacacacacacacacacacacacacacacacacacacacacacacacacacacacacacacacacacacacacacacacacacacacacacacacacacacacacacacacacacacacacacacacacacacacacacacacacacacacacacacacacacacacacacacacacacac

SEQ ID NO: 4335 - DNA, 334 bp, Diabrotica virgifera
cacacacacacacacacacacacacacacacacgacacgacgacacacacacacacacacacacacacacacacacacacacacacacacacacacacacacacacacacacacacacacacacacacacacacacacacacacacacacacacacacacacacacacacacacacacacacacacacacacacacacacacacacacacacacacacacacacacacacacacacacacacacacacacacacacacacacacacacacacacacacacacacacacacacacacacacacacacacacacacacacacacacacacacacac

SEQ ID NO: 4336 - DNA, 311 bp, Diabrotica virgifera
gtgtgtgtgtgtgtgtgtgtgtgtgtgtgtgtgtgtgtgtgtgtgtgtgtgtgtgtgtgtgtgtgtgtgtgtgtgtgtgtgtgtgtgtgtgtgtgtgtgtgtgtgtgtgtgtgtgtgtgtgtgtgtgtgtgtgtgtgtgtgtgtgtgtgtgtgtgtgtgtgtgtgtgtgtgtgtgtgtgtgtgtgtgtgtgtgtgtgtgtgtgtgtgtgtgtgtgtgtgtgtgtgtgtgtgtgtgtgtgtgtgtgtgtgtgtgtgtgtgtgtgtgtgtgtgtgtgtgtgtgtgtgtgtgtgtgtgtgtgtgtgtgtgtgtg

SEQ ID NO: 4337 - DNA, 801 bp, Diabrotica virgifera
  SmartBlast Evalue=2E-84; Info="Actin, indirect flight muscle n= 356 Tax=Fungi/Metazoa group RepID=ACT6_DROME"
ttttaaaataaaatttgaattttattgtatattgtatataaactatgccaaaattttattaaaaaaattaacataacatcatattctcgttcttaatcgaaataataggcaggtttagtactagataggatttatttacctgcccagttacaaaatagttatagtaagtaaatataacaaataataaataattataaggtgttataagatcttaaaagtctgtctggcagttacaaccacggtcgcatattatttaagaactgcaaagatgtaaacacagtacaaacaacatgaaaaatagcttattaggtatgaattgattaaatagcttagaagcacttgcggtggacaattcctgggccggattcgtcgtattcttgtttggagatccacatctgttggaaggtggagagggaggccaagatggatccaccgatccagacggagtatttcctttctgggggagcgatgatcttgatcttgatggtggatggagcaagggcggtgatttccttttgcattctgtcggcaatacctgggtacatggtggtacctccggagagaacagtgttggcgtacaagtccttacggatatcaacgtcgcacttcatgatggagttgtatacggtttcgtggataccgcaagattccatacccaagaaggaaggttggaagagggcttctgggcaacggaatctttcgttaccaatggtgatgacttgtccatcaggcaattcgtagctcttttcgagggaggtggaagcagcagcggtggccatttcctgttcgaagtcgagggcg

SEQ ID NO: 4338 - DNA, 712 bp, Diabrotica virgifera
  SmartBlast Evalue=1E-122; Info="Actin, cytoplasmic 1 n=111 Tax= Bilateria RepID=ACTB_HUMAN"
ttattagctgtgtttttctgtctagtgagcagtgatcaaccacaaaagacaacatgtgtgacgacgatgttgcggctcttgtcgttgacaatggatccggtatgtgcaaagctggattcgccggagatgacgcaccccgtgccgtcttcccctcaatcgtcggtcgcccaaggcatcaaggtgtcatggttggtatgggacaaaaagactcatacgtaggagatgaagcccaaagcaaaagaggtatcctcacattgaaataccccattgaacacggtatcatcaccaactgggatgatatggaaaaaatctggcatcacaccttctacaatgaactccgtgtagctccagaagaacacccagtcctcctcactgaagctccactcaaccccaaggcaaacagagaaaagatgacccaaatcatgtttgaaaccttcaacacacccgccatgtatgtagccatccaagccgtactctccttgtacgcttctggtcgtaccactggtattgtattggactccggagatggtgtcacccacaccgtcccaatctacgaaggttacgctcttccccacgccatcctccgtttggacttggccggtcgtgacttgaccgactacctcatgaagattcttactgaaagaggttactcattcaccaccaccgctgaaagggaaattgtccgtgacatcaaagaaaaactctgctatgt

SEQ ID NO: 4339 - DNA, 220 bp, Diabrotica virgifera
acggagatgcaaggtggataacattaataactgggtaagaaacagaagaatagaatggaatgaccacataagctgaatgacaacaaatatgatagtcaggacagcgagagacggttccccaataggaagacgatcagtgggaagaccacgaaaacgatggaacgacaacttactagaggcacattgaaaaaaacagacagagtcatatctatacaaaaag

SEQ ID NO: 4340 - DNA, 171 bp, Diabrotica virgifera
acggagatgcaaggtggataacattaataactgggtaagaaacagaagaatagaatggaatgaccacataagctgaatgacaacaaatatgatagtcaggacagcgagagacggttccccaataggaagacgatcagtgggaagaccacgaaaacgatggaacgacaactt

SEQ ID NO: 4341 - DNA, 100 bp, Diabrotica virgifera
ctttttgtatagatatgactctgtctgtttttttcaatgtgcctctagtaagttgtcgttccatcgttttcgtggtcttcccactgatcgtcttcctatt

SEQ ID NO: 4342 - DNA, 14348 bp, Diabrotica virgifera
  SmartBlast Evalue=0; Info="Spectrin beta chain, brain 4 n=1 Tax= Camponotus floridanus RepID=E2APU2_9HYME"
aaaaatataaagaacaaagtactaatacaaagcacaaccgcataacttaataatacatatttatgaatatatctttatggtaaaaatcttactattaacaataaactaacaaactactaactaaccaatttagtcatgtttaaatttgatcgatctggtagctttttataaaataaaaaaaaaacgttataaatataactaattaaatatagacattatttaatttgcagcgcaatatatgtgaaaaacatagctaccgcttgtggaggacctagaatcaaataattaataatatgaatacctatttaaaaaagtttttattggacaataaattgcgcaacgtccaaaggtactgtttctttttttaggaaagttgaccaagtgaaaattattgcatacaaaatattaataaaatcacaccaatggaagtaagaaattatgttccttggtttttggtgtattttattactaggctgttcaataagttttgcgcttcggtaagagagggcattgttaccaacctaattttattttattatgttggtagactcttcatatgaacttgtgtgaaatttcagtgtaatctgtgaattcattttttgtctacaagtcattgagtattgacgtgtcacagtattttttacaatagaaacaatcaagaagcgtgcagtgattacatttttatttttggaaggtttaaaaggaaaagaaattttatgaacgaatgttgaaagtgtatgaggactcttcgccttcagttagcacagtagaaagatgggttgctgaatttaaacgtggtcatacaagccttgaattcgatctaagtcaaggacatccaaaaacagcaataacaccagaaatcgtagaaaaaatacaggatatggtattggaaaatcgtcgagtgactgaaagagagcctagtgatctcgttggaccgtctaactaaacaatgggtgccgcattcgctaacaacagaacaaaaacacattcgaatgcgactttctcagtaacgtttagagcattttcgaattaataaagtagattttgtgcatcgcttcatcactatgaacgagacttgggtctatcaccatcatcttgaattaaaacaagaagctaaagagtggtgtgaacctggttcttcggcttcaaaacgagttggtgcccataaatcgaccaagaaggtgttagcatcagttctttgggatacgggagaaattttgtttgtggattacctgcaaactggcaaaacaataaattctatatcattgtaaccttttagaccaactaaaggaaacatttgtgaaaaaataaccggtttgcagaagaaaaaaaaattattgaagttatacttctttaggagcgatgggagtgaaatttaatatgcgcgaattcatcaaaaactttgttccccggcacagatgcattatacctttgctctgattgggtgttcaaatgacatgacaataattgttcaatatagaggttatggataaacaaatattgtatattagtttttattgttgtgaggacacagacaaaagcaagtttataattgtagtaactttttaaatagtttttaaaagcaacaggtacgtacttaattgtaaatgtttcagtattgtaataaaaaattacataggtaggtacttacctatttggaaaatgtatgtacctatctatttatagtaggtaatgctttgatttacataatttgattaccaacaaaatttctaccactcttcatctaatatacctattgttttcttactctatgttttgttgttttttaatatttgaattccctttgtgaacacacacacacacaaaaatcaaactaatttgattaaattcagaactgtcaaacagtaaaaggttcagttagcctaccttcccacatgacaagtacgtgtaagtggtcaagacgggtgacggctgtgtgtaagtggattttatgtctaagcacgcgggttcgaatcccaatgcaagtttttatttttttatttttttttatacattttatgattgtgaattatatttgttatataatttttttcagaaaatgcttatttagttaaaatttttgccaacaattattgttcagaaatcgtctctttggtgcatttttcaatgtgtttgtgtgtgttttattcttttatttttttaatttttggtatctattgttttaataaaaatgtttggaaagtagtaagtattcaaattagtttaatatttaaataaaatataaataaactgtttaaagtacatatattaatttcgttggaatcatataatataagtataaggtcttacgtgcgtaaaaagtacacacacattcttttttttttaatcaggacaatgcatcgtgtcatacgggcattttagcaatggataaaatccatgatgtaaagttcgaattgttggattgtccactctattcattagatttggcctctagcgacttcgatctgtatatatacctaaaaattgataagtcgaaagagtctttcatcaaatgatgagaggtcataacagccgcggaagcatattttgcagcccttccaaattctcacttcagggatgaatttatagactggaatcttgttgaaacaagtgtattgatgctcagggagactatactagataaaaagtgtatttcaaaccataaaattgtgtttttcttatcgaacttcaaaacttattgaacagcctagtagttccttaccacattttctaactttattgtacatttaaagtttattaaaaatttacaaaacgtactttgttctatattttcttgtttattacatcaaaacatgaaaagatttaatatgatttggtcaacaaaggttaggcattacagaaatatatgtattatatatgtacagtttggacaaggttctcccttataaaaataaactacatatacttttattacatctgtgaattccgcttctttcgaacgaacaaatctcttattcgatgggaaacatttttggaatctggagaacttaacggcctcgaagtggagttccattcctgtcctcgacttggagtagaattattgaaaccttcaatggtatgccggtacggatggtttgtcgatgaagatatacttccgttcgtagcatgaggatcttgtcttaagacaactgtgtcgggtacatctggactcgaagttctacttgactgcgaactaatctcgaaatcgtttggatccttcgtaatctcaaaatgctgtaactgattcgccggaggtagtttcgctctgaaggtaattttattgatccaatccatcatgtcgacttctgaattggacgcaaacaaaaattctgatccatctgtaatagacaatcggaaagtatgttttcgtttttggtaatcgtctgctattccgcaggtggcattgtgaatattcaatggtgcagcattagctttgctcgcaacaaagtcatcctttgttttaaagaagcatagtaattggccacagagaacagtgtaggaatgtttccatgcccgatttgtagcacgcttttgtccaggaagcaagagttgttttctttcgaggaatgcttcagcttccacaggaggtagcactaattcattctttgatcgaatagatcctcgccttctggtattgaaagacggcgttctcttcacaggcttgaccaaattgcctactttcatactctcagctcgtttaacagaaacatcagatcctcttctaattctatctctgtcgaacgtgtgggctattgaattagttttacgtatagatatattgttattttcggcaggtgattgggtagattgttgaagggcttcgagttgctcatgtgatattactggccttgcatcttcgggtaaactatatcttggtaacgattcctgtcgtctcagttcatttattctcgccttctctttaagtttcctctgctctaatttctcttgttcgattctttctttctcctcctttctagctctggcttcctgaagtttttgttgtgcaaacgagtcttctaagagggtctgtcgttttaaggcattaaaccttgagtcctgagctttaatagtttcctcaaaatctcgatgtttgcggataaactcctcaacttgggagatagtatcgcctactttgccatctttaagagtaccttctctcactgccatccaattctccaaaacattcgcatctcgcttgaaaagttgaaggtccaaattttgttcgtatataagatttctctttttccaagtattgtctaacaaatcaattttctgcttaagtattttaattttgtcttcgatttcttgagataaactatgaccttcttttataaacgtttgaccagtctcataaaattgttggaatacaggtaaccttccatcgatttcagtactatactctttatgtcggcctaacaacagttctgcctcgatgcaatcttgaggtaaatcgggagcggtaattttggcaagcatttcgtttatccacgctaataaatcgtggtactcatcgaagtaagactgcagctgttcagattgttgtaagaaatacttctgtctttcaactttgtcttgtaagtcctgtagagtactgactgtatcttctcgtttatcgtcaatgtgttctttggtgtctgggtattcagcgattaatctgtcgccttcttgttcgacaaaatcaactttgtctttgatcgctttcatttcagtttctaaagcctgatgttttctcatcatatcttcaataacctccacatctggaacataaacaccatatataacatcaatgtccttttctctaatccatgatattatttcatccgcagtttggtcgaacagatgcacttgtttagctccagccaatgcctctttacgagcatttgccagttccaacaaatcatcccaattattctgtaattcgataatcttttgttgaatatcgggactgtaactgctctttgcatctatgataaaatgtccattttctatacactgctgtacgcgtggttcgctattaataagacttgcatggaacgtatcaaatgcttggatcagaagctcaacatgttccaaatcattaccatattcttccgaatcggccttgttcatttgttctttcatccagtcttgtacttcattacattcatgtacaaagccgaaatactgcaaggcttcagctaaacgaacttctctttctgagacaagttttcttaattcgccaaagtccttttgtagttccaccttgactttctcaatatttgctgcatcaaaatgtcttctagcgattaatgaatccgctgcatcgactatcctttgaatcgacttttggaaagtttttacttctatagataaagtctccaactttcgttgtaatgattttgctgtatcttcgtctttaccaacttctttggttgcaagaagtggtctcttttctataatccaagcttgggcttcagacacatcttggtagaaagcttgtacttccaatgaatcttgaagtctgagtcttctaatactggccaaatccttaacttggtctaacttaacgtttaattgttcggttttatcttttataatagtttcagatggatgtttcgatctaactagttgatcagctctcgctacaagtgcatcaattatagcgcttctcgaagttagttcgccttctaaaatttggtgcttcttatgcaagtgttgaacagctgttaaattattaccaaggtcttgtgaagctacaagaggttctctatcatccaaccattgtaactcatcatcaacatctcgagtaaattgttgtaacatcgaagataattcaagctggtcttttttaacttgtaacggttcttttagttggtgatatcttgtgatagctttttgaaccttttcatcgatttcatcagctaagaagtgtccaccttttttgaactgctcagctccttcattaataatttcgcagttttcagcatgttgctggatatcattctctaaagtagcaagtcgtttaaggtgattacctgcactagtaaaatcatctgtaccagtaattttcagttggtgttcgacatctgttaaccaggtctcaaattcttctagcgatctattaaacaacaatgcctgataggcttcatttaaccgatcccgtttaagattagacagttctaataaatgtttccagtcattttctagctcatctagtcttattccgatttcatctgcagcataatgatcagctgcaataagatctttaccaacttctacaacattctgaattcgttctccactagcaattacttcagcttcaaatgtagcatgcttctggatcttgttttgtaagttaataggttcccggtaattttcatctgctgcggtttgaagtttttgagtcaaccatgtctcaacatcgttaacattccttaagaagtcttgcaaagccttagatttctccaaggtatccttacgttgctttgtcttggctagcaacctatcgttacgatttaaaaccgtttctaacttgagtaacacctcttcgttatttctgctagtatcttttgttattcttttagcttctgattttaattcatccactcttcctaacaaagtttgtagcgtaagttcgaagtcgttatgttttctcaacaaagcttcaactgctcttggtgtatcaccaacatcttcgttatttaagaaagcttctttatcagccagccaattgttaagttgatttacttgttcattaaactcttgtacgtcgaatgaatgagtcaaattgtttttatgatcaatccaagctctgtgaattttggtgtgtagttcttcaagcttcttgacattatctacaattataggattatccttttcaggacaagttttgccatattgtattaattgagtaaatggttcatcacgtcccgctatttcagctttaagttcgttgtgtaactctagttggacttcagcatcgacgacactattgggtttctcttgtgattccatccgtttaatagtttctaatacccattgctctaattgtttcgcgtcggctaagaatttttcttgggaatgcgccttttgtaataaggctctgcgttttaatttagctgcttctagtttttgcatttgcacttctaaattgcgcaaagtatcttccaaatgtttggtggaatatggatatttttcgctgaggtagaaagcatctttctgatgcgtattaacgattttattttctatagccgatatttcgttctcgagagcttcttgttttctttgtagggcttctactgcaggaagatttctgccaacttcctccgattccattattgaacatttttctgctattcgatccaaggtgtcagcaatgtctctgtcgaataagtgtatttcagaagcttcgtttaatttgtttctgtaatcatttaaagccttttgcaaagaatgccattttttaattagattatcacctctttctcggacatggttatgtccttgtgcggctaatttgttagaaagagcagtaattgttttaattttagtatcgtcgatcttcatatcactatctacatcatcgagtttacgttgtaaaatttgacaatgttcgtaatcttttccggtatccccagcttgtaacaggacctctttatctctaatccacgattcgattttgtcgagttgagagttgaattcaagaatgtcttgtgcttcttcgagacctttgcctttcaaactaacttcttcattgagacgcctccacgcttgctctaaatcagccagctggtcagctatatcttgggatgctttatgatttttacgaattaatgtttctccgttatttttaatttcttgtattcgtccagcattagctacaacttcggcttggaaagcttggtgtttctgcaagactttaattttgtcttctaaatcagaaacatccgattttgtcatcgctgtcatcgtgcctaatttcttttctttttctatgatccacacttgcgtttcagcaacgtctcttacaaactcagcataaagaagaccatttgtgagatactttcgcttagcttcgcttaactgatgcacttttttgcgttttgcttgaacatcagctaatctttgagcaatctgttcactttcaaagtgattttgttgtagtaacttatttccagaagcgaaaagagcctcgagatttttatcttgaacctgaagtactttttcaaattcttcatgtttctttagttgattactgacttcatctacggtttccccaatgtcgacatgtgtcaatgcggcttcttgggtgtttgtagcatcctcaataagttttgtctctcttaaaaatacgagtaggtcacacaattgatccagatgaatttttctaagttgccaggtagtaagcaatttatctctttctccaatgagatgtttatatttctctacggcctcgggtgctgcataatgacctgtttgttccatagcagccaaattttcagcaacctcttgaaaatcatcttctctggcatcgatctcacttttaagagcctcgtgttcactttttaccacttgtactctagaggcgcttctaatattttcttctgcattcatggctaatattaacccattggcccaattagacaaatctctaacttgagccaaaaacttctgtagatctacactagcttgtaattgatcccgtctaagatcagtgcgttcctttagatcattccaagcggctacaacaacctcttgctggtgttgtatattcactttattgttcgggtataacttctttagtttagacgcatcttccactagtatctgaagttgcgcttctagaactaccaattcattttcaaatgcttcatgttttctaagcaatgtcagagccgagttaagattgcgtcctaaatcagtaccaagtgctgcgtttttctcttgaattctttgtaaagcatctgcaatatctctgtggaacctgtgtatttgtccagctgcttctaaacgttcttctcttgaagttaattgtgtttgaagttgttcccatgcctgctctaaattatcttgtctgttttcgatttcagcactgtacggactttcgttagctagtaatttttgagcaagatcttcacattgtctgtacctttcaaagcctccctcaatcctgtgtttaaggtcgtcaaatttagtttgcaattgcaataaatgttcataatcctgaccataatcttctgacgaagcctgttggagattttcagcaatccaactttcgagttcttctgactcaacgaaatactcatgtctaaatagagattccattagtttttgctgacgagtaactgcttttctttgaatagctcgggccaagtgttcaatagctgtttgtctttcggcaattaatttcgattctggatgaccggatttgatcatggcttgagctccatgacccatttcagatataatattgttatacgtatctagttctaactctaaagccttatgtttggacaataatttagttgcggaatctctatctcttccaaaatcagtacttgctaatacattatccttttcgtttaaccaagattctacttcatttatttcgaagaagaattgttgggccttaagggaagtattaagttgttgcgcccttgcattagttttgtccttaagatcctgccaagcttcctctagagtattacataagacctgaatctgtttttcctcgggatgatctttatcaattaatgcctgacccgtctcaagagtcttgtctataactggttgatgtccaataatttcagcttccagtttcttatgtttcttgtacaaattttgtgcttggtgtaagttttgtcccaaatcttgtgaagaggctagaggtagatgttccttgatccattgcagttcggcatcgattgaaaaaccaaacttgtgaaattctaatgactcttcaagaattgcacgcttgtcttgggatggggcattgagttcttgtagatttctcaagatagcttccacattttctataatagcaggtgagtcaaaatgcccttcctcgtgtaaattttgactttggctacggagttcttctatacgggtagcgcaaaaagcgatgtcactttctagagcatcatgatgtttcattaattcacgacaggaccttagatcacttccaacgtttttactattcatcttttcattaatctcgttcagtttgttatttacatcttcaatactcttgttatattcatgttgagttacagcttgccttaacattctacccttttgcagtgaagtatccactaacctctgccactcgtcgttgagttctttcaaagttttacccacctcatttttcctgtagctgtcttgagcaatgagcgccattcctaatttgttaatcgttctaagctgaccttcatttgatctcagctcgcgttcaaatgcttcatgcttctgaattttgcgttctaaattagaaagatctctataattttcatcggaagctgttttgattttttccgccatccatgctcgtagatcatacacttctgcgcagaattcctggtaatttttggaggcatctagagcatctgctcgtttttgagaggcatctttaactgcttgtcttctttcaagtacctgctggacgcggtctgcgattcctgcagcgtcataatgctgtttggcgattagagtgttagcctttttggcgaaagcgttcagacgatcgtcttgagcagctaatgtgttagcgaaagccctatgttgtttatgcaaagcttcaacctcatcaagtgagcttccaagttcgtcgaattctaagaaagcttgatggcctgacgtaactgcatcgatattatcagcttctttgttgaatatttggagttctaaacattgctgcaaccaaatatccttctctttccatcctctagcgatagcttcttgttcagctagaagtctgtcgataacgctttgtacttcaggaagattgggatttgatttcaaaagtttctttccaagaccagttacttgtttaaattcatcatttttagctttaatatcttcagcaagatcttgatgtgcttttaaaagtgcctctgccgtttgaacatctcgtacaacattgtcagcattaagttgcttcttagtatcggctacccaattcaacaaatgtttggaactgttggtaaatatttgttgtcctacagcgtcttcaattctagttcttctttcaagagccttgtctttgaccttcttccaaagatcgtcaatatctttttgtttttgaataacatttgctttttcgttggggtaagatttttgaactgaatttcccaggagatttactttatcgaccttttcttcgattggcgatagttctctttctaaattatcgtgtcttctttgcaaagcttgaatggtttttaaatcatgtcctaaaactgcagtatctagctgttccatcttttctaacatccaatctttcgtttcctcgcaaattttattgaatagttctacactactggcaccttccagactcttttctttttgagctttaagtgtgttaagtttctgccaagctgcctggatttgtctatgtcgaattttgactttgtctatttgagaatggttttgatttacaaaaactttaacatcggcatccaaagcatccattctcttttgactcgcagataaatccgtgaggaatttctcatattttctctttgcttgttcaatactgtcgttcggatcatcgttagccaaaagttgttctttgtctttaatccacttttcaaaatcatcacactctttgtaaaaggtaaataactttaccgcatctgctaataaagcttgcctcttagctgccaaatcttgaagctgtgcataagaatcgttgatagtcttttgtctcttaggtacactgtccgtatcgtcaacttttcttttttgtgctcgaggtagctgtcttagaaccttgactggaactttagtattaaccaattttgtctttttgactttttgaacagattttacgacctctggttttctgatattaacaagaataattcttggttcaatttcttcaacataatttgcaggagcaaaaccatcagtaccatctgctttgcgtacacaccaccaatctggattgcttttgtttaacaagaacatcacttcatttttgaccatagataaaccgtggtcgttgaacggatacaaagcctttacctgaggaactttcttttcttcggtgattaccttatattccgttttttctacgggctcgtcgacccacacctcagttggcaccatcctattttcatattggacgtcttctattggttcattaacttcaggttcattatttaaatccaaagtggatattccagaggctacgagtcgatcagcttgaccattcagactataaatgtctccatgatatgcattgatttcttcatccaacactttgtgtctttgcaacaaagctttggcactgagttcgtccgtaccataatcatccgaagtaacaagagctaatttttcattcaaccaagactcagcttcgtttgcatctgcataaaactggtatgcttcagctgcatcttgtagttgcttggcccgttcttttgccaatttatccagtagttcccaattcttcttatttttatccacatgttgctggatttctaaagatctaggatgattatctgatattaactgcttactagttgctcccaattgatcaaatttgttctttcttgtttttatttcatccataagcaccttatgtttctgctgtaaggaaagcacacctcgtaaatcttttgccataattccagcttggcatattcgttgtttctcaattaaccaagcttcttcatcttcttgatcttgtaagaattggtaaaagtttctagcttcttctagtaacgcttttcttttggcactcaattccctaatctcctcacacacttttccaagttctttaagtttctttaatacctcgtctcctttaggatttccttgagctgtttgatgaccaactctatttaaccaactttccttttcttctaaggacgtaaccattagattttgcaacgcatgtttatgtagtaattcctcaacggctaccaaatgtgccccagtatctgtagaagagagatctattctcagctgttctgtactggtaagaaccgaatctatttcccgtatgatcgacgtaatgcttcccattttgttgaggttgagtttgtgtttttctaagagtgctttgagttcttcccactgttttataatttcgctttctcgtttttggactctatcagaatttcgataattctcattaataagctcttgtgccatatgagataagtcatgaatacgttcttctcttgctaatatatcagcactgatggcctcgtgctttttcaaggtagcatccacttgcaccaaattggaaccataccgaggatctgataaaacttgaatcatctctttcaggtacccttcacgcaaaatactttttttctcgaatttatacatcagttgatctagcctttgctgcctcatcagttcctctctaagagctacctctctgctatgttcagctttctctaaagtatcccaagatctttcgatatcctgaactagtttgccgtcagaagggtaaaaagctggttgcctaagttcctttaattgagtatttatgttaaagaataaagcctctatttcgcttcgttctatgtattttggaggcttctcttgattacggtagtgaccgaattgtataaatagattttgaatgccctctaaagaatttggaaattgtcggtcctctaattctacaatttttaatttaatccagtccaatagatccgtggtcaacttgtcgtaggtgagtttcagtttgtcagagtcgatcatctgtttaataattttagctattcgtcttccagatttttcttcttgtttcatacgtgcaaaagtgtgataatatgatgcaacgtaagtcataatactcttctcatcaggtcttgaagtatcaatgtcttcagcgtctaatagtcttagaatgcctaattcgttctgtgcaatgtcgaaggcatgattcaagttatcaatatttttattgtgttttaaagactcgaattcaaataagtccggtcggtgggcatgtataagcgcgttaaaacctaagccgtttctccacgaagaagaaaagtctgatatatgaacatctgggtaaccatgagttttacgttgagcccataatagaagggcgtctttggctgatttcttttccgaactctcattgtcttcatcttctggtatttcaatttcttgaatttgaaacctta

SEQ ID NO: 4343 - DNA, 11934 bp, Diabrotica virgifera
  SmartBlast Evalue=0; Info="Spectrin beta chain, brain 4 n=1 Tax= Camponotus floridanus RepID=E2APU2_9HYME"
catcatggcaacataatctttaaaagatcaaaaaaaattatcgccaatatcagtgaattaaaattggaattgttaaaacagcacccccatttgccagaattagcaccagaatgaagaacaatcagctgctgaagcgtattttaatagtcttctgacttgagggagtgaattcataaatcagaaaattgctggaacaaatgtatagttgagtgagattattttgaataaaaaaagtgtatttcaaaccataaaattgtgtttttcttatcgaacttcaaaacttattgaacagcctagtagttccttaccacattttctaactttattgtacatttaaagtttattaaaaatttacaaaacgtactttgttctatattttcttgtttattacatcaaaacatgaaaagatttaatatgatttggtcaacaaaggttaggcattacagaaatatatgtattatatatgtacagtttggacaaggttctcccttataaaaataaactacatatacttttattacatctgtgaattccgcttctttcgaacgaacaaatctcttattcgatgggaaacatttttggaatctggagaacttaacggcctcgaagtggagttccattcctgtcctcgacttggagtagaattattgaaaccttcaatggtatgccggtacggatggtttgtcgatgaagatatacttccgttcgtagcatgaggatcttgtcttaagacaactgtgtcgggtacatctggactcgaagttctacttgactgcgaactaatctcgaaatcgtttggatccttcgtaatctcaaaatgctgtaactgattcgccggaggtagtttcgctctgaaggtaattttattgatccaatccatcatgtcgacttctgaattggacgcaaacaaaaattctgatccatctgtaatagacaatcggaaagtatgttttcgtttttggtaatcgtctgctattccgcaggtggcattgtgaatattcaatggtgcagcattagctttgctcgcaacaaagtcatcctttgttttaaagaagcatagtaattggccacagagaacagtgtaggaatgtttccatgcccgatttgtagcacgcttttgtccaggaagcaagagttgttttctttcgaggaatgcttcagcttccacaggaggtagcactaattcattctttgatcgaatagatcctcgccttctggtattgaaagacggcgttctcttcacaggcttgaccaaattgcctactttcatactctcagctcgtttaacagaaacatcagatcctcttctaattctatctctgtcgaacgtgtgggctattgaattagttttacgtatagatatattgttattttcggcaggtgattgggtagattgttgaagggcttcgagttgctcatgtgatattactggccttgcatcttcgggtaaactatatcttggtaacgattcctgtcgtctcagttcatttattctcgccttctctttaagtttcctctgctctaatttctcttgttcgattctttctttctcctcctttctagctctggcttcctgaagtttttgttgtgcaaacgagtcttctaagagggtctgtcgttttaaggcattaaaccttgagtcctgagctttaatagtttcctcaaaatctcgatgtttgcggataaactcctcaacttgggagatagtatcgcctactttgccatctttaagagtaccttctctcactgccatccaattctccaaaacattcgcatctcgcttgaaaagttgaaggtccaaattttgttcgtatataagatttctctttttccaagtattgtctaacaaatcaattttctgcttaagtattttaattttgtcttcgatttcttgagataaactatgaccttcttttataaacgtttgaccagtctcataaaattgttggaatacaggtaaccttccatcgatttcagtactatactctttatgtcggcctaacaacagttctgcctcgatgcaatcttgaggtaaatcgggagcggtaattttggcaagcatttcgtttatccacgctaataaatcgtggtactcatcgaagtaagactgcagctgttcagattgttgtaagaaatacttctgtctttcaactttgtcttgtaagtcctgtagagtactgactgtatcttctcgtttatcgtcaatgtgttctttggtgtctgggtattcagcgattaatctgtcgccttcttgttcgacaaaatcaactttgtctttgatcgctttcatttcagtttctaaagcctgatgttttctcatcatatcttcaataacctccacatctggaacataaacaccatatataacatcaatgtccttttctctaatccatgatattatttcatccgcagtttggtcgaacagatgcacttgtttagctccagccaatgcctctttacgagcatttgccagttccaacaaatcatcccaattattctgtaattcgataatcttttgttgaatatcgggactgtaactgctctttgcatctatgataaaatgtccattttctatacactgctgtacgcgtggttcgctattaataagacttgcatggaacgtatcaaatgcttggatcagaagctcaacatgttccaaatcattaccatattcttccgaatcggccttgttcatttgttctttcatccagtcttgtacttcattacattcatgtacaaagccgaaatactgcaaggcttcagctaaacgaacttctctttctgagacaagttttcttaattcgccaaagtccttttgtagttccaccttgactttctcaatatttgctgcatcaaaatgtcttctagcgattaatgaatccgctgcatcgactatcctttgaatcgacttttggaaagtttttacttctatagataaagtctccaactttcgttgtaatgattttgctgtatcttcgtctttaccaacttctttggttgcaagaagtggtctcttttctataatccaagcttgggcttcagacacatcttggtagaaagcttgtacttccaatgaatcttgaagtctgagtcttctaatactggccaaatccttaacttggtctaacttaacgtttaattgttcggttttatcttttataatagtttcagatggatgtttcgatctaactagttgatcagctctcgctacaagtgcatcaattatagcgcttctcgaagttagttcgccttctaaaatttggtgcttcttatgcaagtgttgaacagctgttaaattattaccaaggtcttgtgaagctacaagaggttctctatcatccaaccattgtaactcatcatcaacatctcgagtaaattgttgtaacatcgaagataattcaagctggtcttttttaacttgtaacggttcttttagttggtgatatcttgtgatagctttttgaaccttttcatcgatttcatcagctaagaagtgtccaccttttttgaactgctcagctccttcattaataatttcgcagttttcagcatgttgctggatatcattctctaaagtagcaagtcgtttaaggtgattacctgcactagtaaaatcatctgtaccagtaattttcagttggtgttcgacatctgttaaccaggtctcaaattcttctagcgatctattaaacaacaatgcctgataggcttcatttaaccgatcccgtttaagattagacagttctaataaatgtttccagtcattttctagctcatctagtcttattccgatttcatctgcagcataatgatcagctgcaataagatctttaccaacttctacaacattctgaattcgttctccactagcaattacttcagcttcaaatgtagcatgcttctggatcttgttttgtaagttaataggttcccggtaattttcatctgctgcggtttgaagtttttgagtcaaccatgtctcaacatcgttaacattccttaagaagtcttgcaaagccttagatttctccaaggtatccttacgttgctttgtcttggctagcaacctatcgttacgatttaaaaccgtttctaacttgagtaacacctcttcgttatttctgctagtatcttttgttattcttttagcttctgattttaattcatccactcttcctaacaaagtttgtagcgtaagttcgaagtcgttatgttttctcaacaaagcttcaactgctcttggtgtatcaccaacatcttcgttatttaagaaagcttctttatcagccagccaattgttaagttgatttacttgttcattaaactcttgtacgtcgaatgaatgagtcaaattgtttttatgatcaatccaagctctgtgaattttggtgtgtagttcttcaagcttcttgacattatctacaattataggattatccttttcaggacaagttttgccatattgtattaattgagtaaatggttcatcacgtcccgctatttcagctttaagttcgttgtgtaactctagttggacttcagcatcgacgacactattgggtttctcttgtgattccatccgtttaatagtttctaatacccattgctctaattgtttcgcgtcggctaagaatttttcttgggaatgcgccttttgtaataaggctctgcgttttaatttagctgcttctagtttttgcatttgcacttctaaattgcgcaaagtatcttccaaatgtttggtggaatatggatatttttcgctgaggtagaaagcatctttctgatgcgtattaacgattttattttctatagccgatatttcgttctcgagagcttcttgttttctttgtagggcttctactgcaggaagatttctgccaacttcctccgattccattattgaacatttttctgctattcgatccaaggtgtcagcaatgtctctgtcgaataagtgtatttcagaagcttcgtttaatttgtttctgtaatcatttaaagccttttgcaaagaatgccattttttaattagattatcacctctttctcggacatggttatgtccttgtgcggctaatttgttagaaagagcagtaattgttttaattttagtatcgtcgatcttcatatcactatctacatcatcgagtttacgttgtaaaatttgacaatgttcgtaatcttttccggtatccccagcttgtaacaggacctctttatctctaatccacgattcgattttgtcgagttgagagttgaattcaagaatgtcttgtgcttcttcgagacctttgcctttcaaactaacttcttcattgagacgcctccacgcttgctctaaatcagccagctggtcagctatatcttgggatgctttatgatttttacgaattaatgtttctccgttatttttaatttcttgtattcgtccagcattagctacaacttcggcttggaaagcttggtgtttctgcaagactttaattttgtcttctaaatcagaaacatccgattttgtcatcgctgtcatcgtgcctaatttcttttctttttctatgatccacacttgcgtttcagcaacgtctcttacaaactcagcataaagaagaccatttgtgagatactttcgcttagcttcgcttaactgatgcacttttttgcgttttgcttgaacatcagctaatctttgagcaatctgttcactttcaaagtgattttgttgtagtaacttatttccagaagcgaaaagagcctcgagatttttatcttgaacctgaagtactttttcaaattcttcatgtttctttagttgattactgacttcatctacggtttccccaatgtcgacatgtgtcaatgcggcttcttgggtgtttgtagcatcctcaataagttttgtctctcttaaaaatacgagtaggtcacacaattgatccagatgaatttttctaagttgccaggtagtaagcaatttatctctttctccaatgagatgtttatatttctctacggcctcgggtgctgcataatgacctgtttgttccatagcagccaaattttcagcaacctcttgaaaatcatcttctctggcatcgatctcacttttaagagcctcgtgttcactttttaccacttgtactctagaggcgcttctaatattttcttctgcattcatggctaatattaacccattggcccaattagacaaatctctaacttgagccaaaaacttctgtagatctacactagcttgtaattgatcccgtctaagatcagtgcgttcctttagatcattccaagcggctacaacaacctcttgctggtgttgtatattcactttattgttcgggtataacttctttagtttagacgcatcttccactagtatctgaagttgcgcttctagaactaccaattcattttcaaatgcttcatgttttctaagcaatgtcagagccgagttaagattgcgtcctaaatcagtaccaagtgctgcgtttttctcttgaattctttgtaaagcatctgcaatatctctgtggaacctgtgtatttgtccagctgcttctaaacgttcttctcttgaagttaattgtgtttgaagttgttcccatgcctgctctaaattatcttgtctgttttcgatttcagcactgtacggactttcgttagctagtaatttttgagcaagatcttcacattgtctgtacctttcaaagcctccctcaatcctgtgtttaaggtcgtcaaatttagtttgcaattgcaataaatgttcataatcctgaccataatcttctgacgaagcctgttggagattttcagcaatccaactttcgagttcttctgactcaacgaaatactcatgtctaaatagagattccattagtttttgctgacgagtaactgcttttctttgaatagctcgggccaagtgttcaatagctgtttgtctttcggcaattaatttcgattctggatgaccggatttgatcatggcttgagctccatgacccatttcagatataatattgttatacgtatctagttctaactctaaagccttatgtttggacaataatttagttgcggaatctctatctcttccaaaatcagtacttgctaatacattatccttttcgtttaaccaagattctacttcatttatttcgaagaagaattgttgggccttaagggaagtattaagttgttgcgcccttgcattagttttgtccttaagatcctgccaagcttcctctagagtattacataagacctgaatctgtttttcctcgggatgatctttatcaattaatgcctgacccgtctcaagagtcttgtctataactggttgatgtccaataatttcagcttccagtttcttatgtttcttgtacaaattttgtgcttggtgtaagttttgtcccaaatcttgtgaagaggctagaggtagatgttccttgatccattgcagttcggcatcgattgaaaaaccaaacttgtgaaattctaatgactcttcaagaattgcacgcttgtcttgggatggggcattgagttcttgtagatttctcaagatagcttccacattttctataatagcaggtgagtcaaaatgcccttcctcgtgtaaattttgactttggctacggagttcttctatacgggtagcgcaaaaagcgatgtcactttctagagcatcatgatgtttcattaattcacgacaggaccttagatcacttccaacgtttttactattcatcttttcattaatctcgttcagtttgttatttacatcttcaatactcttgttatattcatgttgagttacagcttgccttaacattctacccttttgcagtgaagtatccactaacctctgccactcgtcgttgagttctttcaaagttttacccacctcatttttcctgtagctgtcttgagcaatgagcgccattcctaatttgttaatcgttctaagctgaccttcatttgatctcagctcgcgttcaaatgcttcatgcttctgaattttgcgttctaaattagaaagatctctataattttcatcggaagctgttttgattttttccgccatccatgctcgtagatcatacacttctgcgcagaattcctggtaatttttggaggcatctagagcatctgctcgtttttgagaggcatctttaactgcttgtcttctttcaagtacctgctggacgcggtctgcgattcctgcagcgtcataatgctgtttggcgattagagtgttagcctttttggcgaaagcgttcagacgatcgtcttgagcagctaatgtgttagcgaaagccctatgttgtttatgcaaagcttcaacctcatcaagtgagcttccaagttcgtcgaattctaagaaagcttgatggcctgacgtaactgcatcgatattatcagcttctttgttgaatatttggagttctaaacattgctgcaaccaaatatccttctctttccatcctctagcgatagcttcttgttcagctagaagtctgtcgataacgctttgtacttcaggaagattgggatttgatttcaaaagtttctttccaagaccagttacttgtttaaattcatcatttttagctttaatatcttcagcaagatcttgatgtgcttttaaaagtgcctctgccgtttgaacatctcgtacaacattgtcagcattaagttgcttcttagtatcggctacccaattcaacaaatgtttggaactgttggtaaatatttgttgtcctacagcgtcttcaattctagttcttctttcaagagccttgtctttgaccttcttccaaagatcgtcaatatctttttgtttttgaataacatttgctttttcgttggggtaagatttttgaactgaatttcccaggagatttactttatcgaccttttcttcgattggcgatagttctctttctaaattatcgtgtcttctttgcaaagcttgaatggtttttaaatcatgtcctaaaactgcagtatctagctgttccatcttttctaacatccaatctttcgtttcctcgcaaattttattgaatagttctacactactggcaccttccagactcttttctttttgagctttaagtgtgttaagtttctgccaagctgcctggatttgtctatgtcgaattttgactttgtctatttgagaatggttttgatttacaaaaactttaacatcggcatccaaagcatccattctcttttgactcgcagataaatccgtgaggaatttctcatattttctctttgcttgttcaatactgtcgttcggatcatcgttagccaaaagttgttctttgtctttaatccacttttcaaaatcatcacactctttgtaaaaggtaaataactttaccgcatctgctaataaagcttgcctcttagctgccaaatcttgaagctgtgcataagaatcgttgatagtcttttgtctcttaggtacactgtccgtatcgtcaacttttcttttttgtgctcgaggtagctgtcttagaaccttgactggaactttagtattaaccaattttgtctttttgactttttgaacagattttacgacctctggttttctgatattaacaagaataattcttggttcaatttcttcaacataatttgcaggagcaaaaccatcagtaccatctgctttgcgtacacaccaccaatctggattgcttttgtttaacaagaacatcacttcatttttgaccatagataaaccgtggtcgttgaacggatacaaagcctttacctgaggaactttcttttcttcggtgattaccttatattccgttttttctacgggctcgtcgacccacacctcagttggcaccatcctattttcatattggacgtcttctattggttcattaacttcaggttcattatttaaatccaaagtggatattccagaggctacgagtcgatcagcttgaccattcagactataaatgtctccatgatatgcattgatttcttcatccaacactttgtgtctttgcaacaaagctttggcactgagttcgtccgtaccataatcatccgaagtaacaagagctaatttttcattcaaccaagactcagcttcgtttgcatctgcataaaactggtatgcttcagctgcatcttgtagttgcttggcccgttcttttgccaatttatccagtagttcccaattcttcttatttttatccacatgttgctggatttctaaagatctaggatgattatctgatattaactgcttactagttgctcccaattgatcaaatttgttctttcttgtttttatttcatccataagcaccttatgtttctgctgtaaggaaagcacacctcgtaaatcttttgccataattccagcttggcatattcgttgtttctcaattaaccaagcttcttcatcttcttgatcttgtaagaattggtaaaagtttctagcttcttctagtaacgcttttcttttggcactcaattccctaatctcctcacacacttttccaagttctttaagtttctttaatacctcgtctcctttaggatttccttgagctgtttgatgaccaactctatttaaccaactttccttttcttctaaggacgtaaccattagattttgcaacgcatgtttatgtagtaattcctcaacggctaccaaatgtgccccagtatctgtagaagagagatctattctcagctgttctgtactggtaagaaccgaatctatttcccgtatgatcgacgtaatgcttcccattttgttgaggttgagtttgtgtttttctaagagtgctttgagttcttcccactgttttataatttcgctttctcgtttttggactctatcagaatttcgataattctcattaataagctcttgtgccatatgagataagtcatgaatacgttcttctcttgctaatatatcagcactgatggcctcgtgctttttcaaggtagcatccacttgcaccaaattggaaccataccgaggatctgataaaacttgaatcatctctttcaggtacccttcacgcaaaatactttttttctcgaatttatacatcagttgatctagcctttgctgcctcatcagttcctctctaagagctacctctctgctatgttcagctttctctaaagtatcccaagatctttcgatatcctgaactagtttgccgtcagaagggtaaaaagctggttgcctaagttcctttaattgagtatttatgttaaagaataaagcctctatttcgcttcgttctatgtattttggaggcttctcttgattacggtagtgaccgaattgtataaatagattttgaatgccctctaaagaatttggaaattgtcggtcctctaattctacaatttttaatttaatccagtccaatagatccgtggtcaacttgtcgtaggtgagtttcagtttgtcagagtcgatcatctgtttaataattttagctattcgtcttccagatttttcttcttgtttcatacgtgcaaaagtgtgataatatgatgcaacgtaagtcataatactcttctcatcaggtcttgaagtatcaatgtcttcagcgtctaatagtcttagaatgcctaattcgttctgtgcaatgtcgaaggcatgattcaagttatcaatatttttattgtgttttaaagactcgaattcaaataagtccggtcggtgggcatgtataagcgcgttaaaacctaagccgtttctccacgaagaagaaaagtctgatatatgaacatctgggtaaccatgagttttacgttgagcccataatagaagggcgtctttggctgatttcttttccgaactctcattgtcttcatcttctggtatttcaatttcttgaatttgaaacctta

SEQ ID NO: 4344 - DNA, 8965 bp, Diabrotica virgifera
  SmartBlast Evalue=0; Info=Muscle-specific protein 300 n=1 Tax= Tribolium castaneum RepID=D6X2J9_TRICA
gttacaacctttaattttcacaaccaacattaaaattaaaaaaacaacatataaaatatattaattctgttcacacattttgtgcaagtttccccaatatacagatatatagtgaaatgttccttttgataacgatacaaaaaaactaatcctaattatttatagaatattacaaaattgtcaaaatcgtgtttaatcgacggtttcagagataagtcacatatttacaaatatatgttcaaatataaaacaaatataaaaaacggttaaagattctaaaacacgagtgattggtgtgttaaaatcttcaattaaatcattggaatggatttcgtaacgcacagcttcaatcagtagatttattcccccttagcagttacgttttctcgaattcgtcgctatcttttcaaccaatttatcacagaccattaggacattaaaaaggaagtccaaaactactgatttttgataacttcgagctgtgttacacgtctaaatcggcggtggaccattgtcgtacctcagggtgggcgttaggctgtttgctatggagtttacgagtgaacacgcatagtcatcttctgagaaaggaactaaagatgcagcgcccagcatcaagagcattactgcttgtatgggtacggatgctcgtacaactctacccaagaatcggcatcctcgtcgcaagactgaagtgtttatttcggattcatcatcggaaccattgtaggcggctgcatctgctgacgaggcgtcgggtcgatcttgactgggatggtccaaaaggtcatagctgagggattgtaacggtaaaccagaggtagaagcagaagccgagtaacctatcgcgttgggatcccttcctaatacagcgcctaacttaagagtatacacccctgtaagtttgatcaatgactggagtttcagacgcagctctgtcagtctcctgtagatggtgctggaaccttctggagcttcttctctgaacagctggttggctgcttcttggaggctaagaactctgggttcgcatcgttctagctccacgcgaaggtctaggaagcgttggtatttggcttctatgatgtcgtgtggcgctgttagatccactggttctgaggcacggatcttcttctcgtttttctccagccaaatacagagttctgagatgatactgtggaattgttggttattcattaatgctctttgaagttgcacttgccacgcagtggcatgatggcaaatcacgtcccatcttctattatcagtctccaacctcaccctcaactcatcagccttgctggtatcctcactgtgatcggccaagtgagttcctacgatgttcaaggacctcacgatgctcttgtggctgtccaggtcaagaaggaactctcggtggtcttggataacatcttctaggtattctatgttagacggtgggttcttttgagttttctgggtaccttcggcgacttgtaaccatttttctagtctccagaggtcgttgtctagttgggcccagttgcgtttcgtgcagagtggacataggatgcgaccggcctcgtgtgtgcataataggttataagcatcgcaggcagcagttctaagctctcgtagtttttgttccttgtctttagccctgaccagcagaatcctaaaccgttccaaaagctcgatgacctcttcagaatatgcttcaatctcagtagcttcgcactcgttgatcaggaggtcgtgaagatgcttgaccaattcagtactggttaaacaacttgccgacatcttggcgattttcttgctactggttggcagttcagcagatccttgtttaggtatctctttattgacattttcctctaattgtcttaagttagctttacattcttctaaagcagcttctagctctactaagtatgcatcttttgcgcttatagaagtcatcttctgtaactgtggtggtaaggtgttgacttgtacagcagaatcacgttcaaacttgagtgtttcaacttgaacactttcatctacctcttgaggtctactttctataattattgtttctatttcagtctttatgtaagtaatacgttcatgcaagttcctacacagaatctggtattcgtcgatcatctcttgaataagctccacctcttttgtcgtactcttcttcattatctgcaacccaagtttgtcagcattctccaaattaggtgtctgttgtgtcagttgtttttcaatctcaacaagtttcttcagcctttcttgaggcgacactttttcaggaagcaagtgttgtaactctgttacttgtgcgtctagtttagtaagaccaactatagcatcttcgtgtgctacagaaaattctctaaacggtgctagctcactttgcagttggtttaggatacctctagctttaggcaatagattttcccaccttacgatgatcactctggtcctggatgttagctcttgaatattcttcggctctatacctggcgctgtgttaagtttggagtatgtttggcttaggatctggaatgcgggttcgtgagattcaatatctttaatttcgttctcaacttcgtagatgagtttctggatatcgtctttgcctaaggaacttgtaggtttatctaaattatttaaagctttctctttatcggagacccaacgttcgtctctttcactgagtttagtaacttcttggagcagtttccagatgagatttattttccgtttcctttcagcagactgaccgcaaacaatcttccaacgtttttcgatgttctctacagcattattgatattttcttcagggaaattggcttgtttatatctggatcagttaacactatagtgcacaggttaactacttcgctaatgttaccgctcttgttttctatggacttcttcagtttatcatgctcttgcagcttccggtctataacttcttgagtacagccttcgaacaccagtggtttcgctaactggatctcaatctgagtcaaccaggctctaatttcagcaattttttcttccagtagtaaaatagtttgcatcaagttgttaattctgttgaacatagttttgcccattttctccaacatactccagtcatccactactccttgtgtgcgtgtttgaatgatctgttttgctgtaacatcggcatactcttcaccgcacgattcgtatatctctttaccagttttcaccaaccagttgtactctctttctttgagagccatctcagcttgaagttcagagtctattttcctcaacaattctttgggttctagtagtttgtgttctggtagaggagtttggttcatgtcatattcgtggtttagtcgttttaatacgtcatcaacccatgttgagaacttggtatatctggcttcgaacgtggacctaataccaagtttttcttctaattgaaggcaaatattagctagttgatgttccaaatcgtcgtgttggtgacgcaataaccacattctttggttaatagttttcatgtctgaaggactgagacactctttcagctgttcttgcatttggctgagttgttgtaatgtattactagtagcagttagacgatctttggtattacgtagaatatccagtttgttactaactacagacagagaagtttgctggttcaatactgtttcatttacaatctcttgtatttcatcaaactctttctggaccttatagacagtgtcttcgtatgtttttactaaaatagttattctatctaagaattgtttccaggtatctaagccagcttgcagattggacagacgttgttttattgcaacatgttccattctaatcgaggtagctaaagcatcatcgcagaattgcaacaactgattttgttgccgctgcaaatcatcagcttggtcttcaccttgtggaactttgtccaagaggttctggattctagaaagtagtttaggaattcgtctaatatgcatgtatctaagttgcatgtgttccctttctttttcaatacctttaagccaattcagcagcttattttgatcaccattgtatttctcccaagcatccaaacgattctgaacttcagcgtgtctatctagaattctagaaagcgtctcattgtggagattcgttagagaattgaattgttccattacacttgattcaactaatccactagctaactgatcacctttaccagcaggttgtagaacattttgctgagtcgttagcaaattctggtgtatttgacaaaggtgttggtggtctgacagactgtggtaatctccaggaatagttccttgcaagaactgctgtacattcattaagtattcttgccataatttgagagcagctgcaccgtcttcatttttaaccaatctggtactcaaacgatgatattgttggaaggtttctctgaacacttgctgccataattcaagaatttctattactgatgtttcggtttttgtggtggagatttcaattgttttgtctttgagcttctggatttgtccttcggctttgctgagggctagtagatggtccctcaagaccaacagtttttcttcattgtccgaatctgcaccattcttttcaatattggtgatactcttttgaacagaatccaaataatctttggttccattaatttccttttggttatctttcttgatcttcgctttggattctgcgacgtctgcgagggctgtgagcgactccctgacatcttcaaggcgttttcctagagcttctacctctccacctaaaagtgcattggcatcgagtccaactgcggatgctataccggacaccagttgttgaagtttcgctagacgcttggtatgggcagctaaggtttcctcacaaaccttgacatgttggatggcctcctcgggttccaaattttccacggactccatcggattctcaatccattctttcaccaagtccgaagcttctttgtactgcttccataggtcggcggcgttgtggtacttggtgcacagctccttcaagttggtgcacgtcgtctcgtaggctgtaacggcttccttcactgcagcttcgatcttggccgaaatctcgggggagcagctgtctgacagcggcttcgatgcgtccttgagttcggagacgaggttctcgcgggaaactaggtctactgagacactctctaatctttctgttgctttcctcagtcgttcgtaatccacagttccttgtacggtaagaagctcgaccatgaagtccgcctcttgtacactctgctgcaccaactccaactgccgctcgaacctcttccacaaggccaatctgcttctcagaagagccaggatatcgccgcatctcttctccaaagctgtgtggtcatcctgtaatttggagatgtctctttcgacggtgagtggagacactgacaccttcagtctagttggaagaccgtgaagtagttgtctgatggccattaagtcttgccataaagttactagttcttctcctacttcgtagcattcggagactgacttctcgatcgagtcgctgcctagtttttccgagctttcacaaaggtctagtctcttactcatttctccatgtttccttctaactcgttcaatgctcttttgaatggcttgtaattgctcttttactaaagttcctccttccagttcttcggctatggttacctctaacctcttggacaaggctagaagagtaccgaccttctctgactcagcagctgataataaaccgagtctactcaattcattctggatagtttctgttctggttgccattatttggagtcgttcaacgtacaagcttaattcttcttctgtttttataataccttttaagttgtcgacgtcagttttgaggtcttgtagctcttgttccaagaagagcagcttgtcatttactggaacatctggtgctgaaatgttgtccaaaatagaagcttctagctcatttattttcttagacactctttgccattgagcgttcagttctgagttatttgctctctgatacatttcgtcactgataggaacaatttgaagagatttgtcaagagcagttccagcgtttactcgagctgaattatgtacttcatgttgagctttcagttcccagaagcgtcttagatgacctcttggaccgaaaggtacttcgatttgacttagttctattccagcttctttcaaccaatattcgactttgtcactaagcaggttgtacatcttccaactatctttaaaagcttggagtcgctctaggttgacttgaacatcctcttgaagcttctggataatttcaagggattcaaagtaagcttgttctagttcggaacaagaaaccagttcttgtaatttttgagcgacgcaatttagatgagtaagtttggcgtggtggtagtctatatcagcagctaaagagttatgaagatcgatgtatcgttcataatctgaagatgtgacgctatttaaatctggaacacgttgttgagctacttgtaaccatctcagttcatctctggtgctctgttctaaaactgtccatctcgaagcagctaaggacattatttggaatcgaccagttgatttatctaatataacactggctctttcgtacagattttgatggagttgtgaatgtattgctcttgtttccgaatccagattttcttcaagtgattcaagaattgctctacaatgactcaagttaacgaagaatttgcggtgattctgcatctcgtcttctaaatgttccaaattacgaacagatatcggactttcaatcaatgcttcggctattaaaataatctggctgaattcttttaaagtttgctcgtattcatcagccaaagagaggaattggtaagctttttctctttctacaacaacttgttgttcgatctgtttggctatctcattgtttaggtaaacttcccgtggaatttctttagtggggaaatctctcatcaagcctttggcagttgcgatcagatggacaattttaacaatttgagatctgttgttgttttctattttctcaagttcgctcagtttggtttgaggagaggcatcagaatcttttagctcacttaattgccttctcaattctctgacttgtttgttagttgtggttacctcatccaaaaattcgttccacctcttcaggtcttcagcagcaatttgttcgttttcttctgtaacttcttcaataactttgacttgttgttgaagggaatctacgtaactcttgattctctgtcgctcatcttcgttgtaaatgtcgtctgtctgtttgatgaccgactgaagttgctctactttggtttcgatgttggcaatttcttgcttgagctcattaaactcttgaactctagcagctgatggaccttctagagtttgttgtctgttaacatatattctgtattctattgtttctaaccaagtagtaatcgtttccactgtagttatcactgtttgctgtatgacaaccacatctcttctttccacagcttgttgcagtaagactagattctgttgaatgttattgttcctttgttgaattgtttcgtctgtaataacctcgtttagagtggctaaatacaacacatcgctgagatgtgtcgttttctttgcattctgcaagtttttgaatctctctagtgcctgtgtttggttccatctaatattaacctccttaatgggaactgaacgttggacttctgcttgaatcaaagcagtagaagcatctggaggtctttgccaggttgacacagagtactctggtggtgaaagtggcccagcatcggaagctggtgttagaggggtatctgcgatgattcttggagattgtacttcttctatagtcacagacgtaacgtgttttcctttgccttttggtttggcaacctgaggcttcttcttttgcttgtctgtgctttcgggagcagttacagtgtaaccatcaggcgattgttcattaggtttactttcatctacctctgtaatagttagttcctgttgagaagttggtacttcctctaattctttgctcacaactgttacatcggagggttgagttggttttggtacatctgatactttggtttgtggctgaggttgcttttgtttttcctccttaataataacttcaagttgttctgttgtaagttcagtgacactgggtttggtttcagttttctgaatttgaggcaagagttgactttcaggcttatctaatttagcagcagtatcaggagtagactctttagaaagttgagatggtaaatcttcatcagccttgataatgcttggttctggtgcagtaggttttgtctgaggtaatgatattggtttatcgttgatcagtactgaattttcgtcattaaaagcactgtctttctctgattctataaaatcaacagttgaagtaacacttgaaggtttaacgctaacatcgtattttatgatcacttcctctgattctggagaaagaggaatatctttttcttcagtaagcattgaatcaacggtaaaggtagcaacttgtggaattttatcatctgactttacagtataggtatcttttgtggttatttcaataccaggaacagtttctgattcttgaggaactgagagagtaatatcaactgttgtcgcctgttgatccaattcagcaggagtaggctttttacctttgatcgaaatagtttttactttatcttcgtcaatatctgtaaatactttagaaactacttgggtagttgtcactgtggtcttgttctgtggtgttaattcttgttccactttttgctcagatgtttgtggaacttcatgttccatatgtcttgttggagaaggtgttctcgatcttctagtaatgtcagcataagaaagcggagatacggtatcctctactgtagtctgcctcttgaattcagaaa

SEQ ID NO: 4345 - DNA, 8926 bp, Diabrotica virgifera
  SmartBlast Evalue=0; Info=Muscle-specific protein 300 n=1 Tax= Tribolium castaneum RepID=D6X2J9_TRICA
gttacaacctttaattttcacaaccaacattaaaattaaaaaaacaacatataaaatatattaattctgttcacacattttgtgcaagtttccccaatatacagatatatagtgaaatgttccttttgataacgatacaaaaaaactaatcctaattatttatagaatattacaaaattgtcaaaatcgtgtttaatcgacggtttcagagataagtcacatatttacaaatatatgttcaaatataaaacaaatataaaaaacggttaaagattctaaaacacgagtgattggtgtgttaaaatcttcaattaaatcattggaatggatttcgtaacgcacagcttcaatcagtagatttattcccccttagcagttacgttttctcgaattcgtcgctatcttttcaaccaatttatcacagaccattaggacattaaaaaggaagtccaaaactactgatttttgataacttcgagctgtgttacacgtctaaatcggcggtggaccattgtcgtacctcagggtgggcgttaggctgtttgctatggagtttacgagtgaacacgcatagtcatcttctgagaaaggaactaaagatgcagcgcccagcatcaagagcattactgcttgtatgggtacggatgctcgtacaactctacccaagaatcggcatcctcgtcgcaagactgaagtgtttatttcggattcatcatcggaaccattgtaggcggctgcatctgctgacgaggcgtcgggtcgatcttgactgggatggtccaaaaggtcatagctgagggattgtaacggtaaaccagaggtagaagcagaagccgagtaacctatcgcgttgggatcccttcctaatacagcgcctaacttaagagtatacacccctgtaagtttgatcaatgactggagtttcagacgcagctctgtcagtctcctgtagatggtgctggaaccttctggagcttcttctctgaacagctggttggctgcttcttggaggctaagaactctgggttcgcatcgttctagctccacgcgaaggtctaggaagcgttggtatttggcttctatgatgtcgtgtggcgctgttagatccactggttctgaggcacggatcttcttctcgtttttctccagccaaatacagagttctgagatgatactgtggaattgttggttattcattaatgctctttgaagttgcacttgccacgcagtggcatgatggcaaatcacgtcccatcttctattatcagtctccaacctcaccctcaactcatcagccttgctggtatcctcactgtgatcggccaagtgagttcctacgatgttcaaggacctcacgatgctcttgtggctgtccaggtcaagaaggaactctcggtggtcttggataacatcttctaggtattctatgttagacggtgggttcttttgagttttctgggtaccttcggcgacttgtaaccatttttctagtctccagaggtcgttgtctagttgggcccagttgcgtttcgtgcagagtggacataggatgcgaccggcctcgctaagctctcgtagtttttgttccttgtctttagccctgaccagcagaatcctaaaccgttccaaaagctcgatgacctcttcagaatatgcttcaatctcagtagcttcgcactcgttgatcaggaggtcgtgaagatgcttgaccaattcagtactggttaaacaacttgccgacatcttggcgattttcttgctactggttggcagttcagcagatccttgtttaggtatctctttattgacattttcctctaattgtcttaagttagctttacattcttctaaagcagcttctagctctactaagtatgcatcttttgcgcttatagaagtcatcttctgtaactgtggtggtaaggtgttgacttgtacagcagaatcacgttcaaacttgagtgtttcaacttgaacactttcatctacctcttgaggtctactttctataattattgtttctatttcagtctttatgtaagtaatacgttcatgcaagttcctacacagaatctggtattcgtcgatcatctcttgaataagctccacctcttttgtcgtactcttcttcattatctgcaacccaagtttgtcagcattctccaaattaggtgtctgttgtgtcagttgtttttcaatctcaacaagtttcttcagcctttcttgaggcgacactttttcaggaagcaagtgttgtaactctgttacttgtgcgtctagtttagtaagaccaactatagcatcttcgtgtgctacagaaaattctctaaacggtgctagctcactttgcagttggtttaggatacctctagctttaggcaatagattttcccaccttacgatgatcactctggtcctggatgttagctcttgaatattcttcggctctatacctggcgctgtgttaagtttggagtatgtttggcttaggatctggaatgcgggttcgtgagattcaatatctttaatttcgttctcaacttcgtagatgagtttctggatatcgtctttgcctaaggaacttgtaggtttatctaaattatttaaagctttctctttatcggagacccaacgttcgtctctttcactgagtttagtaacttcttggagcagtttccagatgagatttattttccgtttcctttcagcagactgaccgcaaacaatcttccaacgtttttcgatgttctctacagcattattgatattttcttcagggaaattggcttgtttatatctggatcagttaacactatagtgcacaggttaactacttcgctaatgttaccgctcttgttttctatggacttcttcagtttatcatgctcttgcagcttccggtctataacttcttgagtacagccttcgaacaccagtggtttcgctaactggatctcaatctgagtcaaccaggctctaatttcagcaattttttcttccagtagtaaaatagtttgcatcaagttgttaattctgttgaacatagttttgcccattttctccaacatactccagtcatccactactccttgtgtgcgtgtttgaatgatctgttttgctgtaacatcggcatactcttcaccgcacgattcgtatatctctttaccagttttcaccaaccagttgtactctctttctttgagagccatctcagcttgaagttcagagtctattttcctcaacaattctttgggttctagtagtttgtgttctggtagaggagtttggttcatgtcatattcgtggtttagtcgttttaatacgtcatcaacccatgttgagaacttggtatatctggcttcgaacgtggacctaataccaagtttttcttctaattgaaggcaaatattagctagttgatgttccaaatcgtcgtgttggtgacgcaataaccacattctttggttaatagttttcatgtctgaaggactgagacactctttcagctgttcttgcatttggctgagttgttgtaatgtattactagtagcagttagacgatctttggtattacgtagaatatccagtttgttactaactacagacagagaagtttgctggttcaatactgtttcatttacaatctcttgtatttcatcaaactctttctggaccttatagacagtgtcttcgtatgtttttactaaaatagttattctatctaagaattgtttccaggtatctaagccagcttgcagattggacagacgttgttttattgcaacatgttccattctaatcgaggtagctaaagcatcatcgcagaattgcaacaactgattttgttgccgctgcaaatcatcagcttggtcttcaccttgtggaactttgtccaagaggttctggattctagaaagtagtttaggaattcgtctaatatgcatgtatctaagttgcatgtgttccctttctttttcaatacctttaagccaattcagcagcttattttgatcaccattgtatttctcccaagcatccaaacgattctgaacttcagcgtgtctatctagaattctagaaagcgtctcattgtggagattcgttagagaattgaattgttccattacacttgattcaactaatccactagctaactgatcacctttaccagcaggttgtagaacattttgctgagtcgttagcaaattctggtgtatttgacaaaggtgttggtggtctgacagactgtggtaatctccaggaatagttccttgcaagaactgctgtacattcattaagtattcttgccataatttgagagcagctgcaccgtcttcatttttaaccaatctggtactcaaacgatgatattgttggaaggtttctctgaacacttgctgccataattcaagaatttctattactgatgtttcggtttttgtggtggagatttcaattgttttgtctttgagcttctggatttgtccttcggctttgctgagggctagtagatggtccctcaagaccaacagtttttcttcattgtccgaatctgcaccattcttttcaatattggtgatactcttttgaacagaatccaaataatctttggttccattaatttccttttggttatctttcttgatcttcgctttggattctgcgacgtctgcgagggctgtgagcgactccctgacatcttcaaggcgttttcctagagcttctacctctccacctaaaagtgcattggcatcgagtccaactgcggatgctataccggacaccagttgttgaagtttcgctagacgcttggtatgggcagctaaggtttcctcacaaaccttgacatgttggatggcctcctcgggttccaaattttccacggactccatcggattctcaatccattctttcaccaagtccgaagcttctttgtactgcttccataggtcggcggcgttgtggtacttggtgcacagctccttcaagttggtgcacgtcgtctcgtaggctgtaacggcttccttcactgcagcttcgatcttggccgaaatctcgggggagcagctgtctgacagcggcttcgatgcgtccttgagttcggagacgaggttctcgcgggaaactaggtctactgagacactctctaatctttctgttgctttcctcagtcgttcgtaatccacagttccttgtacggtaagaagctcgaccatgaagtccgcctcttgtacactctgctgcaccaactccaactgccgctcgaacctcttccacaaggccaatctgcttctcagaagagccaggatatcgccgcatctcttctccaaagctgtgtggtcatcctgtaatttggagatgtctctttcgacggtgagtggagacactgacaccttcagtctagttggaagaccgtgaagtagttgtctgatggccattaagtcttgccataaagttactagttcttctcctacttcgtagcattcggagactgacttctcgatcgagtcgctgcctagtttttccgagctttcacaaaggtctagtctcttactcatttctccatgtttccttctaactcgttcaatgctcttttgaatggcttgtaattgctcttttactaaagttcctccttccagttcttcggctatggttacctctaacctcttggacaaggctagaagagtaccgaccttctctgactcagcagctgataataaaccgagtctactcaattcattctggatagtttctgttctggttgccattatttggagtcgttcaacgtacaagcttaattcttcttctgtttttataataccttttaagttgtcgacgtcagttttgaggtcttgtagctcttgttccaagaagagcagcttgtcatttactggaacatctggtgctgaaatgttgtccaaaatagaagcttctagctcatttattttcttagacactctttgccattgagcgttcagttctgagttatttgctctctgatacatttcgtcactgataggaacaatttgaagagatttgtcaagagcagttccagcgtttactcgagctgaattatgtacttcatgttgagctttcagttcccagaagcgtcttagatgacctcttggaccgaaaggtacttcgatttgacttagttctattccagcttctttcaaccaatattcgactttgtcactaagcaggttgtacatcttccaactatctttaaaagcttggagtcgctctaggttgacttgaacatcctcttgaagcttctggataatttcaagggattcaaagtaagcttgttctagttcggaacaagaaaccagttcttgtaatttttgagcgacgcaatttagatgagtaagtttggcgtggtggtagtctatatcagcagctaaagagttatgaagatcgatgtatcgttcataatctgaagatgtgacgctatttaaatctggaacacgttgttgagctacttgtaaccatctcagttcatctctggtgctctgttctaaaactgtccatctcgaagcagctaaggacattatttggaatcgaccagttgatttatctaatataacactggctctttcgtacagattttgatggagttgtgaatgtattgctcttgtttccgaatccagattttcttcaagtgattcaagaattgctctacaatgactcaagttaacgaagaatttgcggtgattctgcatctcgtcttctaaatgttccaaattacgaacagatatcggactttcaatcaatgcttcggctattaaaataatctggctgaattcttttaaagtttgctcgtattcatcagccaaagagaggaattggtaagctttttctctttctacaacaacttgttgttcgatctgtttggctatctcattgtttaggtaaacttcccgtggaatttctttagtggggaaatctctcatcaagcctttggcagttgcgatcagatggacaattttaacaatttgagatctgttgttgttttctattttctcaagttcgctcagtttggtttgaggagaggcatcagaatcttttagctcacttaattgccttctcaattctctgacttgtttgttagttgtggttacctcatccaaaaattcgttccacctcttcaggtcttcagcagcaatttgttcgttttcttctgtaacttcttcaataactttgacttgttgttgaagggaatctacgtaactcttgattctctgtcgctcatcttcgttgtaaatgtcgtctgtctgtttgatgaccgactgaagttgctctactttggtttcgatgttggcaatttcttgcttgagctcattaaactcttgaactctagcagctgatggaccttctagagtttgttgtctgttaacatatattctgtattctattgtttctaaccaagtagtaatcgtttccactgtagttatcactgtttgctgtatgacaaccacatctcttctttccacagcttgttgcagtaagactagattctgttgaatgttattgttcctttgttgaattgtttcgtctgtaataacctcgtttagagtggctaaatacaacacatcgctgagatgtgtcgttttctttgcattctgcaagtttttgaatctctctagtgcctgtgtttggttccatctaatattaacctccttaatgggaactgaacgttggacttctgcttgaatcaaagcagtagaagcatctggaggtctttgccaggttgacacagagtactctggtggtgaaagtggcccagcatcggaagctggtgttagaggggtatctgcgatgattcttggagattgtacttcttctatagtcacagacgtaacgtgttttcctttgccttttggtttggcaacctgaggcttcttcttttgcttgtctgtgctttcgggagcagttacagtgtaaccatcaggcgattgttcattaggtttactttcatctacctctgtaatagttagttcctgttgagaagttggtacttcctctaattctttgctcacaactgttacatcggagggttgagttggttttggtacatctgatactttggtttgtggctgaggttgcttttgtttttcctccttaataataacttcaagttgttctgttgtaagttcagtgacactgggtttggtttcagttttctgaatttgaggcaagagttgactttcaggcttatctaatttagcagcagtatcaggagtagactctttagaaagttgagatggtaaatcttcatcagccttgataatgcttggttctggtgcagtaggttttgtctgaggtaatgatattggtttatcgttgatcagtactgaattttcgtcattaaaagcactgtctttctctgattctataaaatcaacagttgaagtaacacttgaaggtttaacgctaacatcgtattttatgatcacttcctctgattctggagaaagaggaatatctttttcttcagtaagcattgaatcaacggtaaaggtagcaacttgtggaattttatcatctgactttacagtataggtatcttttgtggttatttcaataccaggaacagtttctgattcttgaggaactgagagagtaatatcaactgttgtcgcctgttgatccaattcagcaggagtaggctttttacctttgatcgaaatagtttttactttatcttcgtcaatatctgtaaatactttagaaactacttgggtagttgtcactgtggtcttgttctgtggtgttaattcttgttccactttttgctcagatgtttgtggaacttcatgttccatatgtcttgttggagaaggtgttctcgatcttctagtaatgtcagcataagaaagcggagatacggtatcctctactgtagtctgcctcttgaattcagaaa

SEQ ID NO: 4346 - DNA, 7706 bp, Diabrotica virgifera
  SmartBlast Evalue=0; Info=Spectrin beta chain n=3 Tax=Apocrita RepID=E2ATM6_9HYME
gttagctgtcatgaagggcgtttgcgtttgtgaattaatggacaagtgatttaaagtatttacggtaaatatcggttttattaataaaagagtggttgtgttcaaatattattgcttcaccgaatagatagccagctttgctggtaaattttaaacaatgacaacggacatcagtatagtgaggtgggaccccaccttgcaacaagaaattgtcgaagattacgaatacgacgggggtaactcatcgtctaggcttttcgaacggtctcgaatcaaggctttagcagacgaaagagaaagcgtccaaaagaaaacgttccaaaaatgggtgaactcacacttggtccgagtgaacgcccgtatctccgacctttacatcgacatgagagacggcaagaacttaataaaactcctagaagtactgtcaggagaacgactgcctcgccctacgaaaggaaaaatgcgtatccactgcctagagaacgtagacaaagcgttacaattcctaagagaacagcgcgttcatttagaaaatatgggatcccacgacatagtagacgggaatccccgcctctccttgggtctgatatggaccatcatccttcgcttccaaattcaagacatcacaatagaagaaactgataatcaagaaactaagtctgctaaggacgcacttctgttgtggtgtcaaatgaagactgcaggttataataatgttaacgttagaaacttcacaacatcttggcgtgacggtcttgctttcaacgctcttattcacaagcatcgtccagatcttattcaattcgaaaagttgtccaaatctaaccccatccacaatctcaataatgcttttaacgtagccgaagacaaactaggcctcaccaaattattagacgctgaagacgtttttgtagaacaaccagacgaaaaatccatcatcacttatgtagttacttactatcactacttcagcaagatgaagcaagaaaccgttcaaggaaaacgtatcggtaaagtagtaggtatagctatggagaacgaacgaatgatcaaagaatacgaatccttaaccagcgatctgcttgcatggatcgaagcaacaatagtagctctaggtgatagaaatttcgctaatagtttagctggcgttcaagctcaactaggccaattcaataactaccgtattgtagagaaaccaccaaagttcgtcgagaaaggtaacttagaaattctgctcttcacactccaatcaaaaatgagagctaacaatcaacgaccttacactcctaaggaaggtaagatgatatcagatatcaacagagcttgggaaagactagaaaaatccgaacacgaaagagagctggcgttgagagaagaacttatccgccaagaaaaacttgaacaactagctgccagatttaaccgaaaggcaagcatgagagaaacttggttaagcgaaaaccaaaggttggtgtctcaagataacttcggccaagaattggcagccgtcgaagctgcagccaagaaacacgaagctattgaaaccgacatatttgcatacgaagaaagagtacaagctgttgtatcagtggctggagaattggaagctgaaaattaccacgatatggaaagaatcaatgccagaaaagaaaacgttcttagactatggaattacttattggaattgcttaaagcacgtagaattcgtctagatatatcacttcaactacaacagaacttccaagaaatgctacatattctagatgccatggaggaattgaaacaacgtctccttactgacgattacggcaaacatctgatgggcgtggaagacttacttcaaaagcacaatctacttgaagctgacattaacattctcggcgacagagtaaaagcagtcgctagtcagtcacagagattcgtcgatattgaaaatgaagaaggatatagaccatgcgatcctgccttagtattagaacgtgtccaacaattagaagaagcttacgctcagttagtaagacttgccgttgaaagaagaacccgccttgaagaaagcaagaaattgtggcagttctattgggatatggctgatgaagataactggattaaagaaaaagaacaaattgtttctacatcagatattggtcacgaccttaccacagtcaacctactgcttagcaaacataagatccttgaaaacgaactatcttctcatgagtcgcagttagaggcggccctcggggttggtgaagaactcatcaacggaggccactttggtgcggaaaagatccaagaaaggctaaatgaaatccgtgacgcatggaagcaccttctagatttagcagcctaccgtagaaagcgattagaagaagctgtagactaccaccaactgttcgctgatgctgatgatattgatatttggatgttagataccttaagactggtatctagtgaagacgttggacaaaatgagggtaacgcacaatctctgctcaagaaacacaaggatgttaccgaagaacttaagaactatgttagtgtcattgacgcccttcaccaacaagcagaagctttgggaccagaagtagctaattcaccagaagtcaataaaagacttgcttccatcgataaccgatacaaagaattattggaattggccaaacttagaaagcaacgcttgcttgatgctctttcgctatacaaacttctttcagaaagtgatggagttgagcaatggatcaacgaaaaggatcgtatgttacaaacgatgattcctgctagagatattgaagatgttgaaattatgaaacatcgttatgacggcttcgagaaagaaatgaacagtaatgcttcccgcgtagctgtagtcaaccaattagcacgtcaattattgcacgttgagcatcctaattcagaagaaatcactgccaggcaaaatcaccttaaccagaaatgggctgaattacgagaaaaagctgaagctaaaaaagaagaacttaactctgctcatggcgttcaaaccttccacatcgaatgccgcgaaactactacttggattgaagacaaagttagaatattacaaacaacagacagtttggagatggatcttacaggtattatgactcttcaacgtcgtctctcaggaatggaacgagatttggcagctattcaagctaaactcactgctcttcaaaaagaagctgatagtatcgctgatgaacatcccgaagaagcagctgttattagagaacgtattacacaaattcaggtcatttgggagacgttgactcaaatgttgaaagaaagagactctaaactcgaagaagctggtgatctccacagattccttcgtgatttggatcacttccaagcctggcttagcaaaactcaaacagatatcgcctctgaagatactccaagctctctttccgatgccgagaaactactctctcaacaccaagctattagagaagagattgacaactacacacctgattacacaaagatgatggagtatggagagagaattacggcagagccaagtactcaagacgatccacagtatatgttcttgagggaacgtctaaaggcgctgaaagatggatgggacgaaattcatcaaatgtgggagaacagacagcagctcctttctcaatcactcagtttgcaattactcgacagagatgccagacaagcagaagttatcctcaaccaacaagaacacactttggcgaaagatgagagtccaacaactcttgaacaagctgagaactcacttaaacgccatgaagcattcctcgctaccatggaagctaatgatgacaaaatcaatggcgttgtagaattctcaagaagattgggcgatgaagggcacttcgctggagataaaatcactaaaagagctgacaatatcgatgaacgtagaatggccaacagagagaaagctcaggcactcctggaaagacttagagatcaattggagctacagcagttcttacgagattgcgatgaattgggcgaatggattcaagaaaaacacatcacagctcaagacgaaacctacagatcagccaagactgttcactctaaatggacaaggcatcaagctttcgaagccgagattggtgctaacaaagaacgccttcacaacctccagaaggccgccgaagaattggctaaagagaaaccagaatatgctagtcacattcaaccaaagatcgaagatatggtagatcagttcgatgttttggagcaaacgacgaaagagaagggcgaacgcctgtttgacgctaaccgcgaagtacttatccaccaaacttgcgacgatatcgactcctggatgaacgatctcgaaaaacaaatcgaaagtgacgacactggtgccgatctggcctccgtcaacattctcatgcaaaaacaacagatgatcgagacccaaatggccgtcaaagcccgccaagttggagaactcgagaaacaaaccaagcatctggagaccgctgctcccgaaaaagacatggaagaaatcaaagtcaagaagaagaaggtggaacaacgtttcgcgcaactcaaagaaccgctcatcgaaagacagagggtgttggaaaagaagaaggaagccttacagttcaggcgagacgtcgaggacgaacttttgtggatagccgaaaagatgcctcaggctttgtctacagaatacggaaacagtcttttccaggtgcatatgttagagaagaagaatcaatcgttacagacagaagtagataatcacgaacctaggatcaacacagtttgtaataatggacagaaactaatagatgaaggccatgaagactcaggcgaatttagcagactaataaatgaacttcacaaagcgtggcaagaactcaaagatgccatcgagaaacgcagagaaaacctacttagaaacgaaagagcccaacaatacctgttcgacgccaatgaggccgagagctggatgagcgaacaagaactttacatgatggtggaagaccgaggcaaagacgaaacgtcggcgcgcaactgcatgaagaaacacgaaagcctcgaagctgcagtcgaagcttacgcggatacgatcagatctcttggagaaactgtacgagctttagctgctgaaggtcacccgctggctgagcaagtagctgtcaaacagtcacagttagacaagttgtacgccggcctcaaggatttggcgggagaaaggagagccaaactagacgaagcattacaattgttcttactcaacagagatgtaggagatttagagcaatggatagcagatagagaggtagtagcgtcttcccacgaattaggccaagactacgatcacgtaactttactttgggaacgctttaaggagttcgcacatgacactgaagcaataggaagcgagagagtcgctgcagttaatgatgtcgccgatcagttaatagctgcaggtcattcggattctgcattgatagcagaatggaaggatggtttgaacgaagcttggcaagatctactcgagttgatcgaaactaggacacagatgttggctgcatctagagaattacacaagttcttccatgattgcaaggatgtactgagcagaatagtggaaaaacaggtatccatgtctgatgaattgggaagggacgcaggagctgtcaatgcccttcaacgcaaacaccagaacttcctccaagacctacaaacactccaatcgaacgtccaacaaatccaagaagaatcagctaaacttcaagctagctatgccggtgatagagctaaagaaatcaccaacagggagcaggaagtggtagcagcctgggcagccttgcagatcgcttgcgatcagagacacggaaaattgagcgatactggtgatctattcaaattctttaacttggtacgaacgttgatgcagtggatggacgaatggacgcggcagatgaacaccagcgagaaaccaagagatgttagtggtgttgaattgttgatgaacaaccatcagacactcaaggctgagatcgaagccagagaagacaactttacggcttgtatttctttaggaaaggaattgttgagccgtaatcactatgctagtgctgatattaaggataaattggtcgcgttgacgaatcaaaggaatgctgtactgcagaggtgggaagaaagatgggagaacttgcaactcatcctcgaggtataccaattcgccagagatgcggccgtcgccgaagcatggttgatcgcacaagaaccttacttgatgagccaagaactaggacacaccattgacgacgttgaaaacttgataaagaaacacgaagcgttcgaaaaatcggcagcggcgcaagaagagagattcagtgctttggagagactgacgacgttcgaattgagagaaataaagaggaaacaagaagctgcccaggccgaagaacgcgctagacaagaaaaggaagaagctgaacggttggcagcaatcgctgcctcgcaacctaaagaaatcgaaacaatggtaactgacagaccagatgctggatcccctgctgctgaagagagaccagtgcatgaagaacggcatacaagacctcagactttgccctctacgcctgtgcaaacgacaccgaagtcaggtaccactcctcgttcacaaacacacccaagcagcgtaggagatgacgaactagtcgaaggaactttggtgcgcaagcacgaatgggagaacaccacaacgaaagccagcaaccgttcctgggacaaggtatactgcgtcgtgaaaggaacccaattggcgttctacaaggacgcgaagacggcaaaatcaacaccggaccagaggtttaagggtgaaccaccattgtcactgagaaaagccgtcgctaatgttgcgcaagattataagaaaaagaaattcgtgtttaggctgaaattggaaagcggtggcgaattcctcttccaatcacagaacgacacagagatgaacacgtggatttcaaaaataaattctcacgcagacaccgaatctgccggtccttctcgctcacatacattacccgcatctgggcagaaggaggattccaaacgtcgcagcttctttactttaaagaaaacataaatttctacttctactcttgatcatacctgtatctttacgctttacctgagaggactcctgtccagacttcgcccttctttttttatattagcataaatatttaatatatttttcttgtagtttgcacattatattattaaatagtaattttaaatgtatagtaatatattatactatgtgattaaaaatttacttgactggggcacaaaactaccaacctcagcgagagccagtgttgtattatttattaaaaaactatttggatatatacatagttgaagaataagaagaaaataataaaatgtacgatgtaaagtcccagcataaccgtattacagttaactgttcggcagtttttcgtctgccctgttccctttttcatttttacgtttgatgtaactaaatctaaacccgttatttttaagttgcaatatattttaagctttgcttagcaaaggtcgacggtcggtgacaagtcatttattatatttcaatattatttgtagagttatttctattttacataaatgaactgtgtgcttttaaaaatggagttataataaatattgtttttagt

SEQ ID NO: 4347 - DNA, 7613 bp, Diabrotica virgifera
  SmartBlast Evalue=0; Info=Spectrin beta chain n=3 Tax=Apocrita RepID=E2ATM6_9HYME
gttagctgtcatgaagggcgtttgcgtttgtgaattaatggacaagtgatttaaagtatttacggtaaatatcggttttattaataaaagagtggttgtgttcaaatattattgcttcaccgaatagatagccagctttgctggtaaattttaaacaatgacaacggacatcagtatagtgaggtgggaccccaccttgcaacaagaaattgtcgaagattacgaatacgacgggggtaactcatcgtctaggcttttcgaacggtctcgaatcaaggctttagcagacgaaagagaaagcgtccaaaagaaaacgttccaaaaatgggtgaactcacacttggtccgagtgaacgcccgtatctccgacctttacatcgacatgagagacggcaagaacttaataaaactcctagaagtactgtcaggagaacgactgcctcgccctacgaaaggaaaaatgcgtatccactgcctagagaacgtagacaaagcgttacaattcctaagagaacagcgcgttcatttagaaaatatgggatcccacgacatagtagacgggaatccccgcctctccttgggtctgatatggaccatcatccttcgcttccaaattcaagacatcacaatagaagaaactgataatcaagaaactaagtctgctaaggacgcacttctgttgtggtgtcaaatgaagactgcaggttataataatgttaacgttagaaacttcacaacatcttggcgtgacggtcttgctttcaacgctcttattcacaagcatcgtccagatcttattcaattcgaaaagttgtccaaatctaaccccatccacaatctcaataatgcttttaacgtagccgaagacaaactaggcctcaccaaattattagacgctgaagacgtttttgtagaacaaccagacgaaaaatccatcatcacttatgtagttacttactatcactacttcagcaagatgaagcaagaaaccgttcaaggaaaacgtatcggtaaagtagtaggtatagctatggagaacgaacgaatgatcaaagaatacgaatccttaaccagcgatctgcttgcatggatcgaagcaacaatagtagctctaggtgatagaaatttcgctaatagtttagctggcgttcaagctcaactaggccaattcaataactaccgtattgtagagaaaccaccaaagttcgtcgagaaaggtaacttagaaattctgctcttcacactccaatcaaaaatgagagctaacaatcaacgaccttacactcctaaggaaggtaagatgatatcagatatcaacagagcttgggaaagactagaaaaatccgaacacgaaagagagctggcgttgagagaagaacttatccgccaagaaaaacttgaacaactagctgccagatttaaccgaaaggcaagcatgagagaaacttggttaagcgaaaaccaaaggttggtgtctcaagataacttcggccaagaattggcagccgtcgaagctgcagccaagaaacacgaagctattgaaaccgacatatttgcatacgaagaaagagtacaagctgttgtatcagtggctggagaattggaagctgaaaattaccacgatatggaaagaatcaatgccagaaaagaaaacgttcttagactatggaattacttattggaattgcttaaagcacgtagaattcgtctagatatatcacttcaactacaacagaacttccaagaaatgctacatattctagatgccatggaggaattgaaacaacgtctccttactgacgattacggcaaacatctgatgggcgtggaagacttacttcaaaagcacaatctacttgaagctgacattaacattctcggcgacagagtaaaagcagtcgctagtcagtcacagagattcgtcgatattgaaaatgaagaaggatatagaccatgcgatcctgccttagtattagaacgtgtccaacaattagaagaagcttacgctcagttagtaagacttgccgttgaaagaagaacccgccttgaagaaagcaagaaattgtggcagttctattgggatatggctgatgaagataactggattaaagaaaaagaacaaattgtttctacatcagatattggtcacgaccttaccacagtcaacctactgcttagcaaacataagatccttgaaaacgaactatcttctcatgagtcgcagttagaggcggccctcggggttggtgaagaactcatcaacggaggccactttggtgcggaaaagatccaagaaaggctaaatgaaatccgtgacgcatggaagcaccttctagatttagcagcctaccgtagaaagcgattagaagaagctgtagactaccaccaactgttcgctgatgctgatgatattgatatttggatgttagataccttaagactggtatctagtgaagacgttggacaaaatgagggtaacgcacaatctctgctcaagaaacacaaggatgttaccgaagaacttaagaactatgttagtgtcattgacgcccttcaccaacaagcagaagctttgggaccagaagtagctaattcaccagaagtcaataaaagacttgcttccatcgataaccgatacaaagaattattggaattggccaaacttagaaagcaacgcttgcttgatgctctttcgctatacaaacttctttcagaaagtgatggagttgagcaatggatcaacgaaaaggatcgtatgttacaaacgatgattcctgctagagatattgaagatgttgaaattatgaaacatcgttatgacggcttcgagaaagaaatgaacagtaatgcttcccgcgtagctgtagtcaaccaattagcacgtcaattattgcacgttgagcatcctaattcagaagaaatcactgccaggcaaaatcaccttaaccagaaatgggctgaattacgagaaaaagctgaagctaaaaaagaagaacttaactctgctcatggcgttcaaaccttccacatcgaatgccgcgaaactactacttggattgaagacaaagttagaatattacaaacaacagacagtttggagatggatcttacaggtattatgactcttcaacgtcgtctctcaggaatggaacgagatttggcagctattcaagctaaactcactgctcttcaaaaagaagctgatagtatcgctgatgaacatcccgaagaagcagctgttattagagaacgtattacacaaattcaggtcatttgggagacgttgactcaaatgttgaaagaaagagactctaaactcgaagaagctggtgatctccacagattccttcgtgatttggatcacttccaagcctggcttagcaaaactcaaacagatatcgcctctgaagatactccaagctctctttccgatgccgagaaactactctctcaacaccaagctattagagaagagattgacaactacacacctgattacacaaagatgatggagtatggagagagaattacggcagagccaagtactcaagacgatccacagtatatgttcttgagggaacgtctaaaggcgctgaaagatggatgggacgaaattcatcaaatgtgggagaacagacagcagctcctttctcaatcactcagtttgcaattactcgacagagatgccagacaagcagaagttatcctcaaccaacaagaacacactttggcgaaagatgagagtccaacaactcttgaacaagctgagaactcacttaaacgccatgaagcattcctcgctaccatggaagctaatgatgacaaaatcaatggcgttgtagaattctcaagaagattgggcgatgaagggcacttcgctggagataaaatcactaaaagagctgacaatatcgatgaacgtagaatggccaacagagagaaagctcaggcactcctggaaagacttagagatcaattggagctacagcagttcttacgagattgcgatgaattgggcgaatggattcaagaaaaacacatcacagctcaagacgaaacctacagatcagccaagactgttcactctaaatggacaaggcatcaagctttcgaagccgagattggtgctaacaaagaacgccttcacaacctccagaaggccgccgaagaattggctaaagagaaaccagaatatgctagtcacattcaaccaaagatcgaagatatggtagatcagttcgatgttttggagcaaacgacgaaagagaagggcgaacgcctgtttgacgctaaccgcgaagtacttatccaccaaacttgcgacgatatcgactcctggatgaacgatctcgaaaaacaaatcgaaagtgacgacactggtgccgatctggcctccgtcaacattctcatgcaaaaacaacagatgatcgagacccaaatggccgtcaaagcccgccaagttggagaactcgagaaacaaaccaagcatctggagaccgctgctcccgaaaaagacatggaagaaatcaaagtcaagaagaagaaggtggaacaacgtttcgcgcaactcaaagaaccgctcatcgaaagacagagggtgttggaaaagaagaaggaagccttacagttcaggcgagacgtcgaggacgaacttttgtggatagccgaaaagatgcctcaggctttgtctacagaatacggaaacagtcttttccaggtgcatatgttagagaagaagaatcaatcgttacagacagaagtagataatcacgaacctaggatcaacacagtttgtaataatggacagaaactaatagatgaaggccatgaagactcaggcgaatttagcagactaataaatgaacttcacaaagcgtggcaagaactcaaagatgccatcgagaaacgcagagaaaacctacttagaaacgaaagagcccaacaatacctgttcgacgccaatgaggccgagagctggatgagcgaacaagaactttacatgatggtggaagaccgaggcaaagacgaaacgtcggcgcgcaactgcatgaagaaacacgaaagcctcgaagctgcagtcgaagcttacgcggatacgatcagatctcttggagaaactgtacgagctttagctgctgaaggtcacccgctggctgagcaagtagctgtcaaacagtcacagttagacaagttgtacgccggcctcaaggatttggcgggagaaaggagagccaaactagacgaagcattacaattgttcttactcaacagagatgtaggagatttagagcaatggatagcagatagagaggtagtagcgtcttcccacgaattaggccaagactacgatcacgtaactttactttgggaacgctttaaggagttcgcacatgacactgaagcaataggaagcgagagagtcgctgcagttaatgatgtcgccgatcagttaatagctgcaggtcattcggattctgcattgatagcagaatggaaggatggtttgaacgaagcttggcaagatctactcgagttgatcgaaactaggacacagatgttggctgcatctagagaattacacaagttcttccatgattgcaaggatgtactgagcagaatagtggaaaaacaggtatccatgtctgatgaattgggaagggacgcaggagctgtcaatgcccttcaacgcaaacaccagaacttcctccaagacctacaaacactccaatcgaacgtccaacaaatccaagaagaatcagctaaacttcaagctagctatgccggtgatagagctaaagaaatcaccaacagggagcaggaagtggtagcagcctgggcagccttgcagatcgcttgcgatcagagacacggaaaattgagcgatactggtgatctattcaaattctttaacttggtacgaacgttgatgcagtggatggacgaatggacgcggcagatgaacaccagcgagaaaccaagagatgttagtggtgttgaattgttgatgaacaaccatcagacactcaaggctgagatcgaagccagagaagacaactttacggcttgtatttctttaggaaaggaattgttgagccgtaatcactatgctagtgctgatattaaggataaattggtcgcgttgacgaatcaaaggaatgctgtactgcagaggtgggaagaaagatgggagaacttgcaactcatcctcgaggtataccaattcgccagagatgcggccgtcgccgaagcatggttgatcgcacaagaaccttacttgatgagccaagaactaggacacaccattgacgacgttgaaaacttgataaagaaacacgaagcgttcgaaaaatcggcagcggcgcaagaagagagattcagtgctttggagagactgacgacgttcgaattgagagaaataaagaggaaacaagaagctgcccaggccgaagaacgcgctagacaagaaaaggaagaagctgaacggttggcagcaatcgctgcctcgcaacctaaagaaatcgaaacaatggtaactgacagaccagatgctggatcccctgctgctgaagagagaccagacccaagcagcgtaggagatgacgaactagtcgaaggaactttggtgcgcaagcacgaatgggagaacaccacaacgaaagccagcaaccgttcctgggacaaggtatactgcgtcgtgaaaggaacccaattggcgttctacaaggacgcgaagacggcaaaatcaacaccggaccagaggtttaagggtgaaccaccattgtcactgagaaaagccgtcgctaatgttgcgcaagattataagaaaaagaaattcgtgtttaggctgaaattggaaagcggtggcgaattcctcttccaatcacagaacgacacagagatgaacacgtggatttcaaaaataaattctcacgcagacaccgaatctgccggtccttctcgctcacatacattacccgcatctgggcagaaggaggattccaaacgtcgcagcttctttactttaaagaaaacataaatttctacttctactcttgatcatacctgtatctttacgctttacctgagaggactcctgtccagacttcgcccttctttttttatattagcataaatatttaatatatttttcttgtagtttgcacattatattattaaatagtaattttaaatgtatagtaatatattatactatgtgattaaaaatttacttgactggggcacaaaactaccaacctcagcgagagccagtgttgtattatttattaaaaaactatttggatatatacatagttgaagaataagaagaaaataataaaatgtacgatgtaaagtcccagcataaccgtattacagttaactgttcggcagtttttcgtctgccctgttccctttttcatttttacgtttgatgtaactaaatctaaacccgttatttttaagttgcaatatattttaagctttgcttagcaaaggtcgacggtcggtgacaagtcatttattatatttcaatattatttgtagagttatttctattttacataaatgaactgtgtgcttttaaaaatggagttataataaatattgtttttagt

SEQ ID NO: 4348 - DNA, 7998 bp, Diabrotica virgifera
  SmartBlast Evalue=1E-137; Info=La-related protein n=1 Tax= Harpegnathos saltator RepID=E2BLX6_9HYME
ccctcctaaacagatgctttgctgttttttttttacaacaaatggcactggaagctcagttcctaataaaggtatgaccaattctgccaaatacattcagaagcattgttgcattcatggaaacatttgacgaaacatttcaacatgacttggccccttgttaccattagaaattggtatagccttttatgcgagaaaataaagcaaaggtgttggattggcctgataattcaacagacctaagtctcattgataacttatggcatattcctaagaaacgttcagctaaggtaaattgcactacaaaagaaaaaattataacaagtgatatacaagtgtggttccacgatgatgaagtcaagaacatgtgcgctgaactggtgaagtttattccaagatatattgaagagaccatttatgctgaaggaggatatacgtagtactaatatatagatttgttaatctacatggtaggtaatgattaaaagctgatgttttagaatttttttcatttgtcgcaatgaatttgaacagtatatcatctgtgatacaatcataaagaaatatagcaaatattaagtaataatcaatcataaatggtacaccaatgatattgtccaaacttttatgataatgtaccacttccgtttggtctttatgatcgccaatgacaaatattgatttattgagcaaaatactttctatcggaaagcccagtacaattaatataaaaagctaaatgttttaacattcacaatatatgcttatacctggcaaccttatgtttaaacaaaatttcctgctacacaatattctgtgttaggaaatcagatatttattgctggctgtataaaggaaaatcttaagatggtacataattttgtcgaaaaaaaggtaactagcattttagtgtacacattttccaatacaactagctattttatatatctatatgttacaataattttaaaactgctcgtgctgtggtagagtggtattttaaaaaatgcagttacaatatttgattttataaattacctgaattgtctaataatgtacagttttcttcccattcaattatactatactttatatgcacacgttcagatttttaaatgccttgaagatcatttaaattattttttaaaaccaactttttgcaaaccttttcagttcttgttgcatcaaagtttgctactattaagggcaaagaaatcgattattaggcaaactaaatgataaaatggactcttctggcttgtagcgtcctttgtaataatgagctaaataacaaatcaattataataaaataacaaatgtagtcataaaacataaattactcaaaaacaaaaataacgtcattaaaacaactcaaataatcttcaaaatacgtgagaatgtataatgattttgattcactgagtacacgaaaagaaaaagaaccaaaaacaaatataacagctgactacaactaaaaatacaaattctaactaatagggaacgacagaaaagtctcacatctcgagatttgatcgctcgcttgcaaaaacaagcttcacctgacatgtcatggtatattctaaagtggcagaagtaaatataacggaatcaaattgtacattttaataaagctgaatctaaatctaagtatataaaacgacactgcaatataattttaaacaatatgtcaaaatataaaaattacctttatacattagctaaaaatttatataatagtacgtaaattgttaagaaactatttagaagagtaggtacatatttaatgatcatttttgttatattctatttattcaataaaatcaaataaaatatggtcaaagttactaaagaatatcaatccactaaaagtatcaaatttcaaaaattattattcgtccataaagaaatataaaatatgactagatttcactgcactttggactacaagaatcatttttaaaatagatcagttactttaaccctttttcaacaaatggctaataccaatcgtttcaaataaaatataagtcagatatttccgtccatgcaaaaacccttcacgatattcctgcaaaaatgagcaccgacgaagttaggtgatatctgaagataggctcatagaacccacgcggactgataacaaacaagaacatcctagacgaaataaacaggatggaaatgagtatatgtagttgcaattcaagaaacaaagctcaaaggacgtgaacgtaaagtttcctggaactatatgcacaaaaatgactgcaggtcaaagccatggggacaagcaatcatggtgaagatagaaaatacacacaattgccgataccagcgggactcaataccatggaagcaacttcgatatcagtccaaatgagacaaaccacaataagaatcacgtcagcatacgtcagacccagagatcccctatccgactaagatgcattcttcaagggaggcaacaatctacccactcacctagacatagctataacgaagaatctatgaatccagacagaaatacagtcgctgagcacaccagaaatagaggtagaggagataataaccgagagctaagggaaccgattatggagaagaccagagcaaagaggcagaagaacaaaaggtaaggagacaagaataagaaacaatataggaaaccaatgctattctacatgaagaaaacggcatggtatacaccaccaaagacaaagccgaagttatgagaaccagcctagaaagacatgtgttccataaactatcaccaacaagaaaattcatgatttaaagaggaagccgaagaagactactacagaagaccggtcgaagcagaagatccactaatgaaacacacggctaatggattaatccacagtcaaagaaaaccgaaagcacacacaccacttaaacacacatcctcaaaagaaatgagcaacctgatgcggaaaaatcaccaaagaaagcacctggactggattggacgaagcgaccaacagggctttaaaatatctcccagtgaaagcagtcgtttatctgaccaacataatgaaagcactgataagattcagaaaattccctaatcgatagaaagaagctcatgtaatcacaatacataaaccagggaaaaacaatatttttttgtgacaatatattcgtctactaacatgtttaacatgcaaactgaaaacccctatgatgcttattttcactcacggaaaaatccaaaattcctctatgaactagtgcaaaagtatgtacaccaaatgtttaaaaaccagtgtggcctctagaaagggttaataagtattggccagatattttgagcaactaatattttaaccaaccaatatctatctatccaactataatctactcttaagtaaaattgtcgatattttaattttttggcaatatcgcaaaaatgttgaaatccccactacgttaaaatttaaacgactaattaatttctcttgtaaatcacaaacctttaggactaagaataaatgatcattgggtactgggtattgggctactgggtattttcccattgattttgttaagaataaatgattacgaattgttttaatacaattttacatgtataatattataagagtcaaagtggttgttgtttttatataaggtgagcgattcaccgagtcagaatgagtcgaaatgtgagtcacttgtagaagttccctcaataaaaacaagctgttgtagttgtaactatatgaacacattgtatgaacattttgtgtgtgaatgaaattttggtattttcaaaaacatcagtacaattgcagcacaattacattgtaataaaatagctttccgttcacgtagacaatgtatgtacaaattagatgttattaaaattacaaattataagtgaaatcaaattaataaaaagcacaaatgaacattttcgaaaagtaaaaattatttacacaaacgagttttttcaaagatcatttttagtcattttagctacaatcaaatataggtactaatgagtttcacaaaccgatacgattctagagccactgaaattcagttgttctgtttgatttcactctactcataatggtgttactagaaaagtacgaaaaaattataaaattgtaaaatattttcggtaatggcaccaataacacacgtttaaaagctaaggctttttacaatagtgttcttaaagtacccaaattaatttttatgtttttggaaatcaaacctccaattatgataacgataatctaaatggtggtggatcacatctggttaaatctttaggcgttgatttccagatttatttaaaatagccttatattcataagaaaaaacgaagagccgtagactcattctctaacatctttctgcctccatgattcagtacgttggcgagtactattattacgaatacgtccggaaccaaatgaatgagtacgagatctggcatatttaaatcctgaatcggcgggagcgcttgttccagtttgatgttgcatattttcattcctctggtagctctgagatgggcgtcgatcacgtgcgctgttggtcattgccgactgactttcggaaacacttctattccttttattttgtttgtattggtttcctttgccatggtgggatttcaaaatctcatcaatccttggctctactactctaaaatcttcaatagttttgaacttggagagatgtttttgcaaagtgggagtaacggtgagatggctgccgtgcttgtagtatttcaaaaaagcccagaatttttccaatccatagagttgaccattttcgtaatccctgaccgtttcttgttggaagtcttcgtacaaatgtggtctgaatttaacttctaatccataagagaaaaagcggaatagacactccaggccatagcgatagccttgttctgcatcttcgagagcaagactcttaaattcattgtacattgtgcgattgaagttctctctgagaaagaatgaccagaaacggaagagtgtattcatttcattagattgtccaatgccaaagcgtttgcgttctttcaagcacttctgtctaaatttgtggtaagcctgctgtgtaaagttattgtcctttaatagggcgtgtgatggatgttggaaagatggaagagcctggggtacgctaccatagcttccacaacttgtacccaaatgggcatcactagggcttgtaccatagctgcttccagttgatgtagtacgaagccgatgttctctgacatccatgatccatccaacatgctgttcgactggaggattgcttgaatgtctagttttccttttcctgggagtactaggatcaggtcggtcgtctttaacgacggcatagaaccttggaacgtttctacttggtgtagtatttggtttcctgttgttgtttatagagataaccgattgctgttgttttgaaggactatcaaccagtgggggtggtggaggtggtaattgtggatttggtttctttggagcgggtggagctattttcctaaaatcttcttggctaataacggtgacagtcttgtaactctcaactgagcttctttcataatcttgatcagtccataagtcctcttcgtaataaaaaagtccatcatttatagcctgaatgagatcttgactcattttaactcgagtagtccaatcaccggtccgatcatacccttcatgtttaggtgcccttggggttgaagttgtgttttgtgttacaattaacaatttattgacgtctctgtcactcagttcatctgaatcgtcttctggtggccattcattaaatgtattttgtcgtccagttggcacttcttgatctaactcttcatcaaaatgaaaatcgagctcttctctctcaaaagacttgaccttagactcttttttgaccttattttctttattttttctcttcacctctctccagttttcttcatcttcattcttatcttttggtttttcttttacagaatcctggtttccgtttactaaagtgttgaatttttgtttcttttgttctagatcagaaggaataaattcagctacatcaggatttaagttatcaagctgtctttctctaagagttttaggtaatggcggaggtggaactactttggcaaggatttcctccgtttgctcgttattttcatccaatataggccatctcaatggatctttcttcggtctcaccttaaaacctgcagtcaactcaagtttgtcggatgaactaatagcgtcaacaatcagtgatacattgtttgttaaagcttgaactcggtgaaaagaagcaatcagagtgacaggaaggtaaccttcagaatccatttttcttctcaaaaaagaaatctctatttaaattatcctcgctgaaataatattcgatttggtttcgaacatattccttgatggtaggcccatctagacttagatagctattactattgaaataataggttcccatatatggcatgaaggcttgtccatcagctaaatctccaatctttcctggaaattcgtgagaatggtaatcaagatagtccaagttattttgtcctctgttattttgtctattatttgctcctctcctaccacctcgctgcctgtcgctgcgattcctagggttggatctggaatgtcgaccactttgtgggtgtccgttgagctctctctcagctctccaatctttatcgccctcactaaccgtcgatctctcgtcaccagctcgttcgtttcgcctgcgttcgtttttatttggtttgctcaagtctatttctaggggcacccatttgtgtttcatcggttttcttttgtcgtcaccttcctccaagttttgttgatgagtttggcgatccttgttagttgatgtgcctgctactatagctgctgttgtagtttcgggagctatttgacttactgggcccaaagatttgcgaggctctggacaatttcctaaagagggccaatcacaaatatcagtaaaatcactagccttttggttatatcttcgtttatctttgggcgccttgatgactccagaagtctctgttccattcacagtaatctcttgtttctttggttgtaaaactcttttctgggatgcatgaggttgaggttggctggtttctcctgttgttggtttactgacttgccaagggtttactttcggaataggagcttctacaaaaactttctttacgtcactttgttcttcattaccttctttcacagccgtggattctttgtcatcacgtttttcttttgaacgcaaatcttttgacttttccttagatgagtgctcatgcttatcagttctgtcaacactgacagcaagttttttcttaagtttttcaccttttctatctttacgactgtgacttactacaggtgtgaatgattcttcctcctctgtgttttgtttaggctcttcaggttgttttgaactgtcagctatttctgcttctttaacttgtattgaatttaactgctcttctatattctccttattattgttgtttgtattgttagtaggctgcttaaaatttagtacagcatgtgcataggacgcccctgcttctttggtgtcatcctgaggattgactggtgtgggaggcacacgtgcatccatcgcagttttacttcttttaacttaactgtgcactatcgtaattaaaataaaataaagtctgacagaacaatatggagtggaactgtaaccatgttggtttagtaaagcatggtatctatcacacacttgaaattgtccaccgtcacaacactacacatgaacgtcaggacatcgatgatggttatgtaacttagtccaacttttcttatgtatttattttttaaaacccgttatataatgaatatcgtttatattttcataaattaagacaggaaactggaactctacaatacccttaggtataaacctaaacttacaggttcaatttcgacagaacattgtgaatcaatc

SEQ ID NO: 4349 - DNA, 7118 bp, Diabrotica virgifera
  SmartBlast Evalue=1E-137; Info=La-related protein n=1 Tax= Harpegnathos saltator RepID=E2BLX6_9HYME
ccctcctaaacagatgctttgctgttttttttttacaacaaatggcactggaagctcagttcctaataaaggtatgaccaattctgccaaatacattcagaagcattgttgcattcatggaaacatttgacgaaacatttcaacatgacttggccccttgttaccattagaaattggtatagccttttatgcgagaaaataaagcaaaggtgttggattggcctgataattcaacagacctaagtctcattgataacttatggcatattcctaagaaacgttcagctaaggtaaattgcactacaaaagaaaaaattataacaagtgatatacaagtgtggttccacgatgatgaagtcaagaacatgtgcgctgaactggtgaagtttattccaagatatattgaagagaccatttatgctgaaggaggatatacgtagtactaatatatagatttgttaatctacatggtaggtaatgattaaaagctgatgttttagaatttttttcatttgtcgcaatgaatttgaacagtatatcatctgtgatacaatcataaagaaatatagcaaatattaagtaataatcaatcataaatggtacaccaatgatattgtccaaacttttatgataatgtaccacttccgtttggtctttatgatcgccaatgacaaatattgatttattgagcaaaatactttctatcggaaagcccagtacaattaatataaaaagctaaatgttttaacattcacaatatatgcttatacctggcaaccttatgtttaaacaaaatttcctgctacacaatattctgtgttaggaaatcagatatttattgctggctgtataaaggaaaatcttaagatggtacataattttgtcgaaaaaaaggtaactagcattttagtgtacacattttccaatacaactagctattttatatatctatatgttacaataattttaaaactgctcgtgctgtggtagagtggtattttaaaaaatgcagttacaatatttgattttataaattacctgaattgtctaataatgtacagttttcttcccattcaattatactatactttatatgcacacgttcagatttttaaatgccttgaagatcatttaaattattttttaaaaccaactttttgcaaaccttttcagttcttgttgcatcaaagtttgctactattaagggcaaagaaatcgattattaggcaaactaaatgataaaatggactcttctggcttgtagcgtcctttgtaataatgagctaaataacaaatcaattataataaaataacaaatgtagtcataaaacataaattactcaaaaacaaaaataacgtcattaaaacaactcaaataatcttcaaaatacgtgagaatgtataatgattttgattcactgagtacacgaaaagaaaaagaaccaaaaacaaatataacagctgactacaactaaaaatacaaattctaactaatagggaacgacagaaaagtctcacatctcgagatttgatcgctcgcttgcaaaaacaagcttcacctgacatgtcatggtatattctaaagtggcagaagtaaatataacggaatcaaattgtacattttaataaagctgaatctaaatctaagtatataaaacgacactgcaatataattttaaacaatatgtcaaaatataaaaattacctttatacattagctaaaaatttatataatagtacgtaaattgttaagaaactatttagaagagtaggtacatatttaatgatcatttttgttatattctatttattcaataaaatcaaataaaatatggtcaaagttactaaagaatatcaatccactaaaagtatcaaatttcaaaaattattattcgtccataaagaaatataaaatatgactagatttcactgcactttggactacaagaatcatttttaaaatagatcagttactttaaccctttttcaacaaatggctaataccaatcgtttcaaataaaatataagtcagatatttccgtccatgcaaaaacccttcacgatattcctgcaaaaatgagcaccgacgaagttaggtgatatctgaagataggctcatagaacccacgcggactgataacaaacaagaacatcctagacgaaataaacaggatggaaatgagtatatgtagttgcaattcaagaaacaaagctcaaaggacgtgaacgtaaagtttcctggaactatatgcacaaaaatgactgcaggtcaaagccatggggacaagcaatcatggtgaagatagaaaatacacacaattgccgataccagcgggactcaataccatggaagcaacttcgatatcagtccaaatgagacaaaccacaataagaatcacgtcagcatacgtcagacccagagatcccctatccgactaagatgcattcttcaagggaggcaacaatctacccactcacctagacatagctataacgaagaatctatgaatccagacagaaatacagtcgctgagcacaccagaaatagaggtagaggagataataaccgagagctaagggaaccgattatggagaagaccagagcaaagaggcagaagaacaaaaggtaaggagacaagaataagaaacaatataggaaaccaatgctattctacatgaagaaaacggcatggtatacaccaccaaagacaaagccgaagttatgagaaccagcctagaaagacatgtgttccataaactatcaccaacaagaaaattcatgatttaaagaggaagccgaagaagactactacagaagaccggtcgaagcagaagatccactaatgaaacacacggctaatggattaatccacagtcaaagaaaaccgaaagcacacacaccacttaaacacacatcctcaaaagaaatgagcaacctgatgcggaaaaatcaccaaagaaagcacctggactggattggacgaagcgaccaacagggctttaaaatatctcccagtgaaagcagtcgtttatctgaccaacataatgaaagcactgataagattcagaaaattccctaatcgatagaaagaagctcatgtaatcacaatacataaaccagggaaaaacaatatttttttgtgacaatatattcgtctactaacatgtttaacatgcaaactgaaaacccctatgatgcttattttcactcacggaaaaatccaaaattcctctatgaactagtgcaaaagtatgtacaccaaatgtttaaaaaccagtgtggcctctagaaagggttaataagtattggccagatattttgagcaactaatattttaaccaaccaatatctatctatccaactataatctactcttaagtaaaattgtcgatattttaattttttggcaatatcgcaaaaatgttgaaatccccactacgttaaaatttaaacgactaattaatttctcttgtaaatcacaaacctttaggactaagaataaatgatcattgggtactgggtattgggctactgggtattttcccattgattttgttaagaataaatgattacgaattgttttaatacaattttacatgtataatattataagagtcaaagtggttgttgtttttatataaggtgagcgattcaccgagtcagaatgagtcgaaatgtgagtcacttgtagaagttccctcaataaaaacaagctgttgtagttgtaactatatgaacacattgtatgaacattttgtgtgtgaatgaaattttggtattttcaaaaacatcagtacaattgcagcacaattacattgtaataaaatagctttccgttcacgtagacaatgtatgtacaaattagatgttattaaaattacaaattataagtgaaatcaaattaataaaaagcacaaatgaacattttcgaaaagtaaaaattatttacacaaacgagttttttcaaagatcatttttagtcattttagctacaatcaaatataggtactaatgagtttcacaaaccgatacgattctagagccactgaaattcagttgttctgtttgatttcactctactcataatggtgttactagaaaagtacgaaaaaattataaaattgtaaaatattttcggtaatggcaccaataacacacgtttaaaagctaaggctttttacaatagtgttcttaaagtacccaaattaatttttatgtttttggaaatcaaacctccaattatgataacgataatctaaatggtggtggatcacatctggttaaatctttaggcgttgatttccagatttatttaaaatagccttatattcataagaaaaaacgaagagccgtagactcattctctaacatctttctgcctccatgattcagtacgttggcgagtactattattacgaatacgtccggaaccaaatgaatgagtacgagatctggcatatttaaatcctgaatcggcgggagcgcttgttccagtttgatgttgcatattttcattcctctggtagctctgagatgggcgtcgatcacgtgcgctgttggtcattgccgactgactttcggaaacacttctattccttttattttgtttgtattggtttcctttgccatggtgggatttcaaaatctcatcaatccttggctctactactctaaaatcttcaatagttttgaacttggagagatgtttttgcaaagtgggagtaacggtgagatggctgccgtgcttgtagtatttcaaaaaagcccagaatttttccaatccatagagttgaccattttcgtaatccctgaccgtttcttgttggaagtcttcgtacaaatgtggtctgaatttaacttctaatccataagagaaaaagcggaatagacactccaggccatagcgatagccttgttctgcatcttcgagagcaagactcttaaattcattgtacattgtgcgattgaagttctctctgagaaagaatgaccagaaacggaagagtgtattcatttcattagattgtccaatgccaaagcgtttgcgttctttcaagcacttctgtctaaatttgtggtaagcctgctgtgtaaagttattgtcctttaatagggcgtgtgatggatgttggaaagatggaagagcctggggtacgctaccatagcttccacaacttgtacccaaatgggcatcactagggcttgtaccatagctgcttccagttgatgtagtacgaagccgatgttctctgacatccatgatccatccaacatgctgttcgactggaggattgcttgaatgtctagttttccttttcctgggagtactaggatcaggtcggtcgtctttaacgacggcatagaaccttggaacgtttctacttggtgtagtatttggtttcctgttgttgtttatagagataaccgattgctgttgttttgaaggactatcaaccagtgggggtggtggaggtggtaattgtggatttggtttctttggagcgggtggagctattttcctaaaatcttcttggctaataacggtgacagtcttgtaactctcaactgagcttctttcataatcttgatcagtccataagtcctcttcgtaataaaaaagtccatcatttatagcctgaatgagatcttgactcattttaactcgagtagtccaatcaccggtccgatcatacccttcatgtttaggtgcccttggggttgaagttgtgttttgtgttacaattaacaatttattgacgtctctgtcactcagttcatctgaatcgtcttctggtggccattcattaaatgtattttgtcgtccagttggcacttcttgatctaactcttcatcaaaatgaaaatcgagctcttctctctcaaaagacttgaccttagactcttttttgaccttattttctttattttttctcttcacctctctccagttttcttcatcttcattcttatcttttggtttttcttttacagaatcctggtttccgtttactaaagtgttgaatttttgtttcttttgttctagatcagaaggaataaattcagctacatcaggatttaagttatcaagctgtctttctctaagagttttaggtaatggcggaggtggaactactttggcaaggatttcctccgtttgctcgttattttcatccaatataggccatctcaatggatctttcttcggtctcaccttaaaacctgcagtcaactcaagtttgtcggatgaactaatagcgtcaacaatcagtgatacattgtttgttaaagcttgaactcggtgaaaagaagcaatcagagtgacaggaaggtaaccttcagaatccatttttcttctcaaaaaagaaatctctatttaaattatcctcgctgaaataatattcgatttggtttcgaacatattccttgatggtaggcccatctagacttagatagctattactattgaaataataggttcccatatatggcatgaaggcttgtccatcagctaaatctccaatctttcctggaaattcgtgagaatggtaatcaagatagtccaagttattttgtcctctgttattttgtctattatttgctcctctcctaccacctcgctgcctgtcgctgcgattcctagggttggatctggaatgtcgaccactttgtgggtgtccgttgagctctctctcagctctccaatctttatcgccctcactaaccgtcgatctctcgtcaccagctcgttcgtttcgcctgcgttcgtttttatttggtttgctcaagtctatttctaggggcacccatttgtgtttcatcggttttcttttgtcgtcaccttcctccaagttttgttgatgagtttggcgatccttgttagttgatgtgcctgctactatagctgctgttgtagtttcgggagctatttgacttactgggcccaaagatttgcgaggctctggacaatttcctaaagagggccaatcacaaatatcagtaaaatcactagcagttaacaaacgtttactgttcaaagatcaaaaaccaccccgcacttggttttataaacaaaaagccaatcgcacagctattaatgaattagtgaatgtttgtactt

SEQ ID NO: 4350 - DNA, 7228 bp, Diabrotica virgifera
  SmartBlast Evalue=1E-155; Info=eukaryotic translation initiation factor 4 gamma n=1 Tax=Nasonia vitripennis RepID= UPI0001BE807A
cgtgaagcaggagggcatttgcctgctgccacaaccattcaggatgatgcctccacctcaaagacctgacggaggttatccggtatcaacacctccagggccttatgtgcaaccgccgacgaatcaaggcgggaaccagggtccgactttgagagggccctccggcccaccaaatcaatcgtcaacaccacctaatgcggccgatattaaagtatctacattacctcaacaaccttcgttaaatcatatgtttatttctccagctgttcgaccgacagcaaatttttatacaagaggaactggtccgcctagtcaacagcccagaatgacgagtcataacagtaggcctccgcagccgccgctgttttcaccatcgcaagctcaatttatgcatatggcacctgcagcaccgcaagtgtatctcacgtcgacgaattctgtcgggtatacgtatggggggcaaagacccgcacctacagggttcgttccacaatcttttcctgtgttatcgtatggatacggaacgacaccgacgcaagctccgcatctttcgtataactattaccaacctcaaatgatgccgagaggtggctccattcctcaaccaacggcagcaaaccctaatacgacacaaaacacaatgccaaatgtacctctagtaagtaataatcaccagcagcaacccttccaaaggcaacctcagaataaacgaagatcgaatgccttacccatcatcgatccaaatacaggtgctgatcgtctactggaaatgtttgaagacaataactcgcatcctccttctggagaatcttcggctcgacaaacaccccagccatccactggcccccttagtagtcacactaaggaagtgcaagcaacatttgccaagcaagtgctgcaagctattaatgatccaacaccggatcatcaaactcaacaccaccatcacccacctcctcatcaacaagaggatcatcacgtggaactccaacttgatggacagccgacaaatcacattcttcacatagaatatgattgtgcagttccaccaagacacgacggtcaacagatacaacagcctcaccagttaaagatggagcatgttgtccaatcaagtaaattacaggctggagcgaaagaattcgtattgccttcagcagtcaccaaagaaacgccgatagtatctgcgaatattgatgctgtcgaagtgacgttattaccgaataagttacctaaagacagggaaagtcccgttaaaggccggaaacagagggagcagtcatctagaggaagcgagacaattaaggaggctccagtggttatggaaaaggctcctccagttacgattggcacaatcaaagaggttgttagtgataaagaatcttccaatacgaaagacgaggtacaggaaatttcttcgtcttctattatccaatcaacgaatcctactcaggtattgcctgtcttgaaagacagtgctatcgtagctaaggatgttagtgctaatattgaaaaacaacatcagcaacataggcctcctcctattcaacagcaacagcaactccaacaacaccccagaaccccaacccaaatccaaatcattgagccccaacccaaaattggtttagaacgacaagatagtggatcatctgtgggtggagcacaaaaggcaactatcgctgcagctgctgttcctgataatccgaaatcaaaacaaaatgctcaacggtcaacatcaaaacagggctctggcgcaccgaacaatcaaaaaccggcaagccaacaaccctcgatgccagtacctcaaccacaaccagcgaaggctgccagtagatcaaataaaaagaatgagttgaacatgaaaggagctaataaagaaggaactgatatggatgcttttaatgataacgcccttagagaggaggtgaattccaacgtgattcctaaccagacagttaataacaataatgatataatcaatgcaaactcaatacctccgactaccaatagcaatgccactcctattcaaccccctgtagttagagatgtaaatgttaatatccaaacgaataaaaagttcgataatgagacgacaatcaaacctcaagaacctgttaccaaacctttcaagaataaggtggatattactgatatagttaaggaaaaacctaaaaatattaaaccttttaataatacgatagaaggccaagatgaaccagatagagctgctttagcgcagtccaatgaaaaaatggtacaagcgaagaatgatgttaatgttaaaactagtgagattagtaaggtagaaagcaagttaccatatgctgaaggtcaatggtctcctgccaaccaaagcggtttaaagatatatgacaaaaacttcctattatcattaaaagactctcctgccagtaagatagcacccgaaaatattctcgatgcactattacctgacgaaaaagggcgtttgagtgatgggcggttatcaatgggcggcaaaaccgatttcaatcctccattcaatacttttggtagaaatagttctcaaaaggggtcgctatctagtaggttaagtggaagtaaaatggacaggagtaagagcaataaaggtagcaccgtcaaacccccaattaaagtttctatatctgtcagagaagaagttagattgcacgaagtggaaaatgcatggcgaccagcccgtcttgtcaaaggcgaatttcagactgacgatgataagaaaactgaagaattgtacaaaaaagtcagaggaattctcaataaacttacgcctcaaaaattcgacacgttattgaatcaaattagaagtctttctatagacaccactggaaggttacagggtgttatagatttagttttcgagaaggctatcgatgagcctaatttttctgtagcttacgccagtatgtgccagcaattagctctcttgcaaaccccttcaaaccatggtgaagataaacaagattatgtaacgttccgaaaattattaattaataagtgccagcaggaattcgaaaagcaaaaatccgatgaaactcttaggaatagtaaaataaaagaaatcgaagcttgtacagatccggagaaaaggaaagatctagaatttgatcttgaagaatatgatagaagacttaggatgaaatcagttggcaatgttaggtttataggtgaactttttaaacaaagtatgcttacagttggcataatgacgaggtgcataaatgatctattaattaggagagatgaagaacgcttggagtgcctatgcaagttgcttacaactattggaaaagagttggaaactaaactggttcctcttgaccccatctttgatcaaatgaagagtatagccaataagaaagatataaatagtaaaattagtagtcgaataagatttatgttacaggatgtgatagatctgcgttctgcaaaatgggtgcctagaaggcaagacgtcaatccaaaaatgatagatcaaatccaaaaagaagctgaacaagaacagcttaacatacaaatgatgaactctggtccaatcacaccacgtaaagacgatagaggtagtggttctggaggacctggaggaggatcgatgggtgatagaaagggcggaagatcgagaaatgttactgatgatggatggacgacaaatacgagcaataacaggagcaaggcttcgttcatggtacaaagtgataaattaaaaggtgcaagggcgcctcttgagccatctcttggcgctccaaatatgttcaaacagtggaacactggcgctggttctaacataaagccaattgtaccacaagttcctaccactgccaatatttatagtactttagaaaatttggaatctgaaaaacgtaatacaataaatactcgctatggtcaaaaagactcttatcattcgaaaggtgcgagtatggaacgaggtagttataaatatgatagtagaagtggatcacggtctggctcgcaacaccgatcgaaggatgatggaagaaattcgtcgtcctcgtcacaacgtaacataccagcagctgcacctactatgttaccacctcaatcgtcagttactccagcgccgtccgtttcggctgttgcggcggttcctgaagtacaactcaccgaagaccaacggtataggcgaatactcaattgtgcggacgaatacgttagtggaaatagcaatgttgatgaatatttcgctgatattagttcgtgtgtacctttatcgtacatccctagtatgattaatgacacatatttacatgtattagaaaaatctcaacaagtgagattaaaaacgggtgcattatttgctaagttagtaggaattggtaaaatatcagtagacgattattgtcaaggattggaggaattgctatcacaagctgacgatctgagaattgatattccaaaactttgggactatttagcagaagttttagttgatttaattaccgaacaagtagtcccacttaaaaggctgcacaaatcgttcagcatactcattgagctgaatcaagctgataagttgctggctccactatttaaactagttattagtaataagggatcgcatttcttgcatagtcaatggcagtcgtcaggtttgcaattagccgattttatggatactgcacagataggctcattcattagcgacaatcaattggaattcttgttgggaggagcggcaccagcagtagatcagagtcgattatcttacgatgatattcaggaaaagatactgaatttccttcgggcagataaaactattgatgatatccacgattgggtaatgacaaatgtaggagagaagggtgttaaagaaaataaatttatcagggctttggcgatggcctgttttgaagactcaataaacaagaacaacaaacccaattccgacagattggagcaacaccttccgttgttgcacaaatatgtcgacaataaacccgggtttgaacttgaatgcttgtatgcccttcaagctctgaacaataaaatggaataccctggaggtctcttactacaaatatgtgataaaatttatgaattaggttgttgctctcaagaaagttttgtcgcttgggaacaaagtgacgatccagcagaacaagagggtaaaggtgtcgctatgaagcagctaacgtcattcttctgttcattgaaagaaaatgatgatgatgacgattcgttgggttcggatctggaagcagattagcggttaataagtgtgccggtgattttggcgcctatatagacggactacattaaattaaaaaaattataaatatataattaagagcaactcaacgagtgatgagattgacttatcggcaaacgtaaactcttagttaaaatttatacaattgtttatattatatatatattatacatatttaattatatactatatatgaaaactgttgtggaattctacgtgagtgcgggaaaaagagaatatcaagtgccctctgaaaataaaaatagaatatacaatgcgaaaaagacaaaaaaaatttttaaatttaagtatagactctgtgaacgctcatcagatattttcaagaggaaacgagaaatgtcagtgtagttgaaattgggctcagtgtagtgcggcttctatttttattttgcaggatgttttgaatttgttggaactgtcgattgcgctggtcttctccaaaatactgctcccgatgcttgcggattgtatcaaagcgaacatcctgtatactttattgtaatttatgttaaaatatatattgtgaaagtgtcagttgacgctaaatttgtctgaaaacaacaactgggtcaaatcaaaaatgttcgttctcgctggtagagtattgttttttgatgttttaatagccaatagctatgcaggtatctaaaacaatagtttgtgatttggcgacagtttatatgtttcagatttttttgctttctaacggcacttctctatatacaagatgtgccaaaaaattactttttatagttgattacttccaaacttttaatacattatatatcaggatcgaaacgaatgatactttttggcacatactgtaagagtataagtatacaataaaacttgagcatatacctaatagttacgttataacataaggatggcataaaatactactacaaagttgacgttaccatcaaatgttagaggtatggcagaggcataattttactttgtttgatcatttttatgtgtacgagttttgcatttatatctatagagttctatttgaaatgtaaacatttttaagtagttctctagtatacgacgtgttgttaatgattgatttctttgcgttttcttttatctcggtttttaaaaaggtcgacagtttccatccgaagtttctttgtattacttctcacttactgctttaatttatacatatatgtattttatatttgaatactttttattgtttatagtaatattgttttagaggtaaagagttctttggtcgtcgccaattactgggccctaagatcttgtaagttttaacagtggtattcttggcattgaaaatgtccaatgccattatttttgttatcgatcgatttgttatcctctcgtagggtggtagtatgcctttattgactctccactattatcatcccaagattgacacagctatatacaagtgtgtcgtgatcaatgcaacagagcttatcaaacgatatttaactgtacctttgcttgaaacacttggatcagtaaccaccacaaatcaaaattaagtaggtaataatataaagttgtatattttcaaatatttttttttatttataaatctactaaatattccatatactctttttaaaacttacacctttttttattaatatatttttattatactgacccatatattccttcaaatgggaatgacttttatcaatgtcatcttttactgtaatgtgtctcatctaattcattcttatgtgcatccctatatcatgttttaatggatagttaactatttggatgggaaatgggcacagttaaattgaaaaaaaaagttttattaacgtttcgacgcccaaatcgggtgtcgttgttaaaatacaaaatactactattagtagtatttgtatactaaaatagtatactaaatactattagtagtatttttgtttttttgacaacgacaccccatttgggcgtcgagacgttgat

SEQ ID NO: 4351 - DNA, 7134 bp, Diabrotica virgifera
  SmartBlast Evalue=1E-155; Info=eukaryotic translation initiation factor 4 gamma n=1 Tax=Nasonia vitripennis RepID= UPI0001BE807A
cgagttcgtggtgtagtcaacgagtgcgaattttttaaaaatgtatggaactgtgaccgtgtagttggtgtatttttagtgacctatcgtttttgaattagtgtttagcgaatatttcggctattgatgttggtttaatagtgattgtatttcaaatttatttctccagctgttcgaccgacagcaaatttttatacaagaggaactggtccgcctagtcaacagcccagaatgacgagtcataacagtaggcctccgcagccgccgctgttttcaccatcgcaagctcaatttatgcatatggcacctgcagcaccgcaagtgtatctcacgtcgacgaattctgtcgggtatacgtatggggggcaaagacccgcacctacagggttcgttccacaatcttttcctgtgttatcgtatggatacggaacgacaccgacgcaagctccgcatctttcgtataactattaccaacctcaaatgatgccgagaggtggctccattcctcaaccaacggcagcaaaccctaatacgacacaaaacacaatgccaaatgtacctctagtaagtaataatcaccagcagcaacccttccaaaggcaacctcagaataaacgaagatcgaatgccttacccatcatcgatccaaatacaggtgctgatcgtctactggaaatgtttgaagacaataactcgcatcctccttctggagaatcttcggctcgacaaacaccccagccatccactggcccccttagtagtcacactaaggaagtgcaagcaacatttgccaagcaagtgctgcaagctattaatgatccaacaccggatcatcaaactcaacaccaccatcacccacctcctcatcaacaagaggatcatcacgtggaactccaacttgatggacagccgacaaatcacattcttcacatagaatatgattgtgcagttccaccaagacacgacggtcaacagatacaacagcctcaccagttaaagatggagcatgttgtccaatcaagtaaattacaggctggagcgaaagaattcgtattgccttcagcagtcaccaaagaaacgccgatagtatctgcgaatattgatgctgtcgaagtgacgttattaccgaataagttacctaaagacagggaaagtcccgttaaaggccggaaacagagggagcagtcatctagaggaagcgagacaattaaggaggctccagtggttatggaaaaggctcctccagttacgattggcacaatcaaagaggttgttagtgataaagaatcttccaatacgaaagacgaggtacaggaaatttcttcgtcttctattatccaatcaacgaatcctactcaggtattgcctgtcttgaaagacagtgctatcgtagctaaggatgttagtgctaatattgaaaaacaacatcagcaacataggcctcctcctattcaacagcaacagcaactccaacaacaccccagaaccccaacccaaatccaaatcattgagccccaacccaaaattggtttagaacgacaagatagtggatcatctgtgggtggagcacaaaaggcaactatcgctgcagctgctgttcctgataatccgaaatcaaaacaaaatgctcaacggtcaacatcaaaacagggctctggcgcaccgaacaatcaaaaaccggcaagccaacaaccctcgatgccagtacctcaaccacaaccagcgaaggctgccagtagatcaaataaaaagaatgagttgaacatgaaaggagctaataaagaaggaactgatatggatgcttttaatgataacgcccttagagaggaggtgaattccaacgtgattcctaaccagacagttaataacaataatgatataatcaatgcaaactcaatacctccgactaccaatagcaatgccactcctattcaaccccctgtagttagagatgtaaatgttaatatccaaacgaataaaaagttcgataatgagacgacaatcaaacctcaagaacctgttaccaaacctttcaagaataaggtggatattactgatatagttaaggaaaaacctaaaaatattaaaccttttaataatacgatagaaggccaagatgaaccagatagagctgctttagcgcagtccaatgaaaaaatggtacaagcgaagaatgatgttaatgttaaaactagtgagattagtaaggtagaaagcaagttaccatatgctgaaggtcaatggtctcctgccaaccaaagcggtttaaagatatatgacaaaaacttcctattatcattaaaagactctcctgccagtaagatagcacccgaaaatattctcgatgcactattacctgacgaaaaagggcgtttgagtgatgggcggttatcaatgggcggcaaaaccgatttcaatcctccattcaatacttttggtagaaatagttctcaaaaggggtcgctatctagtaggttaagtggaagtaaaatggacaggagtaagagcaataaaggtagcaccgtcaaacccccaattaaagtttctatatctgtcagagaagaagttagattgcacgaagtggaaaatgcatggcgaccagcccgtcttgtcaaaggcgaatttcagactgacgatgataagaaaactgaagaattgtacaaaaaagtcagaggaattctcaataaacttacgcctcaaaaattcgacacgttattgaatcaaattagaagtctttctatagacaccactggaaggttacagggtgttatagatttagttttcgagaaggctatcgatgagcctaatttttctgtagcttacgccagtatgtgccagcaattagctctcttgcaaaccccttcaaaccatggtgaagataaacaagattatgtaacgttccgaaaattattaattaataagtgccagcaggaattcgaaaagcaaaaatccgatgaaactcttaggaatagtaaaataaaagaaatcgaagcttgtacagatccggagaaaaggaaagatctagaatttgatcttgaagaatatgatagaagacttaggatgaaatcagttggcaatgttaggtttataggtgaactttttaaacaaagtatgcttacagttggcataatgacgaggtgcataaatgatctattaattaggagagatgaagaacgcttggagtgcctatgcaagttgcttacaactattggaaaagagttggaaactaaactggttcctcttgaccccatctttgatcaaatgaagagtatagccaataagaaagatataaatagtaaaattagtagtcgaataagatttatgttacaggatgtgatagatctgcgttctgcaaaatgggtgcctagaaggcaagacgtcaatccaaaaatgatagatcaaatccaaaaagaagctgaacaagaacagcttaacatacaaatgatgaactctggtccaatcacaccacgtaaagacgatagaggtagtggttctggaggacctggaggaggatcgatgggtgatagaaagggcggaagatcgagaaatgttactgatgatggatggacgacaaatacgagcaataacaggagcaaggcttcgttcatggtacaaagtgataaattaaaaggtgcaagggcgcctcttgagccatctcttggcgctccaaatatgttcaaacagtggaacactggcgctggttctaacataaagccaattgtaccacaagttcctaccactgccaatatttatagtactttagaaaatttggaatctgaaaaacgtaatacaataaatactcgctatggtcaaaaagactcttatcattcgaaaggtgcgagtatggaacgaggtagttataaatatgatagtagaagtggatcacggtctggctcgcaacaccgatcgaaggatgatggaagaaattcgtcgtcctcgtcacaacgtaacataccagcagctgcacctactatgttaccacctcaatcgtcagttactccagcgccgtccgtttcggctgttgcggcggttcctgaagtacaactcaccgaagaccaacggtataggcgaatactcaattgtgcggacgaatacgttagtggaaatagcaatgttgatgaatatttcgctgatattagttcgtgtgtacctttatcgtacatccctagtatgattaatgacacatatttacatgtattagaaaaatctcaacaagtgagattaaaaacgggtgcattatttgctaagttagtaggaattggtaaaatatcagtagacgattattgtcaaggattggaggaattgctatcacaagctgacgatctgagaattgatattccaaaactttgggactatttagcagaagttttagttgatttaattaccgaacaagtagtcccacttaaaaggctgcacaaatcgttcagcatactcattgagctgaatcaagctgataagttgctggctccactatttaaactagttattagtaataagggatcgcatttcttgcatagtcaatggcagtcgtcaggtttgcaattagccgattttatggatactgcacagataggctcattcattagcgacaatcaattggaattcttgttgggaggagcggcaccagcagtagatcagagtcgattatcttacgatgatattcaggaaaagatactgaatttccttcgggcagataaaactattgatgatatccacgattgggtaatgacaaatgtaggagagaagggtgttaaagaaaataaatttatcagggctttggcgatggcctgttttgaagactcaataaacaagaacaacaaacccaattccgacagattggagcaacaccttccgttgttgcacaaatatgtcgacaataaacccgggtttgaacttgaatgcttgtatgcccttcaagctctgaacaataaaatggaataccctggaggtctcttactacaaatatgtgataaaatttatgaattaggttgttgctctcaagaaagttttgtcgcttgggaacaaagtgacgatccagcagaacaagagggtaaaggtgtcgctatgaagcagctaacgtcattcttctgttcattgaaagaaaatgatgatgatgacgattcgttgggttcggatctggaagcagattagcggttaataagtgtgccggtgattttggcgcctatatagacggactacattaaattaaaaaaattataaatatataattaagagcaactcaacgagtgatgagattgacttatcggcaaacgtaaactcttagttaaaatttatacaattgtttatattatatatatattatacatatttaattatatactatatatgaaaactgttgtggaattctacgtgagtgcgggaaaaagagaatatcaagtgccctctgaaaataaaaatagaatatacaatgcgaaaaagacaaaaaaaatttttaaatttaagtatagactctgtgaacgctcatcagatattttcaagaggaaacgagaaatgtcagtgtagttgaaattgggctcagtgtagtgcggcttctatttttattttgcaggatgttttgaatttgttggaactgtcgattgcgctggtcttctccaaaatactgctcccgatgcttgcggattgtatcaaagcgaacatcctgtatactttattgtaatttatgttaaaatatatattgtgaaagtgtcagttgacgctaaatttgtctgaaaacaacaactgggtcaaatcaaaaatgttcgttctcgctggtagagtattgttttttgatgttttaatagccaatagctatgcaggtatctaaaacaatagtttgtgatttggcgacagtttatatgtttcagatttttttgctttctaacggcacttctctatatacaagatgtgccaaaaaattactttttatagttgattacttccaaacttttaatacattatatatcaggatcgaaacgaatgatactttttggcacatactgtaagagtataagtatacaataaaacttgagcatatacctaatagttacgttataacataaggatggcataaaatactactacaaagttgacgttaccatcaaatgttagaggtatggcagaggcataattttactttgtttgatcatttttatgtgtacgagttttgcatttatatctatagagttctatttgaaatgtaaacatttttaagtagttctctagtatacgacgtgttgttaatgattgatttctttgcgttttcttttatctcggtttttaaaaaggtcgacagtttccatccgaagtttctttgtattacttctcacttactgctttaatttatacatatatgtattttatatttgaatactttttattgtttatagtaatattgttttagaggtaaagagttctttggtcgtcgccaattactgggccctaagatcttgtaagttttaacagtggtattcttggcattgaaaatgtccaatgccattatttttgttatcgatcgatttgttatcctctcgtagggtggtagtatgcctttattgactctccactattatcatcccaagattgacacagctatatacaagtgtgtcgtgatcaatgcaacagagcttatcaaacgatatttaactgtacctttgcttgaaacacttggatcagtaaccaccacaaatcaaaattaagtaggtaataatataaagttgtatattttcaaatatttttttttatttataaatctactaaatattccatatactctttttaaaacttacacctttttttattaatatatttttattatactgacccatatattccttcaaatgggaatgacttttatcaatgtcatcttttactgtaatgtgtctcatctaattcattcttatgtgcatccctatatcatgttttaatggatagttaactatttggatgggaaatgggcacagttaaattgaaaaaaaaagttttattaacgtttcgacgcccaaatcgggtgtcgttgttaaaatacaaaatactactattagtagtatttgtatactaaaatagtatactaaatactattagtagtatttttgtttttttgacaacgacaccccatttgggcgtcgagacgttgat

SEQ ID NO: 4352 - DNA, 8358 bp, Diabrotica virgifera
  misc_feature (3675)..(3677): n is a, c, g, or t
  misc_feature (3873)..(3875): n is a, c, g, or t
  SmartBlast Evalue=0; Info=Ankyrin repeat domain-containing protein 17 n=1 Tax=Harpegnathos saltator RepID=E2B848_9HYME
agtgcataaagatatatttaagtcttcatgtacaagcaaatattacataagtttccgtataattattagtcctacgggaattgaacgggaacagagcgtatccccatccccatcccaacgcgtacgtgcttgttgtgccaggcgcaacatttcatagaatggcaaacaaacaccttacggacttaaaccacataggaaagaaaatatatattcgataagagaacaatgaatcacaagtatatacttgtcccttaatcgccaatccctcataacctttttgtttaatttgcgcaactactacattttacatattatttagtataatttttataattaatgtctatgtttttcccagctagaggggacgggagattgccaccccccgtcccgctctcagctttttcctcaatttgaaaaactcctcttgctacaaattcgataaaatgtatccaaactataagcggttataaaagaaaaatcatatgcaagtaactacaagtaatgggtcttctcaataatcattttatatacagcgaatgcgttaaaacgacatacgtgaagactcttttattacaaacatttgccagaatgtttttgacctgtataatgggccaaagtacgatcagattatatcaataacaaaaaaattaaaagaaaaaaactagatctagtatctactgcaaaaagttggtagtcaaaaatcacaaagagagaagctaattttcgcacggtttttggacttaattaaaagacgcttatagttcatgttttccttgtatggttacgggttccacttggtccacccctgtggcttatcttgaagctccggtataggtcggggtgtgttatcccaagaagaaaggtccaattttgagatatcttgtataaattcacgatggaccgcgttaatctgcggttggttgtaatattgtgggccgtttatgaagccgtgggaagtgtctaacggaggcattcgcgaaaaatccacaggtggtaaatcatcgtacatttgaggatttctcatcgaaaaatccgtgttattgcccaacgcccatttgtcggtcttatcgttggtcctccaattctccatttggttggcgtacgccttccttccggttcctatcggctgcggaggtttcctatcttccacgccgtacatactctcgggatggtaattgtgcgcagctggcggcatgttcggtgacatattcggagagttgtttactatacctagttctccgccattttccaacacttcgttcccagcgttcgtgaacttggcaatgttctgcaacgtcatgccggcaatgccgctgatcagttcagattgctgctgaggagtaaaaggaggctgcatttgcatccatatacggttctgagaagagctgagacctcctactccaccaccaggagttctatggtaattatccactccttgttgctgctgttgttgtttcggcatgtacatgttgttctggtagccgttgtacatgtgtggcgcgggtttgttttgctggatgttgtagctcgagtactcgggagctttgggattaaggcgggacatgctggctgtttgttgttggtgctgctgttgttgtgagaaattcaaattcggcatagggttgtagctagactgcagcagatgactgtcgttggccaagttcagcatgtttggaatgttgttgccgccgtgtttgaacaattcgtcaaagatcccgggattgttttgagacaccggaggcctgttgtgggcgacgttgctgccgatgggtggtaatggattctgcgctttggtctgttcttggtaattgtaattgttggcggatatattgggcggtgttgtgctgttgctgctcgcctttgaagacaccggcgaacaaacagccgctcctctatatccgggcgctttcgaagcatcaacctgcggaggcggttcttggtcgatgaatttatgctgggcggtcgactgagaattcgaacctccggtgacggcggcgaaattaacgggtttctgagattcttgctctctgcggttccagtgatctccgcccgcaaagaacaaagaatattccgaggtcgcttgaaggttgggcgcttcttcctggactagttgttgaggtactgccgcattacttaaatgtaatgcaccgttaggcgtcgaactcctgatgttgttaggcattggttccatttgtggggcagtgttattatgagcagtcgcagagaacattggtgccacctttcctgggctctggaaatgctgcatgttaggtggtgctgacgccgtaggcggcggtcttgcgttcctatttggcgaagattgtgtattagctgaactagaagatggtaactggggcgaaactgggccgggtatggattggggcacgaccagcacccgggacaccttgctaggcacgctgtgactggtgttgatcatcaattggccagaagatgacgtctccgttagtttggctgcaaaagtttgattgatggatgaggttatcactttagatgtcatcggcagtcggctcgatacagaggttgggtgagaaatcgaggttcgcacgctttgattctgcgcctgtgcagctgcgttcttttccgcttgggctacgagccttggggccgttgcccgtacctgcacggtggtattggtagtgcgaggcttcgcagcagttgtcgttgaaaacctatttgttgctattgtagccgtagccgttgtctgtgttacctttgcgtgagttacagacgttgtgctcgagcttactaccactgttttacccacattcttctttgtcccaatttgagttttgtcccaaagtgtggttgctatagtagtacttttggttgatttgggcaacatggataaaatatcgacgtcgggatcttttattagtgtggcaataaggttatgagcttgtttagtggcatctgctgaacccttgatagtaataattctctctccttgacccttgctctgcttctcgacttctatatgcgcgcctgtagctcccctaatcgcattaatattacttccacctctaccaattaccctagatatagcattcaaaggaactgacaccttcttaacaccagactcggaagcggtcagggtttggactgaagatttcctaaccacttctttccacccttcttcgcgtttactagactgtttgggactagttgaactcttcgtagtagtagtttgagcgggaggttcgtcatataccggcttggttttcttggtagaaacgtagacttcgttgccagtggcttcgaaatcgtctctatccgccggtgacttgatctgatggaaagctatcacttttctaactgacgaactctgtttggatttgctctctggacttttgtcgttcttttcgggcgtttcttgctcagattgatcacccgttttcttttctgcatttttgctggaacttgctttggatcggctatgcagatcattattcttcatattagtctttttcttcttcttttccttacgtttatcttttgattttagatcggcgctagaacaactcccttgactgttggcgtctatgccgctatcaccttcctctttatcgtttgaatctccgttgcgaatagtaggattgacttctgggacactactttcctcctcttccaccttctcttcatctttcgaatcacctnnntcgtcgtagttctcgttcttcttgttctcttctaatagttttcttctttcctctttcttctctaacttcttcttcttctttctttcccgccttctagcagctgcaagccgcttagattcctccctagttttctcagactctagttcttctaataagatcgatgcattcttattggctttggctgcttgggtttccnnngcggcgcgtatgatcttcacgcactcctggcatttctctaaaagctctttatcactgactgtagcgttgtaccgcatcatctcttgatcactggggaactgcgtgacgtggtgtaccatccatttcactactttaaaatggccttttctaaatgcggccatcagacacgatactttgcggttatcttgagaatcgatgtcagccttgacattataaagtagttctacgacgggcaaatggccaccgttggcagctagccaaagcggagagttccctttcttattctttacttcgacttgcgctcctctacagagcaacagttcgacgaatcggacgtggcctttgtcggcagcgatcgttagcgcggtatctcgagaagagggtacaggggtagcgttcacgtcggctcccttatctaaaagaaccctacctacgtctacgtaaccgccactagcggcctccatgagcggtgtaagtccagtcttagctctatgttcgacattcgccttcctatcaagcagaagactgaccacttcgtgccttccttgaaaacaagccaacgttaaagcggtattcctattagtttctatttgcgcgtttatgtcactacccatatctaagaggagcttaacagctgctgtatggccgttcatggcagccaacattagaggagaaatacctaatttcgatccggtacgggaatttatttcagctccgtgactaagaagaagttttattatgttgacgtagccgccagaagcggccaagctaagaggagtgtagtcagatacgtttctatgttccttgttagcatttctattcaagagaagctccaccacttcgtagcgtccccccgagcacgccaaactgagaggagtgtctttagttctttcagattgcgcctcgatgtcggcgttatggttcagtaggatttcgacgactttctcgtggccagcagtagcagcaagtatcaacggtgtaaagcctttcttatcacggtgttctatgtctgcgccacggcttatcaacagttctactagctcttcgtggcctccagcgcatgcgagggttaaagcggtatcatggttgctttccgtttccgagtctacgtccatgcacgaagccatcactggattgggtccttgttgctgactggtactatactgggttatcgcagaattatgatcaatttggtaattttggctagggggaaaagtgccagaattctgcacagcaagaggattccgcaccattcttcctttcttaaacttaataccatccccaccactactcttaacaaccttcttggtattatctccaccgacagcttgtgtaccctgggccgtctgggtggcagcttgcacctggttggtctgttggtgtgattggtgttgactgcaaggcatttggcagtggtgggtttgttgtaatgagacagcagctccccctaggtggttgcaaggcgtctgcgcaggcgtgcaaacaggttgttgctgaggtgtaatgtactgctgcgtggaggttcctggcacgggacccacagaagtcggaacgatattggtagtggttaaggtgtctgttgcgctggcattgggacacgctagctgttgttgcatgaggctgtagcctgcttgaaagcccgcttgaaagagttgatctttgggaagccctgcgcctaagtagtgttcgtagggatataaggcgtggacaggaacttgagaggtgtttgttggtacagcgaaatattccacccgagacagatctgcttgagcaggcaggtcttgttgcgcagccagagaagctatcatagattcatccaaagcactgggatacggttgcacctgtagattatgctgagaaaggttttgttcgctaacttctgtggtgttaaaagactcgagctgttggaccacttcttcaactgatggtaggtttgaatcggaaagctccaacttggtgactttgctaccttcttctgaatggtcataaagttcaagacgagtcttttgaggtgaaccaacgaacgtagcccttaaagcaggaatagaagaactatgaaactgctgcagtatagacgcagtcaagaaattttcgtggttgtcgttctttaatatcacggtatcttcatcgattgatgctaaatcgagaccttgaacatttaaaatttcctgctgggcaatgactttattatcctgctgttggaactgcggctgttgcacctgtagctgctgcggtgtcggcaaatggtgtaactggccgaaaaactgagacggttgttgggcatagaggttcgattggaaagtcgcctgtacttgctcttgagattgttgttgctgctgctgctgttgttggatcaccgtttgttgctgctgtatcaccgtttgttgttgctgtaaagcggattgctgctttcgtagattcttgccttcttttttcgagaccggcttcgctttgggtcgatcgctgatcgctgtattctggctgacgtccgcatgcgacgtgaccgccgggaacttaacctgggcaggggcagcagcgggctgttgattggtattcgtcgaaacggcagctacatttgtcacaggttggcccgtcccgcccgctgcgacgacgcttccattggcagtggctaagctgacagcgacggacgccgaagaggtattgggcatcggcgaaaagtaatagggttgctgctgctgctgcgacggttgctgcgagttcggctgtttttggttttgctgaacgaaggtgccggtatcagtcgcggcggtttgcagcttggcggccgcccccgcttgtagacattgagtaccgcctgtgtagaaagcattgtggacttgaagattttgtccgggaaagagcgtatttgccagcatgccagtacccaacccttgctgcttctgttgttgcatagcgatgtcgatattcagcatgtggggcagtgtgttattgttagtagcagaaggacactgttcttgagatataccgtattgaaaaacgtggttatgagcttgcgttttgccatgaagatctctttccactcgatgcaattcctcgagaatttgttgtttttggctcgatccctcctcaccgttcccgctaaattgttgttttttcctgttcttaatgaagtctatgagcgagttgttgggctcgtccttgtttaaaaaatccacggcagcggcgttcgccatgaaaacttcgtcttcgaattcgaggggctgcgtccgcacctgttgggcttcggcagatgtgagattcccatcgaacacggctccagtcgatcggcttttcggtaaaattttcctacctaccgaaactttagactgatctgagttcctactgggctgctgctggacttgtttatttgagtctatcggcgaattggttgcttcttcttgctgtattatacggactgcgtcgggaacttcttgtaaaacggctgttggcggttggaagaaattgatgggctgcgtaggcaagctgggcgctagggtgcccggcggtaaaggtgaatctctactaccaacctggccgggtaacatggacaaattggtagcagccgtggccccttgctggtgctgattaagcatcataggttgcatcgagtgagggtagtctaggagcagttgcacgacgttggtgtggccccctttggcagcttcgatcaacatggtggagttgtctttcagtttgtggttgggatcggcgttgtggctcaacaggagctcaacgacgggaaggtggcctcctgcacatgcgagcgagaggggggtgtggtcgttgttggtggtttgacgcctaacgttagctcctttggatataaggaactgcacagtgcacatatgcccagcgcgacaagccttcataagaggagtccttcctccctccgactcgtgctctaagtctgccccatactgtagtaacagatccgcgacgtcggtatggccgttttcacaagcataagtcaacgccgtgtcacccgtctgcgtttgggcgtgaaaattggctgcattttccaataggaatctaacaagatctagatggccttcttgagcagcttccattaacggtgtggacgctcctagttcgatgtccgctcctcctttgagaaggatatctgctacttccataaaaccgccacagcacgctaacgttagagctgtttcttgagtctcgtctgtttgagcgtttatgtttgcaccttgacccagtaaaaggtgaaccatttcttcgtgaccttccctagcagcctccatgagcggagtgtatccctcatcattgacttcttctatgttagcgcccctctcgatgagaagcatggccagatcgacgtggccgccgcaagctgctagagttagtggcgattcgaaactgtccgtgggcatgttcacttgggcgccggaatcaaggagtagtctggccacctcgacatgcccgtccatggaggcttccatgagcgcggtatgcatttcgtcggttt

SEQ ID NO: 4353 - DNA, 4832 bp, Diabrotica virgifera
  SmartBlast Evalue=0; Info=Ankyrin repeat domain-containing protein 17 n=1 Tax=Harpegnathos saltator RepID=E2B848_9HYME
ggcgctagaacaactcccttgactgttggcgtctatgccgctatcaccttcctctttatcgtttgaatctccgttgcgaatagtaggattgacttccgggacactactttcctcctcttccaccttctcttcatctttcgaatcacctttatcgtcgtagttctcgttcttcttgttctcttctaatagttttcttctttcctctttcttctctaacttcttcttcttctttctttcccgccttctagcagctgcaagccgcttagattcctccctagttttctcagactctagttcttctaataagatcgatgcattcttattggctttggctgcttgggtttccttagcggcgcgtatgatcttcacgcattcctggcatttctctaaaagctctttatcactgactgtagcgttgtaccgcatcatctcttgatcactggggaactgcgtgacgtggtgtaccatccatttcactactttaaaatggccttttctaaatgcggccatcagacacgatactttgcggttatcttgagaatcgatgtcagccttgacattataaagtagttctacgacgggcaaatggccaccgttggcagctagccaaagcggagagttccctttcttattctttacttcgacttgcgctcctctacagagcaacagttcgacgaatcggacgtggcctttgtcggcagcgatcgttagcgcggtatctcgagaagagggtacaggggtagcgttcacgtcggctcccttatctaaaagaaccctacctacgtctacgtaaccgccactagcggcctccatgagcggtgtaagtccagtcttagctctatgttcgacattcgccttcctatcaagcagaagactgaccacttcgtgccttccttgaaaacaagccaacgttaaagcggtattcctattagtttctatttgcgcgtttatgtcactacccatatctaagaggagcttaacagctgctgtatggccgttcatggcagccaacattagaggagaaatacctaatttcgatccggtacgggaatttatttcagctccgtgactaagaagaagttttattatgttgacgtagccgccagaagcggccaagctaagaggagtgtagtcagatacgtttctatgttccttgttagcatttctattcaagagaagctccaccacttcgtagcgtccccccgagcacgccaaactgagaggagtgtctttagttctttcagattgcgcctcgatgtcggcgttatggttcagtaggatttcgacgactttctcgtggccagcagtagcagcaagtatcaacggtgtaaagcctttcttatcacggtgttctatgtctgcgccacggcttatcaacagttctactagctcttcgtggcctccagcgcatgcgagggttaaagcggtatcatggttgctttccgtttccgagtctacgtccatgcacgaagccatcactggattgggtccttgttgctgactggtactatactgggttatcgcagaattatgatcaatttggtaattttggctagggggaaaagtgccagaattctgcacagcaagaggattccgcaccattcttcctttcttaaacttaataccatccccaccactactcttaacaaccttcttggtattatctccaccgacagcttgtgtaccctgggccgtctgggtggcagcttgcacctggttggtctgttggtgtgattggtgttgactgcaaggcatttggcagtggtgggtttgttgtaatgagacagcagctccccctaggtggttgcaaggcgtctgcgcaggcgtgcaaacaggttgttgctgaggtgtaatgtactgctgcgtggaggttcctggcacgggacccacagaagtcggaacgatattggtagtggttaaggtgtctgttgcgctggcattgggacacgctagctgttgttgcatgaggctgtagcctgcttgaaagcccgcttgaaagagttgatctttgggaagccctgcgcctaagtagtgttcgtagggatataaggcgtggacaggaacttgagaggtgtttgttggtacagcgaaatattccacccgagacagatctgcttgagcaggcaggtcttgttgcgcagccagagaagctatcatagattcatccaaagcactgggatacggttgcacctgtagattatgctgagaaaggttttgttcgctaacttctgtggtgttaaaagactcgagctgttggaccacttcttcaactgatggtaggtttgaatcggaaagctccaacttggtgactttgctaccttcttctgaatggtcataaagttcaagacgagtcttttgaggtgaaccaacgaacgtagcccttaaagcaggaatagaagaactatgaaactgctgcagtatagacgcagtcaagaaattttcgtggttgtcgttctttaatatcacggtatcttcatcgattgatgctaaatcgagaccttgaacatttaaaatttcctgctgggcaatgactttattatcctgctgttggaactgcggctgttgcacctgtagctgctgcggtgtcggcaaatggtgtaactggccgaaaaactgagacggttgttgggcatagaggttcgattggaaagtcgcctgtacttgctcttgagattgttgttgctgctgctgctgttgttggatcaccgtttgttgctgctgtatcaccgtttgttgttgctgtaaagcggattgctgctttcgtagattcttgccttcttttttcgagaccggcttcgctttgggtcgatcgctgatcgctgtattctggctgacgtccgcatgcgacgtgaccgccgggaacttaacctgggcaggggcagcagcgggctgttgattggtattcgtcgaaacggcagctacatttgtcacaggttggcccgtcccgcccgctgcgacgacgcttccattggcagtggctaagctgacagcgacggacgccgaagaggtattgggcatcggcgaaaagtaatagggttgctgctgctgctgcgacggttgctgcgagttcggctgtttttggttttgctgaacgaaggtgccggtatcagtcgcggcggtttgcagcttggcggccgcccccgcttgtagacattgagtaccgcctgtgtagaaagcattgtggacttgaagattttgtccgggaaagagcgtatttgccagcatgccagtacccaacccttgctgcttctgttgttgcatagcgatgtcgatattcagcatgtggggcagtgtgttattgttagtagcagaaggacactgttcttgagatataccgtattgaaaaacgtggttatgagcttgcgttttgccatgaagatctctttccactcgatgcaattcctcgagaatttgttgtttttggctcgatccctcctcaccgttcccgctaaattgttgttttttcctgttcttaatgaagtctatgagcgagttgttgggctcgtccttgtttaaaaaatccacggcagcggcgttcgccatgaaaacttcgtcttcgaattcgaggggctgcgtccgcacctgttgggcttcggcagatgtgagattcccatcgaacacggctccagtcgatcggcttttcggtaaaattttcctacctaccgaaactttagactgatctgagttcctactgggctgctgctggacttgtttatttgagtctatcggcgaattggttgcttcttcttgctgtattatacggactgcgtcgggaacttcttgtaaaacggctgttggcggttggaagaaattgatgggctgcgtaggcaagctgggcgctagggtgcccggcggtaaaggtgaatctctactaccaacctggccgggtaacatggacaaattggtagcagccgtggccccttgctggtgctgattaagcatcataggttgcatcgagtgagggtagtctaggagcagttgcacgacgttggtgtggccccctttggcagcttcgatcaacatggtggagttgtctttcagtttgtggttgggatcggcgttgtggctcaacaggagctcaacgacgggaaggtggcctcctgcacatgcgagcgagaggggggtgtggtcgttgttggtggtttgacgcctaacgttagctcctttggatataaggaactgcacagtgcacatatgcccagcgcgacaagccttcataagaggagtccttcctccctccgactcgtgctctaagtctgccccatactgtagtaacagatccgcgacgtcggtatggccgttttcacaagcataagtcaacgccgtgtcacccgtctgcgtttgggcgtgaaaattggctgcattttccaataggaatctaacaagatctagatggccttcttgagcagcttccattaacggtgtggacgctcctagttcgatgtccgctcctcctttgagaaggatatctgctacttccataaaaccgccacagcacgctaacgttagagctgtttcttgagtctcgtctgtttgagcgtttatgtttgcaccttgacccagtaaaaggtgaaccatttcttcgtgaccttccctagcagcctccatgagcggagtgtatccctcatcattgacttcttctatgttagcgcccctctcgatgagaagcatggccagatcgacgtggccgccgcaagctgctagagttagtggcgattcgaaactgtccgtgggcatgttcacttgggcgccggaatcaaggagtagtctggccacctcgacatgcccgtccatggaggcttccatgagcgcggtatgcatttcgtcggttt

SEQ ID NO: 4354 - DNA, 9367 bp, Diabrotica virgifera
  SmartBlast Evalue=5E-51; Info=Golgin subfamily A member 2 n=1 Tax=Camponotus floridanus RepID=E2A6K3_9HYME
cggacgcatccaaggcacagaagctgaagttggcaaattcaaggaaaaggtttaaagaattacaagaacttaagaaaaagaaaaatgccactgcttcagttgataattctgaaaaagatctacgtgaaccaacaccagttgatagcctagtaagttcaacacacagttcaattaatgcagaaagtgaacttgcaaatgtaacaaacactcaattgccaaactatttcatgactactgcacaatcggatcctgcaacattttttgaaaatttgtctacaactaatactaatgttggtgacgttgggaacatttctgatgtagtagaaactccaatgtttgaacaacatgtaccctttgataataattatgctttgtttaatcaaacgaatcaacaaagttatataaaagaaacacaacatattattagaccaaatacagatagtttaaccatagaggatcctgaacttgtacaaaatgaaatatttgaccatcataggcacaacttaatacctgaccaaatagaaaatagtgatgctcaaacttatgaaggcagctacaatgaaaataatcctgttcacaatagtttcaaacagaatgtgagtgatacaaatttaagcgacttttctactcaagtggctcatataatcccagagtcacagagtgactcaaatctaataattgatctggaacaaaggaacgcagagttgacttcatttttagagcaggagaaaattcaatcacagcaacaacagcttcaaataaatgaactgcaagcaagaatataccacttagaacttgaaaatgcaacaaaagataataattcagtaataaataaattagaagaagatttaaaatgtcatagtcagaccatcaggcttttagtagctgaaaaaagcgaactttctaatgctgtagctcaacaggaggttacttttaaaaataaaaattctgagtgtgaagaactgcaagcgagactaaaggcttctagatctagagcttttgaattagagcaagaacttaacactttaaaatcagaacgaatacacaaagaaaccaacaatcatgatcagaacaaagttctagaaaatacattgaaggattttaatgagttacgtgattcaaaagaagaacttgaacaggatatcctcgaagttcgggaaaaactaaaaagtgctacacaagaagtcttgacccttcaaaagcaaaattcagagctctctggaaaattatctttggcagatattaagattcaacaacttgttggtgctgatcatcagacatcagcagctcaaattgagtcgctggtgcaagaaaatcgtgctttggatgcggaaatggtttcccttaataatacaataaaaagtatgagtaaagaacatgagcaatctaccttacattatcagcaatacacagaagagctgaacacacaacttctaaccatccaagaacagtaccaacatatacaacaagaaaatgacaaattgtctgcagaggtacaaaatagagtacaccatatctgtgatcttgaacggcaactccagaacaagcaaaatgaaaaggttacatttacctccagcaacggaacgggtttgaatgtaaaagaagaactggaagtgacgaaagaattgtgtgtccagctacaggttagattgaactatttttcttgcaaatattttaaatatttttaaatctttgcattaccaaatctgcaaaatcaagctaaatacttttaatttacatttacattaattttatttcatacttttctttgtttgtactttttaatttatttttaaaatgcactaagtaactacagatttattagagaaaccaaattgtgtctggcagaacgaatattacaaatcagctgttccaacaaaaacattctgaaaagtcttatcagtaatttaatatttttattacaatccaatataatgtactttagatatatgtatgtaaagaaatagcagcaatattcaaatttttatcagtttattcagttttgatctagtatacatgtacatactgctttttgttggagtggttgattgagaggagtaaacctctaaaaaatccccattactaaagtgtaagtcatcgtgctgatggtatgtgaggtacttgggttaaagtacaataaacgatacccttgggacattaggcggaatcccattgaatattagccttgtccctgcaagcggggctctgcggggattgacctattatttccctagctactcgtgggaatcattatgaggtacaatcgttataacaaatcttattcttcttatagtaggcctagctcttgggcttacgatgactattcttatggacgggattacagaccgccatgggcaaacggctcaagggggtccagtccgccaagatcatctaggtggagatcatcccgaccgccaaaacgaaagcagaatggcagtgaatattctgatgcaaaaaaatcaagagacgagaaaaaaggcggtatacaaatgttcgtaacaaccaagaattttcctcaagaaaatcttactgaggaacaactggaactcttgcaatcttccattttgaatgaaattacaaaaattgcagatggagattttcaaccacaatttcatgactgttttaagcgtcggggcaatcttatcattgtttgtaacaatcaagacagtgtagattggcttaagaaaactgttcccactataaaaccatgggaaacagcagattgtcatgcattggaacctactgaagttccaaacttaatggacatcttactaaccttaccaaaagatatagatactgaggtgttgcttcggagaattgaaaaacagaatgaaaatgtcgatacatcaaagtggaacttaacaagcaagaaaactgaggaaggtgaaacagatacaacatacatttttgcagtcgatgaaagtgtggttacaagggtacgagaactagattataaactgtttatcaatttcaacagggttcatgttagatatttgggggctttaagaacaaaggaagataaaaaagaaaaggatgagaacgaagataaggaaaaggaagaaaaggaaggagaagaagttaacatagatccagaagaaattgtaggtgctcttacaactgatgagctccaagcagtagctgaaactaaataaaaccaatataaaaatgttaataatacatacatcagacaaacaatattaggaacaccaaattgtatgtattatgaattaaaaaataacaaaaaaaaagtaaaaaaccaaaaaaatatgaggagtaaacctcgaaaaaatccccattgctacggcgtaagtaatcgtgccaacagcatgaaaggtactggggtcacagtatcagcaaacgatacccttgagacatcaggcgaaatctcattgtattttagccttacctctgcacgcggggctctgtagaggtggactattatttccctagctactcgtgggaataagtatgaaacctaattatcgtaacagttcaagtacaccgtattcgggagctccagcagcataccggagatcgggaagctcaccaagaggaaaatattcaagacgttcaggtagctcgagaccaccatgggcaagagagtccaggggtcggtcatattacaggggtaagaaaagtccaccaccaagaccactccctggaattaatttgatgatcgcccttgtggaatatccaaagtcactaatgtcggaggaacagttggctatattggaagaacaaattttggaagcaattgataagattgaagatggaacattcagaccacaatttttggaatgcaaacgtgaaaccggttctttaatattaaggtgtaataatgaccttactgttaactggttgaaagaaactttatccactctcggtctttgggaaggtgctgaactaaaaattgtagactctgtaccgaacacatctaaagatatctccaaagtgattgttcctaagaattatccattagaatttttcaatactgaacagctagataaattacaatcagacatcttgaaagaaattgataacataccagatggaagttttatgccgcaattcttaagctgtcttaaggaaaggggagcattgaaattcaattgcaataacttggcaagtgctgaatggctaagaactacagttcccactttggagaattggaaagatgaagatgtttcaatactagatcctgaaacagtaccagtaagaagcacattgcagctgtggataccgggagcagttgaagaaccagagcaagtcttagaacgtctggaacggcaaaataagggattagatactttaaattggcaagttttaaacaagaaagttgaagaaggcggccaaaaactatttgtaacagtgcaagatcacgtactagacgctctgaagaaaatagattacaatcctttcctaaacttcactagggttaaagttaagcggttgggtaggtataagccacgtgagaagaaagatgagaagaacgaagatccagacactgcttatatagaaacaaaagaagatccaatggctggagatattggtgagttcacagctattgatgaaattaaagaggaagaagaagataaggcggtgccagctgcaaatgcttaagtgatccattcaattttaagcagttcataaacaaaaattaatagttagaaaacaggacattacaatttttcgagtttaaccatttcaattttaattcatattatgagtcagccatcattcatcgtcatattttttactataatttaattctacatttcaaggtcattcatacctatggttgaggagtaaacctcgaaataaaaaaaatccccattactacggtgtaggtaatcgtgctaaaagtatgcaaggtgcttggggttataagcaccattaacgatacccttgggataccaggcgacctcccattgtaatacagccttacctctacatgcggggctctgtggaggttgacatattttccctagctactcgtgggatcattaatgaatagaaatagtttctcaaattcgccatttatggcttataactcatcctactctcaatatccgcaaagtcgcccgtcggggtaccaaaggggttacaacaacgcacctcttcattcgcaatcgagagatggttactcaaatagatctatatgggaatcaaatatgaacaacggcaatcagaatcagattccctctttgttttcggtgtcatcaagttggtcagacacaaattctgcatggtcaagatttcaaagtgcacctacaggaaataatcctgcttggttaggcaaccaaaacggctttcaacctaattggtttcaatcaagcaacaaccagtcttggaatcctcgatctaattttcaaaacggttctccaagacgtatttggaaaagagctccaaaacgagcacgaagtaaaagtccgaaggcatcagctcctaacatcgataaatctgcagttggaaagaaaaaaccaacttggctccgaaaacgtttggctaaaaaaggtgccacaacagggtctaatccctctacaactccacctgccaaaacagcaaaacctggtaccaaagatgctgataagaaatcagacaaatcaactgtacgtgatggagtgctagctgtagttgtcatgaaagaatttccatttaaaaggttcgacccagaagagcataaacaattgatcgaagcatttaatgcagaagaaaagaaacaggacccaactggaagtctaatcaagacatttttgaagaaaaagggttcattatatgtggtctgcaaagataaagatggcgtcgaatgtgtaaagaaaataacggaaaatttaaatccttggcaggaaaaacatttaaaagttatacttcctgtagaacgtgatgccaaaaagtggttggctgttgtcccagaaagttttccttctagatggttttctctagatgaaatgagattgatgcaaactgcattggaaaatgaactaaccaaaatggatatcgatgctgaaatgccagagtttttagattattataaacggagaggatctatgctactagcttgcaacaatgaattcagtgccgagtggttgaagaaaatactagaggaaataaacgttgattgtgaaaaagcaaaaattataaatgcaaatgaattacctacatgctataaaatcgagttaacattaccatcaactactttggacgatgtagaaaaggtattagagagaataaatcgtcaaaacgatgatttggagacgaatcgttggtacattattaggaaaactgaaatccccgaaaaggggatacaggttattgcatctgtggaattacaagtgcaggaacagttgaaaaagataaattacaaacctttcttaaacttcggtactgtcgacatcaagtatctaggaatcatgaggagtaaacctctgtaaaaaatccctaatactaaggtgtaagtaatcgtgccaatggtatggatagtactgaggctacagtactgctaacggtaccttcagggatattggcgaattcctggagtatttaaaacgtctttctcttgtaaactgggctctgcaagggatgacttgttttcccagctactcgtgggatcattaatggatatttcaatgaataaattaaatttaagtgctacaaaagttaaactttctggggctcaaaagagaaaactcaaaaaagaaaaaaacaacactgaaaatcctacaccaaaacacgatatcgaaatcaacaaaagtaaagatgttttggagtatgttgttgttccctttgagtatccagagaaaaggctgtcgaattggcagtttgaacaagtaaagacggaaattttaagaattttggatttgtcacaaattcgagaaggtattaaattaaaaggtggattgaaatttgcttgtgacgaaccaacataccaacaactactggtagcagtaagcaatataagagtattaggttggccactaaaaatattgaatattaaagaattgcctgtttatacgaaaatattgataattttgaaaggcattccagaagatccacaaaaagttcttgaaaagttagaggttgacaacaacaagataacgaccaaaaattggcacttaattcaccgtgaggtcaaagaggattcgcaacggatctttttttccattgaccaagagagcgtaaaagtgttagaaaccattgattacaaacctctttttaacaatgaaagagtcaaattacatattatggctaagaaaaagcatgagaattaggaactttttctggattgatggaaatctaaatttttgggaggggtttcaatttttttcacacgtgtctgtgtttagaataattaaaaagctgattaggttaagcactcaattcaagtgtagaggtacgtatgttcaagttagcgtgtttaaatgttagcataacgaaacttctgtattttttaggttatagtttataattatcacaattttgccgtgtaacagataagtcaaaacagttttggaaaagtacttggtcctgtacaatatgaagctgctctacataacaacatatgagatggaaaaaaccgaactagaagaaaactatactaaagccctaaacgaaaaagaaatgctgatgaaagaactagctgccaaaaacgattccttgaatcaactagaaaccatggtggaacagttaaaaggaaatcaacctgatacagctaaattactggctactatggaaagtgacaaagtcgctgctgctcgagctgtccagcaaaatatggaactcaaagagcagttagagagtatggcagaagtatttgccaaaatgaacaatgacaaggtggaactgacagaaaagctaagcattcagcagtctgcaagtaaggacctacttgaaaaattgcaaaaaactgaattgcacttacagatgttaactgatgctatcgaaatcaaagatcgagagctttcgcatctccgagaggcatctgaactaaatgaggtgctggatcacgaagagcaacatacagatgaatcacacgagacttgttcacatactctacagaatgaactgaaagaagctactgaaacaattgttaaattaacaaatgaattaaacaaccagagaaatcaaatgtctccgtctccacaagtatccgtaggtgatgatatttcatatttattgaagcaactggaagaactgaaacttaaaaatcaagaactggaaactaaactagaaaatcacaccatcgatgataattacaacaataaattgttaacagaggaagagtctgaaagcattttgcaaaaagaagaagcgatgaagcgtttggaagagaaatttaaacgtagaatgcaagatattgctgatttgactgaggagaaacaacgattggagcatttggtgctgcagttgcaaggcgaaaccgagaccattggagagtatgttgctctttaccagcaccagcgaatgatacttaaacaaaaagcgatggaaaaagaccagcaattcaaacaacttgcgacagatagagaacaaatcaaaataaagttagaaaaattaaaccacctcgtaggcgaattactaaaatctaaaaccttgagttcagaaattttgggccagtgtgagcgcttacacgaaagcgaaaacaaagaagtagaaactacggaagacttcaataaagaagagagtccgcacactgaaacagccgaagaaatcttgacgttactctcagagataaaaagcagcaatctagtcgaacctaaagaaagtatccaccactgtccattttgttcagggcaactaatcaccgtatagtttttcggaatatccatctcattgggcttcagaagaatttgtattttgtaagcttttccaaaacatatttgacttattttatatatttcaatgagtgatagattattttaaatatttatattttttatatttagttagatctgtaagtgattcattatccccggtcatttaataatgtaacttgctaccaaaaagtgttataactttacattgttcaagattgggttattctggagtataattaaatactttgtgatggataaccgagtagcttcatgtcttaaaatatcgattttataaaaaaacatttttcttatttggataattattcaattatcgttgacttcaatttaaagttttaatactttttggtagcactttcaataggttttcatattcatcatttaaatattttaagagttcatgatttcacgttttaagtgaatgtttgtcatcaacatgttttgaacacagattgtatgtaacaaggtattttttatggtaccggtaaaaatgtgatttttgtatataaaacgaataaaactactataataacaaa

SEQ ID NO: 4355 - DNA, 3447 bp, Diabrotica virgifera
  SmartBlast Evalue=1E-92; Info=Golgin subfamily A member 2 n=1 Tax=Camponotus floridanus RepID=E2A6K3_9HYME
cggacgcatccaaggcacagaagctgaagttggcaaattcaaggaaaaggtttaaagaattacaagaacttaagaaaaagaaaaatgccactgcttcagttgataattctgaaaaagatctacgtgaaccaacaccagttgatagcctagtaagttcaacacacagttcaattaatgcagaaagtgaacttgcaaatgtaacaaacactcaattgccaaactatttcatgactactgcacaatcggatcctgcaacattttttgaaaatttgtctacaactaatactaatgttggtgacgttgggaacatttctgatgtagtagaaactccaatgtttgaacaacatgtaccctttgataataattatgctttgtttaatcaaacgaatcaacaaagttatataaaagaaacacaacatattattagaccaaatacagatagtttaaccatagaggatcctgaacttgtacaaaatgaaatatttgaccatcataggcacaacttaatacctgaccaaatagaaaatagtgatgctcaaacttatgaaggcagctacaatgaaaataatcctgttcacaatagtttcaaacagaatgtgagtgatacaaatttaagcgacttttctactcaagtggctcatataatcccagagtcacagagtgactcaaatctaataattgatctggaacaaaggaacgcagagttgacttcatttttagagcaggagaaaattcaatcacagcaacaacagcttcaaataaatgaactgcaagcaagaatataccacttagaacttgaaaatgcaacaaaagataataattcagtaataaataaattagaagaagatttaaaatgtcatagtcagaccatcaggcttttagtagctgaaaaaagcgaactttctaatgctgtagctcaacaggaggttacttttaaaaataaaaattctgagtgtgaagaactgcaagcgagactaaaggcttctagatctagagcttttgaattagagcaagaacttaacactttaaaatcagaacgaatacacaaagaaaccaacaatcatgatcagaacaaagttctagaaaatacattgaaggattttaatgagttacgtgattcaaaagaagaacttgaacaggatatcctcgaagttcgggaaaaactaaaaagtgctacacaagaagtcttgacccttcaaaagcaaaattcagagctctctggaaaattatctttggcagatattaagattcaacaacttgttggtgctgatcatcagacatcagcagctcaaattgagtcgctggtgcaagaaaatcgtgctttggatgcggaaatggtttcccttaataatacaataaaaagtatgagtaaagaacatgagcaatctaccttacattatcagcaatacacagaagagctgaacacacaacttctaaccatccaagaacagtaccaacatatacaacaagaaaatgacaaattgtctgcagaggtacaaaatagagtacaccatatctgtgatcttgaacggcaactccagaacaagcaaaatgaaaaggttacatttacctccagcaacggaacgggtttgaatgtaaaagaagaactggaagtgacgaaagaattgtgtgtccagctacagatggaaaaaaccgaactagaagaaaactatactaaagccctaaacgaaaaagaaatgctgatgaaagaactagctgccaaaaacgattccttgaatcaactagaaaccatggtggaacagttaaaaggaaatcaacctgatacagctaaattactggctactatggaaagtgacaaagtcgctgctgctcgagctgtccagcaaaatatggaactcaaagagcagttagagagtatggcagaagtatttgccaaaatgaacaatgacaaggtggaactgacagaaaagctaagcattcagcagtctgcaagtaaggacctacttgaaaaattgcaaaaaactgaattgcacttacagatgttaactgatgctatcgaaatcaaagatcgagagctttcgcatctccgagaggcatctgaactaaatgaggtgctggatcacgaagagcaacatacagatgaatcacacgagacttgttcacatactctacagaatgaactgaaagaagctactgaaacaattgttaaattaacaaatgaattaaacaaccagagaaatcaaatgtctccgtctccacaagtatccgtaggtgatgatatttcatatttattgaagcaactggaagaactgaaacttaaaaatcaagaactggaaactaaactagaaaatcacaccatcgatgataattacaacaataaattgttaacagaggaagagtctgaaagcattttgcaaaaagaagaagcgatgaagcgtttggaagagaaatttaaacgtagaatgcaagatattgctgatttgactgaggagaaacaacgattggagcatttggtgctgcagttgcaaggcgaaaccgagaccattggagagtatgttgctctttaccagcaccagcgaatgatacttaaacaaaaagcgatggaaaaagaccagcaattcaaacaacttgcgacagatagagaacaaatcaaaataaagttagaaaaattaaaccacctcgtaggcgaattactaaaatctaaaaccttgagttcagaaattttgggccagtgtgagcgcttacacgaaagcgaaaacaaagaagtagaaactacggaagacttcaataaagaagagagtccgcacactgaaacagccgaagaaatcttgacgttactctcagagataaaaagcagcaatctagtcgaacctaaagaaagtatccaccactgtccattttgttcagggcaactaatcaccgtatagtttttcggaatatccatctcattgggcttcagaagaatttgtattttgtaagcttttccaaaacatatttgacttattttatatatttcaatgagtgatagattattttaaatatttatattttttatatttagttagatctgtaagtgattcattatccccggtcatttaataatgtaacttgctaccaaaaagtgttataactttacattgttcaagattgggttattctggagtataattaaatactttgtgatggataaccgagtagcttcatgtcttaaaatatcgattttataaaaaaacatttttcttatttggataattattcaattatcgttgacttcaatttaaagttttaatactttttggtagcactttcaataggttttcatattcatcatttaaatattttaagagttcatgatttcacgttttaagtgaatgtttgtcatcaacatgttttgaacacagattgtatgtaacaaggtattttttatggtaccggtaaaaatgtgatttttgtatataaaacgaataaaactactataataacaaa

SEQ ID NO: 4356 - DNA, 5966 bp, Diabrotica virgifera
  SmartBlast Evalue=1E-154; Info=Protein spinster-like protein 1 (Fragment) n=1 Tax=Camponotus floridanus RepID=E2AXC6_9HYME
aaacgaatactgtcaaagttaacaaagcacaacaaggttaattgcagtgtatcttaaaatttgttgaagtgaatgtcgtttaataaaaatctataataaatataaccaagctgatctcccggttgtggcactttagacagaatataaactgcagatgcagacatgttattgcataccataaccttttcgtcataattttatttgtttgataaattttgcagacttttaagaagtgccaggtcacctccagttgttgacgattatcttgtctaaggtagaaatatagttcacaagaagtaattatttacattcctaagaaacttaatgaaaggtgacagtgcagcttgatagataagaaaatttcggtaaacgcgtaatcatcaggtgattttcgacgcatgctcattggttgttaaacagacccgccaacatggataaccggcttgaatctcattcgttttcaaactctcttgaaattaggttagttagtgcttaccgggtatcatgccgtccgaaaaattagagaaagttgttatgaaaccatttaaaatggatccagctcagaataattctcaacaagaacttgtcacagaagataatgaaaataatccacgaggaatgcgaaatgttactttccgcgagtgggttgttgttggtattttgtgttttgtcaacttgatcaactatatggatagattcactatagcaggagttctggaaaaagtacaacattattataacattgacaataaagctggtggatttttacaaacagcatttattcttagttatatgctttttgctccgctatttggttaccttggagatagatataacagaaggtatattatggcatttggtgtgtttatgtggagtgtaacgaccctgtgtgggtcatttatgacgaacttctattggttcgtttggttccgtgcattggtgggcataggagaggccagctattcaacaatagcaccgacgataattagtgattacttcgttggagatgttcggtccaaaatgttagcaatcttttattttgctattccagtaggaagcggcttgggttacattgtaggcgctaaaacagcagaacttatggatcagtggcaatgggcacttcgagtcacgcctcctttgggtttcgtagctgttgtacttgttatatttattctttctgatcctgaaagaggtcaaagcgagtgcagcgggcacatggaagctactccatggttagaagatctgaaatatcttattcgcaatccaagttttatgtactcaacagctggatttacttgtgtatcgtttgtagcaggggcattatcatggtggggacctctatttattgagaagggaatgagattgcaatcatctacaacggtcgattcgcaagacgttgcattgaaattcggcgtcatatcgatgttgtcaggactaataggtgtcccttttggcagctatctggctcaacgtttacgccctaaatacagccgtatagactccaatatatgcgcttttggtctactgatgtcaagtccgttggtgttcttggtagctttaacggccaggcaaaatgcggctttgtgtttcacgctcgtcttttttgccgaattcttcttgaatctcacatggtccatcatcgccgacatcttgttgtatgtggttttaccaacaagacgatcctctgcggaaggtttccaacttttgttttcacatgctcttggagacgctggcagtccctattttgtaggcgtgttatcggaagcaataaaaaatatacttcagcgttccagttcaaattcaacaactaaagatgatttggaaattgaattcacatctctacagtattcactgttttcgacgtgttttgttgaagttttgggaggaatatttttcataatcacagcattttatattgtaaaagataagcagaaagttgatgacgcaatgcacggagaacgacccagtcctaatcaaacagagcaggaagaacaacttcaagcggatttgtagataaaacgtagaagcgctctggaaattcacggcagctcttggtcaacaatcaggacaacgatcaaatcatttcttgatcactagtctactaaagcgttgtataaaaaattaatttatttaatcttttttcctcaagccacaagactgccaattaatgctaatcgacatcgtttttcaaacatcgcaaactagaaagaataagagttatgtgaaacatttaaaaagtttttatgtcgtttttttgagttgacgtaatcgaaacgccaattacaacttttgtattaagcgaaaatgaatatcaacagaagataacgaaccatttaaattcgatgatctaagaaaatggtaaagaaactctgttcattgggtggatacaagaatttttaagactaatcgtgcaaattctcatattactaaaatacttatgttaatttctgctatttcgttagatggaaaatcaaactatgaagtaaaattgtccatctgggctttaataaaacacgggatgttttattcatacaaaattgctccacttctttgattacccctatgcagtcccggcgctaaaagtataagttgccctcctgcaaaactagcatatgcaccttttttttaattgctattatgtataacaccagcagaaaaaaatctctttttggtgcccaacaaaaagaagcgcccgcctgcagtgtgttccttgcaggctcgttattgccttccctgtccctatggatctccctgtaatcattttgataccctcttattagatagttaatttttttgtccaagccaaatcatataattcgactctatattgttttcagaacgatttggtcgtttgatcaatttttcaatgttagcatagcactatgaagatactagatgtaggttttgctttgtaatttttgtcgtacacattaaaagttcataatattcttattctttctataatgtaggactggtaacttattattttaaccatacgtaatgttgtctaaatggtgtacgtgcgtggtcgaatttttatatagaggtaagcatcgtgtttaaactcataaaatattatacatggaccttcactcaagtttttcttaacttattttttatgtatttagttatgatttcggggcagttcttatttttgtttaatttgaaaatggacagacattcaagtgaaaatatgtaagttatgttaattcaagtagtgacaaattaacaaatatgaagattaatccactgttttctgtaacaaacttctaacttctgtaaaaacaaaaaaattctaatgtgcatttaaaaaacttccgataaaatataagcaaaagcaaacatttcattcattcataattcacatttactactaaagtattcctactataatagattatcactgcacatatttatttacaatcattaaaaagatctattattattaatcttattttgctttaatacataaaaatattctagtttgtaaataatgtgtctcttttaagttatctgaagctaaattcaacgaatactgcatatttaaagattcgatcaacctacagacagtttagactgttgttcaaaccatttggccttccaattaaacttgtatttgttatgtattgcgacataggtgtaaaaacgactgcgaattttattaactgttatgcttcagatgtatctattacgcgtgtgttttaggtgtattgtgtgaatattttatattttaatgtaaatacgccaataccaattcgatacatggaactcaatttaatttaaaaatacttctatgggtgtattagatatcgatgaaatccttcattttagcatgtgttgtacttattacaatagttttcaatactacccaaaaaagttacggaaacacatctttatatacctctataagttcctgagtgaaaacaatatacaaatcaaataccaaaattttgcatctcctatttcttattaggtttccattccacaaaggcttaacaataaaaagacatttttgcaacttacctaatatgaaatcctttatgaatttctcattagttactttggctttaaaaaactattatttcatagtgttttcaaattgttaaaaacatcttgttcttgcttactttaacataattttgtactaaaaacgatcattattctctttgcattattcctatgcggggtcggcttctctaattgcatttcttcatacaattctatctggggccatatcaataccaatccccttcaccaacatgtccttgtctaagcgtctccgccaaggtcttgttggtctttctctcctactccttccaggaatctgcacttcaacaattcttcgcattgggtgattaaagtaaatatgaccaaaccatcttaacctactgtccgtcccaccttgactttacagtatggggacataggcagtgcagtccttgtgagagtttttagcgaggtggtgccgattttatcaaaaataatttttaatggaacattagagagattgaattgaacctgttttagaagataatctacaattttaggattcgtatacgtttaagtttatttgatatactacgcatatgaattctaaaattgtagattgcctttctaaacagttttaatttagtctctctaatgttcgattacaaattctttttgataaaataggcatcagcgcgctggaaactctcgtaaggactgcattgcctgtgttccctatactgtggagtcaaggtgggacggactatatgctctctcattttggcatcatttggtgcaacacctagacaacccctaatatactcattttatctcttttgtcactccactaatccatctaagcattctcatttccgccacatgcattcgttgttcctctttctttttcactgctcaacattcagttccgtacatcatagccggtcttatggctgttttatagaattttcccttcattggaatttttctgtcacacaacacaccactcgcttccttacacttcatctatccaaccttaattctactgcatgcatctccatctatttctccattaatctgtaatatcgatcctagatacttaaaactattgcttttcacaatcatttcaccatccaaagatatgattttatttgtagtagctccatctttaattgaacattccaaatactctgtttttatgctattaagttttaaacttttttccatccagagcttgtctccactgttccagttttttatctaaatctctttgactatttcctactgacactacatcatcagcatacattaagcatcatggaatgttaccctgttgtttcgctgttatgtggtaaaaagctaatgggaataaacaaggagtaagcaccgagcctttgtgcaatcctattttcacatgaaattagtcagtctctccacacttgtcctattaacactaatcgtcactccgtcataaatatctctcataatcttttcatattcaccagggagtcatattcatattcttactgagtgcccaccacagaatcgctcgaggaactctatcatatgctttctcaagatcaatgaataccataatataagcgtttgtatctttatccctatacggttccataaattgccttataatgaaaattgattatatttggccctgcataaagccaattatttatcagatacttcggtttctactaaaaaaaaatatgaagataaaaagaaatattattttttgaacatatttttgcgtacgttcttctaataattttggcaattcctttctgcattcttatttcctcgtttaatgcctggcggtaatttctggcacaaagctttatgttaatttttggggatgctattaaacatgtttgcgtcctcatgttagaagtccttatttctattatgtttccaaattagctttcttgagtatcgatgttgtaatctcttcatttttcggtttgttgcac

SEQ ID NO: 4357 - DNA, 5889 bp, Diabrotica virgifera
  SmartBlast Evalue=1E-153; Info=Protein spinster-like protein 1 (Fragment) n=1 Tax=Camponotus floridanus RepID=E2AXC6_9HYME
aaacgaatactgtcaaagttaacaaagcacaacaaggttaattgcagtgtatcttaaaatttgttgaagtgaatgtcgtttaataaaaatctataataaatataaccaagctgatctcccggttgtggcactttagacagaatataaactgcagatgcagacatgttattgcataccataaccttttcgtcataattttatttgtttgataaattttgcagacttttaagaagtgccaggtcacctccagttgttgacgattatcttgtctaaggtagaaatatagttcacaagaagtaattatttacattcctaagaaacttaatgaaaggtgacagtgcagcttgatagataagaaaatttcggtaaacgcgtaatcatcaggtgattttcgacgcatgctcattggttgttaaacagacccgccaacatggataaccggcttgaatctcattcgttttcaaactctcttgaaattaggttagttagtgcttaccgggtatcatgccgtccgaaaaattagagaaagttgttatgaaaccatttaaaatggatccagctcagaataattctcaacaagaacttgtcacagaagataatgaaaataatccacgaggaatgcgaaatgttactttccgcgagtgggttgttgttggtattttgtgttttgtcaacttgatcaactatatggatagattcactatagcaggagttctggaaaaagtacaacattattataacattgacaataaagctggtggatttttacaaacagcatttattcttagttatatgctttttgctccgctatttggttaccttggagatagatataacagaaggtatattatggcatttggtgtgtttatgtggagtgtaacgaccctgtgtgggtcatttatgacgaacttctattggttcgtttggttccgtgcattggtgggcataggagaggccagctattcaacaatagcaccgacgataattagtgattacttcgttggagatgttcggtccaaaatgttagcaatcttttattttgctattccagtaggaagcggcttgggttacattgtaggcgctaaaacagcagaacttatggatcagtggcaatgggcacttcgagtcacgcctcctttgggtttcgtagctgttgtacttgttatatttattctttctgatcctgaaagaggtcaaagcgagtgcagcgggcacatggaagctactccatggttagaagatctgaaatatcttattcgcaatccaagttttatgtactcaacagctggatttacttgtgtatcgtttgtagcaggggcattatcatggtggggacctctatttattgagaagggaatgagattgcaatcatctacaacggtcgattcgcaagacgttgcattgaaattcggcgtcatatcgatgttgtcaggactaataggtgtcccttttggcagctatctggctcaacgtttacgccctaaatacagccgtatagactccaatatatgcgcttttggtctactgatgtcaagtccgttggtgttcttggtagctttaacggccaggcaaaatgcggctttgtgtttcacgctcgtcttttttgccgaattcttcttgaatctcacatggtccatcatcgccgacatcttgttgtatgtggttttaccaacaagacgatcctctgcggaaggtttccaacttttgttttcacatgctcttggagacgctggcagtccctattttgtaggcgtgttatcggaagcaataaaaaatatacttcagcgttccagttcaaattcaacaactaaagatgatttggaaattgaattcacatctctacagtattcactgttttcgacgtgttttgttgaagttttgggaggaatatttttcataatcacagcattttatattgtaaaagataagcagaaagttgatgacgcaatgcacgctggaaattcacggcagctcttggtcaacaatcaggacaacgatcaaatcatttcttgatcactagtctactaaagcgttgtataaaaaattaatttatttaatcttttttcctcaagccacaagactgccaattaatgctaatcgacatcgtttttcaaacatcgcaaactagaaagaataagagttatgtgaaacatttaaaaagtttttatgtcgtttttttgagttgacgtaatcgaaacgccaattacaacttttgtattaagcgaaaatgaatatcaacagaagataacgaaccatttaaattcgatgatctaagaaaatggtaaagaaactctgttcattgggtggatacaagaatttttaagactaatcgtgcaaattctcatattactaaaatacttatgttaatttctgctatttcgttagatggaaaatcaaactatgaagtaaaattgtccatctgggctttaataaaacacgggatgttttattcatacaaaattgctccacttctttgattacccctatgcagtcccggcgctaaaagtataagttgccctcctgcaaaactagcatatgcaccttttttttaattgctattatgtataacaccagcagaaaaaaatctctttttggtgcccaacaaaaagaagcgcccgcctgcagtgtgttccttgcaggctcgttattgccttccctgtccctatggatctccctgtaatcattttgataccctcttattagatagttaatttttttgtccaagccaaatcatataattcgactctatattgttttcagaacgatttggtcgtttgatcaatttttcaatgttagcatagcactatgaagatactagatgtaggttttgctttgtaatttttgtcgtacacattaaaagttcataatattcttattctttctataatgtaggactggtaacttattattttaaccatacgtaatgttgtctaaatggtgtacgtgcgtggtcgaatttttatatagaggtaagcatcgtgtttaaactcataaaatattatacatggaccttcactcaagtttttcttaacttattttttatgtatttagttatgatttcggggcagttcttatttttgtttaatttgaaaatggacagacattcaagtgaaaatatgtaagttatgttaattcaagtagtgacaaattaacaaatatgaagattaatccactgttttctgtaacaaacttctaacttctgtaaaaacaaaaaaattctaatgtgcatttaaaaaacttccgataaaatataagcaaaagcaaacatttcattcattcataattcacatttactactaaagtattcctactataatagattatcactgcacatatttatttacaatcattaaaaagatctattattattaatcttattttgctttaatacataaaaatattctagtttgtaaataatgtgtctcttttaagttatctgaagctaaattcaacgaatactgcatatttaaagattcgatcaacctacagacagtttagactgttgttcaaaccatttggccttccaattaaacttgtatttgttatgtattgcgacataggtgtaaaaacgactgcgaattttattaactgttatgcttcagatgtatctattacgcgtgtgttttaggtgtattgtgtgaatattttatattttaatgtaaatacgccaataccaattcgatacatggaactcaatttaatttaaaaatacttctatgggtgtattagatatcgatgaaatccttcattttagcatgtgttgtacttattacaatagttttcaatactacccaaaaaagttacggaaacacatctttatatacctctataagttcctgagtgaaaacaatatacaaatcaaataccaaaattttgcatctcctatttcttattaggtttccattccacaaaggcttaacaataaaaagacatttttgcaacttacctaatatgaaatcctttatgaatttctcattagttactttggctttaaaaaactattatttcatagtgttttcaaattgttaaaaacatcttgttcttgcttactttaacataattttgtactaaaaacgatcattattctctttgcattattcctatgcggggtcggcttctctaattgcatttcttcatacaattctatctggggccatatcaataccaatccccttcaccaacatgtccttgtctaagcgtctccgccaaggtcttgttggtctttctctcctactccttccaggaatctgcacttcaacaattcttcgcattgggtgattaaagtaaatatgaccaaaccatcttaacctactgtccgtcccaccttgactttacagtatggggacataggcagtgcagtccttgtgagagtttttagcgaggtggtgccgattttatcaaaaataatttttaatggaacattagagagattgaattgaacctgttttagaagataatctacaattttaggattcgtatacgtttaagtttatttgatatactacgcatatgaattctaaaattgtagattgcctttctaaacagttttaatttagtctctctaatgttcgattacaaattctttttgataaaataggcatcagcgcgctggaaactctcgtaaggactgcattgcctgtgttccctatactgtggagtcaaggtgggacggactatatgctctctcattttggcatcatttggtgcaacacctagacaacccctaatatactcattttatctcttttgtcactccactaatccatctaagcattctcatttccgccacatgcattcgttgttcctctttctttttcactgctcaacattcagttccgtacatcatagccggtcttatggctgttttatagaattttcccttcattggaatttttctgtcacacaacacaccactcgcttccttacacttcatctatccaaccttaattctactgcatgcatctccatctatttctccattaatctgtaatatcgatcctagatacttaaaactattgcttttcacaatcatttcaccatccaaagatatgattttatttgtagtagctccatctttaattgaacattccaaatactctgtttttatgctattaagttttaaacttttttccatccagagcttgtctccactgttccagttttttatctaaatctctttgactatttcctactgacactacatcatcagcatacattaagcatcatggaatgttaccctgttgtttcgctgttatgtggtaaaaagctaatgggaataaacaaggagtaagcaccgagcctttgtgcaatcctattttcacatgaaattagtcagtctctccacacttgtcctattaacactaatcgtcactccgtcataaatatctctcataatcttttcatattcaccagggagtcatattcatattcttactgagtgcccaccacagaatcgctcgaggaactctatcatatgctttctcaagatcaatgaataccataatataagcgtttgtatctttatccctatacggttccataaattgccttataatgaaaattgattatatttggccctgcataaagccaattatttatcagatacttcggtttctactaaaaaaaaatatgaagataaaaagaaatattattttttgaacatatttttgcgtacgttcttctaataattttggcaattcctttctgcattcttatttcctcgtttaatgcctggcggtaatttctggcacaaagctttatgttaatttttggggatgctattaaacatgtttgcgtcctcatgttagaagtccttatttctattatgtttccaaattagctttcttgagtatcgatgttgtaatctcttcatttttcggtttgttgcac

SEQ ID NO: 4358 - DNA, 5459 bp, Diabrotica virgifera
  SmartBlast Evalue=2E-42; Info=Mariner transposase n=1 Tax= Bombyx mori RepID=Q1HPJ3_BOMMO
accgatttttctgggaattgataaatcatgacatttgaataacttagccattttttgaaatgcagatctttctttctccatcctttatttgattacaagggacctcttttggctaaatgagtagatgttttggcacttaatagcagtatttcttaagttaaatcatctttaatttcatatataaaaaaagtacagcaagtataggtaattttttaagtacattttcaagttaaattatcaaatgagactatcgatagcagcttaatagatttaattttgtaaactatgtgattttatttgaaaatttaaaaataacaagtaaaataattcgttttagtatgtttcttaattaacgaataatatttttgatggcagatgcatacatgttcggatctctgaatgaaaaagagctacattgtaaaacgatttactatccttaacgtatccatgttaattttatgatgtagcggatatgtggtgttctcgtatttgtttatttatcacgaactgataatcttaagaattgccaattgtcttgttttcgcagtgttctggcaccgtttttgttttatattgtggtgtccagacggctgccgcatttgaacaggacaatgatcatcattttcacaataatatttagatcgcagggcaatggatcatagagtaatatcaggtttttacttcaattgatttggaatagaaacaaaaatggcttttgtagaagcttcagagtcattaacttctttattttttgggaataagccacaattataattaaaaaactccaaaattgctcttataatactgtttccaaaaaatatagtagttaatgaacaaattacacaagaaagtagctccagaactacttaatctgttagtttcccgcaaaaattcatcgggtcggagatatatcaacggaatatactatcaaagaataagcagggtgataaaacgtcaatgtacattcacacatacatacacacacacacagtataacccaacctgggaggcaagtaggactaacgaagattcgaacatttatgacttgtggcaaagaagggtagtatctgcgctttccctgccgattcatcgttttcagttctttttcctgattggtgtctcttgtgaaatatgtccgctacaaagttgggtacttctgatactgcttttaggctgtgttgagccgtttggatcttttttctgtttgttttacagttttggccctcgggctgctgacgcatatgttagattatcatcaccagcccattttaagtccactgtaagacataagcctctgctatttttatccagagatccatactgcacagtcttatgcagtattgatcccatgtttcgtcatctttcatagatcatcttgccaacgtgtatatggtcttcctctgtttcgtttgtctgatcttggcctcattcagttcatttgcgtgtccaccttccattcttcatccttgccagcctatctccatttcaatttgcaagttctttgtccaaaaaaaatctgcaactctagttctgttcggtaggtctttgtttatgatcttatcttttattgttatttctatcattggtgtgtttagtagtatttattttcggccagaattttttggtgatcaaaaaacacacttattaatgagttgaagtcattttttattgatatgaagatgaaccctcaagtaatgacaagtaataaattaaatttacaccaagaaaaaatcttactctttgagtagctacagaaagcactcggagaaaaataaaatggaagtgtaaaataatactaaagaacttattaaattagaatcggatatgggaaatttagaggtaataaatcagaatgttacattggttggtttttcaataactatgatgcctcgacctccccacaaaattgtcaattatacaataaggtaaagtagtatgcccacaaaacaataaggtaaagtagtaccaccctagaaactcccctaggcaaagaaataatagacctgtatctccaaaaggatatgatagtgatgaaagtggcacctcttattcttcaagagaaacaccactgattgaagaatttctgcttcagattaatcggtatgttgccgtcttcaaatacctttttaagagctccatatggagcccatcgatgttctattcttcttgatgcctcacctgtttgggtagtgttgatataataatgctgtttatcagtttttctttggttttaactgatagtttctttcttataattaatcatctgcatttggcttgaatgtttctttttcatagtggtagttagtaatgtcaaaccctgtctagcgttactcctagatatttagcttcgttggttcattcaatttaggaatcgaaaattaactggagatttctcttctaagaaccgtgtgatccaagttgaatattttccgtgtaatttctgattttctttttgccttacctacggtgcaaaattgctcacaagcaatcacgttactcatgtgcaatagttgtaatactcactcttgttcctcttaaggtctacatattatatcatcggttatcagcttgataatatgtaggcagtactttagataccatgaccagtcatcagccgaagggactatcttaaattatgtctttgaagaaaagattgtgtgtcgagtttaaatcggggaaaccccttgattattttccaaagatatcgcaagggatcattgtaatgtatttgttgtgtacaacgtaaaagtcacaacaaatagagttctttaatcgggtcttacaatgactttcgcgtaaatattatgtttgtaaaaaaaatgtaaattgttacgagtttaagatgatactctatgagaaattgccctgcacattagaaaccagtacggatgcaaaattccttcagattttcgccgttttataggttgtagccaaacaagcatgaaagttaaaaatagaatttgtatttttgtgataatttcttatctattttgtgtttgtttggttaccgttaaactagagaaaacttgtatatctgtactggttcccgaattatttctagatcaaaaatgtttgattatcttacgttttgtgcacacgattttctacgtttgtgcagattaagttcacattttcgtgttatccagcaaaattgttccatgtcgtatttattgattttatgctctttattcctccaataaaaatagtctttacatttgaagtatgcgttaaatcaatttcttattcaatgttactaaaataggatgcgattcaagaacaagaaaagttattgggagaaagaataattcaaggagtcaatactacaaaactatactacgtccattcacaagataagcccacacgctagtctcagacacgtgatccgtgggtgtggcgtgtcgtcacagcttttcattggctagaaattcatttcgaaccaatgacagaagctgtgaggacacgacacacccaccgatcaggcgtctgggcttatcttgataatgaacgtcatatatataaaatccccagtacacaacgcacctgagcccgcatttttccgaaccaaatgatatagaaacacagtttacacacaatagacaagtaattgttgctttaatggggaaaatgtccacaacaactaacatttgctattatcttctagaaaaacgaataactttcacgtacattttatattataatgaggccacgttttaaaatcacaaacattaagtgatagtgaagtgaatgtcgactcgattctagttttctgttaacccagatatgaaaatatcaaaaggcaccgctaggaaaatattccaaaaatgcggttcagagaacctatatgaaacgagtctttgtactctcatacagagtatggcattagtaaaaattttttactaaaagtcgttgggacttaggtcggggctatacggtggatggtttaacaattatatcttttgaagctccaaaaactattgtcttttgggcagtctgagcacttgcattgtcgtgtgggatgattcgccgttgtgtgttgctttttcggagtttcgcgataacttctggtaaacaaacggttatcttccaatcagaagtaaccgttcttcgatcatctaaagcaattgttgccacatgactagattttgacacaaacgttgcgaccattttctttgagacacttcgagaacggatcacttttgtttgttttcctcatcgtgaaacacccacacagcggattggcgtttattttccggttggtaggagtaaatccaagattcatggccactaacaatacctataaacgttttttgagcttcctttgttgaaccgttccaatgattttcgacaccaattgacgcgaagcgttttttgctcttctgtaagcaaatgatggatccaacggcaaaccaactttctaacacccagttcttcatgtgggatcttttggatcgaggtctttgaaatgcccaaagatgcgtctatctcccggtatgttacacggcggtcatccatgattagccgacgaaccgcatcaatgttttaggtggacgtggcctggattcgtcgctgagactggagcgaccacgttgaaattcgcaataccagcgtgaaatagttgaatggtatgggtatgatgcttcattcccaaacacagaaaccatttcagcgtgacattgctgttgggataatcctctccgaaaattgtaaaaaattattgctcgaaaatgttctccgccacgatccattttttgaccgacttgctaatttcaaaaattcactgtatctacacgacttgttgtacggcaatgaaactctcgatttatgtcaacaaaagattgaggttacgtttgtgtcggaaggttttattggtggcgccctctaagcggctatatgcaaaactaaaaatatgcagttagttgagatattggtagactggtgtagtaaaatcacaaattactcaatttcttattgccaatgcttgtagctgctgttattaattgaatatattgatttagcatagcgatttgataaaggttagttatttttgttggagtgagactgacgcaactagaaaaaatattgttgatcttgagataatcgttctaatcgttgaatgtaaaccatctatcataactctctattaattttaatataatttgtaaatgtaaagttgtgaaaaaataattctgtagctgcaacattcagtaactgccatggtaaatatttaactttcgaaattcagtgtaaaataaatgtgtgtaataatactactactactattacaacaatttgcaagtttagtttttatcattgttaattatgtattatcagtttctcattattttttagtagctttttaaaatagttatttcaggcgttggccggataatttaagttgataacaaaagttcagttccgcatttgtaatttctaatgttacagtggggaatcgcaggaat

SEQ ID NO: 4359 - DNA, 5052 bp, Diabrotica virgifera
  SmartBlast Evalue=6E-46; Info=Mariner transposase n=1 Tax= Bombyx mori RepID=Q1HPJ3_BOMMO
accgatttttctgggaattgataaatcatgacatttgaataacttagccattttttgaaatgcagatctttctttctccatcctttatttgattacaagggacctcttttggctaaatgagtagatgttttggcacttaatagcagtatttcttaagttaaatcatctttaatttcatatataaaaaaagtacagcaagtataggtaattttttaagtacattttcaagttaaattatcaaatgagactatcgatagcagcttaatagatttaattttgtaaactatgtgattttatttgaaaatttaaaaataacaagtaaaataattcgttttagtatgtttcttaattaacgaataatatttttgatggcagatgcatacatgttcggatctctgaatgaaaaagagctacattgtaaaacgatttactatccttaacgtatccatgttaattttatgatgtagcggatatgtggtgttctcgtatttgtttatttatcacgaactgataatcttaagaattgccaattgtcttgttttcgcagtgttctggcaccgtttttgttttatattgtggtgtccagacggctgccgcatttgaacaggacaatgatcatcattttcacaataatatttagatcgcagggcaatggatcatagagtaatatcaggtttttacttcaattgatttggaatagaaacaaaaatggcttttgtagaagcttcagagtcattaacttctttattttttgggaataagccacaattataattaaaaaactccaaaattgctcttataatactgtttccaaaaaatatagtagttaatgaacaaattacacaagaaagtagctccagaactacttaatctgttagtttcccgcaaaaattcatcgggtcggagatatatcaacggaatatactatcaaagaataagcagggtgataaaacgtcaatgtacattcacacatacatacacacacacacagtataacccaacctgggaggcaagtaggactaacgaagattcgaacatttatgacttgtggcaaagaagggtagtatctgcgctttccctgccgattcatcgttttcagttctttttcctgattggtgtctcttgtgaaatatgtccgctacaaagttgggtacttctgatactgcttttaggctgtgttgagccgtttggatcttttttctgtttgttttacagttttggccctcgggctgctgacgcatatgttagattatcatcaccagcccattttaagtccactgtaagacataagcctctgctatttttatccagagatccatactgcacagtcttatgcagtattgatcccatgtttcgtcatctttcatagatcatcttgccaacgtgtatatggtcttcctctgtttcgtttgtctgatcttggcctcattcagttcatttgcgtgtccaccttccattcttcatccttgccagcctatctccatttcaatttgcaagttctttgtccaaaaaaaatctgcaactctagttctgttcggtaggtctttgtttatgatcttatcttttattgttatttctatcattggtgtgtttagtagtatttattttcggccagaattttttggtgatcaaaaaacacacttattaatgagttgaagtcattttttattgatatgaagatgaaccctcaagtaatgacaagtaataaattaaatttacaccaagaaaaaatcttactctttgagtagctacagaaagcactcggagaaaaataaaatggaagtgtaaaataatactaaagaacttattaaattagaatcggatatgggaaatttagaggtaataaatcagaatgttacattggttggtttttcaataactatgatgcctcgacctccccacaaaattgtcaattatacaataaggtaaagtagtatgcccacaaaacaataaggtaaagtagtaccaccctagaaactcccctaggcaaagaaataatagacctgtatctccaaaaggatatgatagtgatgaaagtggcacctcttattcttcaagagaaacaccactgattgaagaatttctgcttcagattaatcggtatgttgccgtcttcaaatacctttttaagagctccatatggagcccatcgatgttctattcttcttgatgcctcacctgtttgggtagtgttgatataataatgctgtttatcagtttttctttggttttaactgatagtttctttcttataattaatcatctgcatttggcttgaatgtttctttttcatagtggtagttagtaatgtcaaaccctgtctagcgttactcctagatatttagcttcgttggttcattcaatttaggaatcgaaaattaactggagatttctcttctaagaaccgtgtgatccaagttgaatattttccgtgtaatttctgattttctttttgccttacctacggtgcaaaattgctcacaagcaatcacgttactcatgtgcaatagttgtaatactcactcttgttcctcttaaggtctacatattatatcatcggttatcagcttgataatatgtaggcagtactttagataccatgaccagtcatcagccgaagggactatcttaaattatgtctttgaagaaaagattgtgtgtcgagtttaaatcggggaaaccccttgattattttccaaagatatcgcaagggatcattgtaatgtatttgttgtgtacaacgtaaaagtcacaacaaatagagttctttaatcgggtcttacaatgactttcgcgtaaatattatgtttgtaaaaaaaatgtaaattgttacgagtttaagatgatactctatgagaaattgccctgcacattagaaaccagtacggatgcaaaattccttcagattttcgccgttttataggttgtagccaaacaagcatgaaagttaaaaatagaatttgtatttttgtgataatttcttatctattttgtgtttgtttggttaccgttaaactagagaaaacttgtatatctgtactggttcccgaattatttctagatcaaaaatgtttgattatcttacgttttgtgcacacgattttctacgtttgtgcagattaagttcacattttcgtgttatccagcaaaattgttccatgtcgtatttattgattttatgctctttattcctccaataaaaatagtctttacatttgaagtatgcgttaaatcaatttcttattcaatgttactaaaataggatgcgattcaagaacaagaaaagttattgggagaaagaataattcaaggagtcaatactacaaaactatactacgtccattcacaagataagcccacacgctagtctcagacacgtgatccgtgggtgtggcgtgtcgtcacagcttttcattggctagaaattcatttcgaaccaatgacagaagctgtgaggacacgacacacccaccgatcaggcgtctgggcttatcttgataatgaacgtcatatatataaaatccccagtacacaacgcacctgagcccgcatttttccgaaccaaatgatatagaaacacagtttacacacaatagacaagtaattgttgctttaatggggaaaatgtccacaacaactaacatttgctattatcttctagaaaaacgaataactttcacgtacattttatattataatgaggccacgttttaaaatcacaaacattaagtgatagtgaagtgaatgtcgactcgattctagttttctgttaacccagatatgaaaatatcaaaaggcaccgctaggaaaatattccaaaaatgcggttcagagaacctatatgaaacgagtctttgtactctcatacagagtatggcattagtaaaaattttttactaaaagtcgttgggacttaggtcggggctatacggtggatggtttaacaattatatcttttgaagctccaaaaactattgtcttttgggcagtctgagcacttgcattgtcgtgtgggatgattcgccgttgtgtgttgctttttcggagtttcgcgataacttctggtaaacaaacggttatcttccaatcagaagtaaccgttcttcgatcatctaaagcaattgttgccacatgactagattttgacacaaacgttgcgaccattttctttgagacacttcgagaacggatcacttttgtttggttttcctcatcgtgaaacacccacacagcggattggcgtttattttccggttggtaggagtaaatccaagattcatggccactaacaatacctataaacgttttttgagcttcctttgttgaaccaatcccattttttcgacaccaattgacgcgacctctttttgctcttctgtgagcaaatgagggatccaacgggaaaccaacttcataacacccagttcttcatgcaggatattttggatcgaggtctttgaaatgcccaaagatgcctctatctcccggtatattacacggcggccatctttaattatgtgtcattttcgaccatgttgggtacaattctttgtagttttgaaacttgttgtttctaaggaaaccgtctatgacttctacgaaagaacttcatggttcagatagatcctggctcattgcattcttaaacattgtcaaacttagcaaaattcaaatgaggtaagtggcttgaaactgatccaaggccgggatcctttagttcatttattattttgttatatgtgttgatttgatgaatgtttatctcaaaaaatcgtagtcttgcgatgtactttgcgacttactttcagaccaatcaaagcttgtgttcagttttgtttcttcacatactactataataaaattgttggtatgcattatggggtttattaaattaacggaaacaacaactttggtatagctttaaaaatacaatcttcaaaattcaacttcaaactttgtgagcaaacatatattatactttagtaagtttaggtctttcttagtgttcaaaatatcttgtttctgtcaacatatttattaacttgagagaat

SEQ ID NO: 4360 - DNA, 6962 bp, Diabrotica virgifera
  SmartBlast Evalue=1E-100; Info=Ras-related protein Rac1 n=24 Tax=Metazoa RepID=RAC1_DROME
taggcgcagttttcatcgtaggtttgtgtgtggtcgtgtttaggaattcttataaaggagtcattgtctgattagatttgtttaatcctagcaaatcgaagaataacatgaggctgtgatgcttaccaagaacagctaagaaaccgagctttttatgtatcgagctgcatcaaggaaagacgttggaaggtgctctaatatttgacacatcacacacccagatataacattgctttaattaatatatccttaattgatataaatattcgttatcgactaagataacgaaatgcaggccatcaagtgtgtggtggtaggcgatggtgccgttggtaaaacatgtcttttaatcagttacacgaccaacgcgtttccaggcgaatacatcccgacggtgttcgacaactactcagccaatgttatggtcgatggaaaacctatcaatctaggtctatgggatacagcaggtcaagaagattacgacagactgcggcctctatcctaccctcaaaccgacgtatttttaatatgcttctctcttgtcaatccggcttctttcgagaacgttagagccaagtggtatccagaagtacgacaccactgccctaatacgcctattatcttagttggcacaaaactggatttgcgagatgatcgagttactatcgaaaagttgaaggataaaaaactgtcacctataacatatccacaaggtttggcgatggcgaaagaaatcagtgctgtaaaatatcttgaatgttcagctttaacgcaaaaaggtctaaagacagtattcgacgaagccattcgagcggtactctgcccagtaatgcaggtgaaacaaaaacgtaaatgttcaatcttgtaattataacaaaatatataaatattaagcaaaaaagtgaaaactaaaaaattgttgtgttaattttgaaccgcgttgcattggaaaaatgttggaatatagtaaataacagttttttacatgtgtttttgtacttacatttcaaaaacagaatgacaatgggttcaaaattatttaaaaaaaattgtataccgcaaaactttttggatttcatttctgtgaaaggaaactaacctagaacagtcaaaatatagtgttactcgatggattcgaacattattttgtaactaaaacaccgaaaactgccgttttctaagtgttcacaaagtttagttaacgataagcattcatcggatgaaatttttacgtcgggcaaacagagcgatcatttaaacaacgcatacaagagcacaagagttcattatcacacaaatccacttcagcacttcacgttatagactacaaatttagaaaacagtggtttttggtgttttatttatatacatacgtggtggaaaattaattgcgtgtaaaaaatccacttgtagatttcacagaaaaatcttcaaagctttgtagcatattccaaaagcacaaaataaaataagaaccgtgcgtatatgtgattatttgtttttttgaatgatttttaagtatattgcgaagttgtttataattctttcttgcatttatcggtctgtccgctctaactgtctcctcgttctcttaaagcacactttagatagttttattgatcgcttacattacaaaactacattgattatttgtttaattttatgctctcatggtcgtgcagcgctcctaatacttgaaactatatagggattcgtttaacaatagaggtaccaagatcttaaaagtcaaatttgaatgacgaaaactttaaatgaccccatacaggactcataacctaacgttttacaggcccctcagttgttttccacaaatctttttgtaagaaatcatttttacattaaaaatgctttgaatattaccaagttttaccagtcctggcaaaaaatattttcgctttttttctgactaacattctgaagttgtttaggtgatttagtaacgttaaattgtgtatgaacgtgaaatgaagctattatttcattaaaaatgttttatttcgagtaatttggctcagaataacctcaagaagcacacataacctaatataacctaactttttatgacttccagttgtttcaaattttaaatgacgtcatacagtacacataagctatagttcgtccgctataacttttcccatgcgtcgcgattgttttcgaacaattaagtcaaaacatggagtgaaacgaacgtcgatgtgtattatactgtatactttatactacacacattggcgtacgtttcactttgtgttttgacctaatttgtttgaaaatggatcgtgacgcatgggagagttatagcggacgaacaataccattttacaagtcctttcacatgttttaattaaaacgcagaattgtttcattaaaacatgtggcatatatctacgcaagaatctcttgttattttggcgaggatgtataaaatatattgaccgggctgtcattacttacctaactttttactcaaacctatcataactttttacgatcttcatgtgtgaatacatttttggactttgtgagtgatagttgccacattttaaaagatcgaatttgtctagaaaatattttgtaatagttacatgatttttttccttaattcgtcatccaatatagattctcttcatgtacagcaaaaccttataaataaaatccttattggatgacctcgaaattagtaaactagttaaaaaaggaaaacgaggagacaaaaaatcgtgtcagacttcatatatatatctaattctttagtggatattgataatgacgtcaatatataagaaaaataagattgttaacttgcctggctaaattttaggtaaagaggaaaatgtgttcaataaacttatgagcctacaggagtatacagccagaaaatattttttgttcgaatgaaaaatggtttttggttaaatttttaatagtacagttatttgcagtgactttattcaatggaaatcccatgcaaatatgatttactgggacaaggaaccacggaagaccttatttgtcgcaatttttctcatttatgaagtatttaagggtgccccaggtttgtgcaataaattaagccaacaggatagttttttgttttgctagatacattgtggccatctttttggtgtacttaattgatatttctgtatattacagaattaaagatcgcggaatgggacatctgggcgtcttcggcggggtcatttgggcgtcgccgtttgggcgtcgatccaagtggacgtcagtcgtttcgccgtcggaattaattggtcacgttataggttgcttctgttagttcaatattaaatagttggctctaaattttacgtttctaaatctagggttactgatgttgccattgttactttaaaacacgcgcgttttagaaaacggcattgtttaaataaacaaaatatagtaccactataaaacatattttatttgtaaatacagtattacacgtattactcaatattatgtgttacgctctgagctcgtaggtagaggggataattaaaaattcgcaagcgccagtagtgacaagtcagtgaactttaactggaaattttttttaaaaggccgaaagttccttagaataaacaaaaagtttcttttgaacgagatatttaatattaaaaatcacactctctttttttcaccccccgtaactgattaaaataaacagacattttcagggacaatgcatttaaaaagagttggtgcgaaattttacgtttaccctcgtatttaattatttaagtgcaataaatgcataatttaatatttaagaagtattatactacaactgtaataaattattatacttttttgcagattaaattttttctaatattatctgtcaacataaacttcaaaacgataagcaaaatcttaaaaataatcataatgaataataaattctgtacttactgattgatattaactatcgattacattccaattacttctttacgttgtaaatattacacgataagaattaaataataagtttgaaaccattattatttgcttttctcctttcctctttaaatttctagccgaaacagtaagtcattcgctagatggcgataccagccataccagcgaaactcacagaggataggcaacacttctctttccagcgaaattttcattttggtttgagaaatcagtatatccaaacagcaatgaaatgtattaaccctgaagtacgattccaggtctgaaatcctctcatcttctaatgactcaacaaaaaatcgcgtgttttaaagtgaccatggcaacatcaataaccttagaaacgtaaagtcttggagtcaactttttgattgttgaactgacagaagtgacctataaagttaccaattaattccgacgccgaaatatctgacgccgaaacggcgacgcccaaatgtcctagttcctaaagatcagtgggtagcggaatctaccggagataggaataaatgtgttgatactatgcaatagtaatctagagaccctttaatgattagatgtgcagtttcagatataccctcagaagtctacgaaaagtcttacaaaccaaaaaccatttttctataacattagattattctcggaataaagtttcaggttttatgtagagtattagacaatttttattaatgtaaatattaaaatgaggcactacttacagcatatacagtcatactattggaaaaatgttcagacttgggccgtaaaccaaaaactaacagcaatgccacattcactggatttactggtcatgacgatgacttggcaacatgtaatctcttaatgttcgatagataaatactcctgcaacttcattctgataattttagtgaaatctatttgatctggcttaataaaaagttagaccaccactataacaaatttagaggttctctttatttctttaggcctgcgttatttatttttttaaaggatagagaatgccaatttgtgagattatttcttgcagctatattttatgagatttttacgtggcgtttttctatttacagtatgtgaatgtgtcaaagtaactgtgtttttcaaaaattaacaaaagaaattcaaaatgtacaagtggacaaaaaatattaaacaaatgtatatagtgtatctatttctaatcgaatcaacaaaatatgatcttactgaacagaatatgatgcaacctaatattaaatgcaactcgtatgttttattatatcctaaaccaaagacttattcatcttgaaggtgactgtgtgccgtcatctcttttattgagacaattaggacgtttttcgttctcagcggcttctcggaaatccctggcttacagaaacggatggtgactatagtcacggaactgtcaaaattaattttgtatcttatatgaagcctcaaacgttttggaaatatttcttctctttatcaggaactggaaagaagtatatgccctcagtttgttatctttctctagatgatgggaggaaaaatttttaaaatacctgtttgtcagagttttattactattaagaagaattcttcatcttaaaggtaaccgggtgtcgtcatcacttttattgacacaattaggacgttttttgatctcaatggcttttggtgtggacaatagttatagaactttcaaaaccaattttgtgtcctgtctagatcatcaaacggttttgagaagatttcttcccttcatatggagctggaaagaagtatttgacacctgttagttatctttctctagattatggaaagaaaatctttttgaaagctatacagaagtcttaaaatacctgtttgtcagagttttatccacctgttagttatctttctgtagatgatgggaagaaaatatttttgaaagctatacagattcttaaaatacctctttcttcagtgttttattgcgattaagaagtcttcttcatcttaaagtaactgggtgtcgtcatcacttttattgacacaattaggacgttttttgatctcaatggcttttcacaaatgcttggtttacagtgacaggtggggacaacagttatagaactttcaaaaccaattttgtgtcctgtataaatcatcaaacgtttttgagaagatttcttctcttcatctggagctggaaagaagtatatgacgccagttagttatctttctctagatgatgagaaaaaatattttagaagggggtatatattcttagaaaacctgtttttattcctgccaaatgtctatcagctagttgttaaaagaaaacggttatgtggctgttcttcttgtagtgactatccgtttcggatgttggcgaccatcatggcaatctatactttgcatactgctgctctaaaaatgtggctgtgcagcctatatttgattagctaggagtagataaactctacatattttttgcactacgtaccaattcttcgtttatttggaaatctcttagtgaatatcatgtagaagagatacgtgtgttatataaaacgataaaatgacattccaattccaaaaataagggattgaggagaagaaaaatagaatcttagtgaaatagaattaatggacttaaaaatgcacttgtttgacaggtataataaatgatattgaagaaaattagaaagaattacttaaaaatataacaaagatgtcttaaatggtagaggatagtgtaaggtttagtaattagtgataaaatagatggatacaacacagtagacttcaaattttgaacgtatgttgccaaatttatgccaattaggaaaatacaaatgccactattgggaatagtaacaacagtattgtagtgccctttcaggacactttattaatagattaataccataagaagcatcacattcgagcaattgaagtgatgtagacgttgcatagcatagaaaaataaaaaaaaatggcgttctcta

SEQ ID NO: 4361 - DNA, 3440 bp, Diabrotica virgifera
gctggaagatccggcactggcgaagctggatgatccggacgggacacatccattgcacactctaactcatctttatcggggggttgtccacccccgctattaacgctcatgatttaaaaaccacttagatttcacttttttaatatcgatatgtgtactttaatatgaataactagttttttaattacgaggtgaaaacaccgatttctttaattagattttaagtatcgcacgtcttatcaatttgaggaaccgaaacagacccaataaatgcataatttaatatttaagaagtattatactacaactgtaataaattattatacttttttgcagattaaattttttctaatattatctgtcaacataaacttcaaaacgataagcaaaatcttaaaaataatcataatgaataataaattctgtacttactgattgatattaactatcgattacattccaattacttctttacgttgtaaatattacacgataagaattaaataataagtttgaaaccattattatttgcttttctcctttcctctttaaatttctagccgaaacagtaagtcattcgctagatggcgataccagccataccagcgaaactcacagaggataggcaacacttctctttccagcgaaattttcattttggtttgagaaatcagtatatccaaacagcaatgaaatgtattaaccctgaagtacgattccaggtctgaaatcctctcatcttctaatgactcaacaaaaaatcgcgtgttttaaagtgaccatggcaacatcaataaccttagaaacgtaaagtcttggagtcaactttttgattgttgaactgacagaagtgacctataaagttaccaattaattccgacgccgaaatatctgacgccgaaacggcgacgcccaaatgtcctagttcctaaagatcagtgggtagcggaatctaccggagataggaataaatgtgttgatactatgcaatagtaatctagagaccctttaatgattagatgtgcagtttcagatataccctcagaagtctacgaaaagtcttacaaaccaaaaaccatttttctataacattagattattctcggaataaagtttcaggttttatgtagagtattagacaatttttattaatgtaaatattaaaatgaggcactacttacagcatatacagtcatactattggaaaaatgttcagacttgggccgtaaaccaaaaactaacagcaatgccacattcactggatttactggtcatgacgatgacttggcaacatgtaatctcttaatgttcgatagataaatactcctgcaacttcattctgataattttagtgaaatctatttgatctggcttaataaaaagttagaccaccactataacaaatttagaggttctctttatttctttaggcctgcgttatttatttttttaaaggatagagaatgccaatttgtgagattatttcttgcagctatattttatgagatttttacgtggcgtttttctatttacagtatgtgaatgtgtcaaagtaactgtgtttttcaaaaattaacaaaagaaattcaaaatgtacaagtggacaaaaaatattaaacaaatgtatatagtgtatctatttctaatcgaatcaacaaaatatgatcttactgaacagaatatgatgcaacctaatattaaatgcaactcgtatgttttattatatcctaaaccaaagacttattcatcttgaaggtgactgtgtgccgtcatctcttttattgagacaattaggacgtttttcgttctcagcggcttctcggaaatccctggcttacagaaacggatggtgactatagtcacggaactgtcaaaattaattttgtatcttatatgaagcctcaaacgttttggaaatatttcttctctttatcaggaactggaaagaagtatatgccctcagtttgttatctttctctagatgatgggaggaaaaatttttaaaatacctgtttgtcagagttttattactattaagaagaattcttcatcttaaaggtaaccgggtgtcgtcatcacttttattgacacaattaggacgttttttgatctcaatggcttttggtgtggacaatagttatagaactttcaaaaccaattttgtgtcctgtctagatcatcaaacggttttgagaagatttcttcccttcatatggagctggaaagaagtatttgacacctgttagttatctttctctagattatggaaagaaaatctttttgaaagctatacagaagtcttaaaatacctgtttgtcagagttttatccacctgttagttatctttctgtagatgatgggaagaaaatatttttgaaagctatacagattcttaaaatacctctttcttcagtgttttattgcgattaagaagtcttcttcatcttaaagtaactgggtgtcgtcatcacttttattgacacaattaggacgttttttgatctcaatggcttttcacaaatgcttggtttacagtgacaggtggggacaacagttatagaactttcaaaaccaattttgtgtcctgtataaatcatcaaacgtttttgagaagatttcttctcttcatctggagctggaaagaagtatatgacgccagttagttatctttctctagatgatgagaaaaaatattttagaagggggtatatattcttagaaaacctgtttttattcctgccaaatgtctatcagctagttgttaaaagaaaacggttatgtggctgttcttcttgtagtgactatccgtttcggatgttggcgaccatcatggcaatctatactttgcatactgctgctctaaaaatgtggctgtgcagcctatatttgattagctaggagtagataaactctacatattttttgcactacgtaccaattcttcgtttatttggaaatctcttagtgaatatcatgtagaagagatacgtgtgttatataaaacgataaaatgacattccaattccaaaaataagggattgaggagaagaaaaatagaatcttagtgaaatagaattaatggacttaaaaatgcacttgtttgacaggtataataaatgatattgaagaaaattagaaagaattacttaaaaatataacaaagatgtcttaaatggtagaggatagtgtaaggtttagtaattagtgataaaatagatggatacaacacagtagacttcaaattttgaacgtatgttgccaaatttatgccaattaggaaaatacaaatgccactattgggaatagtaacaacagtattgtagtgccctttcaggacactttattaatagattaataccataagaagcatcacattcgagcaattgaagtgatgtagacgttgcatagcatagaaaaataaaaaaaaatggcgttctcta

SEQ ID NO: 4362 - DNA, 4956 bp, Diabrotica virgifera
  SmartBlast Evalue=3E-95; Info="KH domain-containing protein C56G2.1, putative n=1 Tax=Pediculus humanus corporis RepID= E0VIT8_PEDHC"
tgaccgcatagacacgttgctgttgtgtgttgcgtattaaaaattaaaacataaggatcagaaacggattttcgttgttgacaacttggcagtggtccaccctttgaggaatcgtagtttcgagtgtgtatgtgtgttcacggactatttatttttggatgtttgttgaattctatgatgggtcgtgtcgttcttgaagaaaataatcgtggatcgatcaagttatggccccaccccattctcgtcatttactagcgtggacattgccaactgcagtcgttttactcagctatttgtggtacaaaaggaagagaattggagctcgaagtgacccaggcgataataaatcacctacacataaagaagaagtgttcacagataaatctctagaagaagaattgaaagaagccgacgagcacgactcttctcaatcttcgccgaacaaaacgttttcgagatcactctccggggtagaatcgactcctatagatataatcataccgcccgagttaagggctacgaagtctactccacgtatcgtctcggacgaagatctcgatttggaaatcgagaagatcaagtcgatgaagaacggtgcactgtttcccgctaaactagactcaccagtgaccaacaaatccaaatcgtccacctacagagacaacaaagaaagcaaacccaagtcgaaaaagaaccagaagaaagaagcaggaaagatggcccaaaaggatatcgctatcgtcgaagagaaattgacttctctgaaaattagtaaaaataaagaaactcccaaaaagagggagcataaacatagtagtagtaaaaaagatacggaagaactgcaacgacagaacagtgaaagagactcagctaaccacagtccctccgatgtgatgttggctagcccttcattgagcagtatttcagacaaccacagtgagggctccagtgatagcggcaaaggaggcagcgacgttgcgactccccccgcatcccgtaccccaggaattgacgtgtccagcaacgtacgaaccctctacgagttcgtcattccccaatccctcgtaggaaaattaataggcagacacggctgtttcgtcacgcaaatcaaggacaaaaccaacgccttaatcatcgtcagagcgcatcccaccaacaacaaaatgaagctttgtttggtggaaggtacgcgaacggaaatagacggtgccctgaagatggtcagagataagttccccgccaaaaggtatccggaaatcactttggaagaagtccatttggttccagaagtacccacagtgtcgttaatttctgatcatttatacctaaaattggtggaaggcgtcaacaatgacaccgtcctcagctgtctcgtcgcccccaaccacctcttcctccaacaaccgactcatccctcgtatcccagcctgaacctactcaccaattgtatgaacgcctgttacacccaatcggaatcccccttactccccacccccataccagaaaacacgatctgtgccgcattctcagtcaacgcctggtacagggcgatggtactgtcatcggacgatgaatcttcctatgtcaaattcttggactacggaggattcgcatatgtagataattcccagctaagacagatcagaggtgacttcatgttgttacctttccaggcagccgaatgtatgctagctaatattaaatctgtaaatgaggacgggtcctggcctgaagaagcatataatctaatagcagatgttgcaaaaggatcgataatgtatacgcaagtagcagattataccgaagacggacttccattggtattgatctatgcagtcataggaagccagggtgtagtattcctaaaccagcacttggtagataacggttacgccgtatggttacaacagaccgacactcagacccatcgccaggaaatcacagaaggagccgtaggcggcataacggcatgattcgtcgtgccaccctttcgtttttacccacaatgggtctgttttagtcacttggttattcactaatcaagcactcgttatatatatatttttttcttgtcgcaagtttgttctttagtcaccgaaaatatttttatatatagttctcgaaaacattttttaaataatcgactttaactatctggtatcgataatttagttacatatttagagcagagaaaacactaaaatgaaatcaaaaagtgattttattatactaacatacaagataggcaactttaattgtttaacattttgctacaaaaagggtacacataatttattgtggttatcaaaaaactttgcatgctgttataaaatacgtaggcaccaccaattttgacgtgagaaatttaaagatataacaaaccatgaattaagtgattaacacgttcactgccacgttggtcctgcaggaccagcattgatgctgcctcaacaggctacattcgcccgatagggccaacatctttgacggagaattccccaaaattctgagctgttttaagaagttcacttagagacaaagctgtcttatagaatacataacatcattaacagaagttaataagcattcacttctttgactcctttctcaacgatttcaagcagatgaaagaaataaatataagcacttcgtttagttcttcaattgttcaatctcagaaacaagacaatcaaaagccgactttgaaataacttccaataacagcagtacccaaaattttaacaggacagcctctcttaaagaatatactaccgacatggcacaaatagtcacttttcaaactattccagaacaaactgccattactgaaactgtaatctctacatcgcccgtacttcttagcattcctcgcccacaaatagtacaagggtccaatactttgattattttaagtcctgctccatctgcacaaaatgttttagtctctgctccaactctgaaaactgtcaatttgcctccacctttagttactgcaaatgtaactccagtacagcgatgcacctacagtgggattggcaaacataccatccccaactattatacagattcaaggtgaactcaacctgaacttttaaattctctaaacttaccccaggcagaaactattccagtttaaaccactccaacttcagctatccacaaactgattgtgttgacagttgacatattagatataggttatgttatgtggcaccggaccaatggcgcacgtaaataataacttatctcactgggccgcactgccccaatggtaccaacgtttttatatcacggctcactagtgctcaatgtaaaagatatgtttggcgtacttttgaataacatgatcgaagaggataagcaaaggatgaattaaagaaaggtaatatttaccaaccagatccttccgattccagacaatcttcaaaaggggcaagtatcaatgtaaggacatatattaaaaaatatgtctggcaacgaacgtgttaaataaggttatgtgttaaaaatattaagaataataaaaaatattttaagtaatccttaaattcttgttcaaacactaatgctttagcaattttaatattcgaaatttcagaaatactaaaaagttgtcaaaaatgtcatttgtatgattttcagtgtcattgtcaaatgtcattttcaaatggcaaatgtcatttttacgatttaaaactttgactactctttatatattaaaattatttaacaaaacgcatagaaagaaattaagaaattgtgattaaagaacaaacttcaaacaattgatgttaatctttatattgtgaattaattgatagtgcagttagctgtagctgttttatcgacgcgatgatttttgtcccgcttttataagaaaaactgatttatattgttaactagatgatttaatattttatgtactattttaaggttagtttgcacgactgtcaaatatagaatatatcctgacattcaagttttacttgctttctttaggttggtagtcgctataggggcgtaatttttgttgtactattactataggttggcgaaactgcactttgtaaagattgcaattgtgattttcattttttttttcatcaaatatctcattcgaaacaaaacaggtaaagtatgtgttgtaatttgtgtttggtgtcacattatgaagtaaattcagaaaattttcaatcaaaaatatcgtacgcagaaatgctatttctgggatataatctaacttaatctagttaaatgagattaaaatagataatattagtgtatcagtagaaaatactaacgttggcaatctctacgttgagaaataagaagaaagtctagtatatgtgacactaagagctgacatctagtgactagttgcggcttcctaatgtgattctaaatatacacttctctaactttataattatcctatataaattatgtaaatatctacaggcggactgtaaactagtttatatttaatttatttttttcttatttcaaattatagtgctaatggactaaaatattttactgctcatcactattactggatctatgtatttctaaatgccatattgtggtccttcgaaccggatcaacgtttaacgttaaatgaggtttgctacaatgtatctgtacattaaacctgagccctatagttgctttgtttcatcatgctctattctgatttcacggaaacatgagaaactaatgtacttacttatagcttaacactataatggaaagatgttaccaataatataatctcaatatatattttatagcgaattagacggcttaaatttttactctgctccaatttttttttcctttactatcgacctctatatatccaaatcttttctatccttccttcacatcattgtcctactaacaatgaaaataaaaattggttcgcctttcactatataatattaaaaagattcgttt

SEQ ID NO: 4363 - DNA, 4951 bp, Diabrotica virgifera
  SmartBlast Evalue=3E-95; Info="KH domain-containing protein C56G2.1, putative n=1 Tax=Pediculus humanus corporis RepID= E0VIT8_PEDHC"
gggacgccaccattatagacgttttgtagtcaacattttgagcacgtggaaaatttcctctgcttaaatcttgtttttattattattgaactgctattatcgtgaattttgtgtgacaactattgcccagtgctttcctgattctgttacagctgaattggagaagcaacaaactggtcgtgtcgttcttgaagaaaataatcgtggatcgatcaagttatggccccaccccattctcgtcatttactagcgtggacattgccaactgcagtcgttttactcagctatttgtggtacaaaaggaagagaattggagctcgaagtgacccaggcgataataaatcacctacacataaagaagaagtgttcacagataaatctctagaagaagaattgaaagaagccgacgagcacgactcttctcaatcttcgccgaacaaaacgttttcgagatcactctccggggtagaatcgactcctatagatataatcataccgcccgagttaagggctacgaagtctactccacgtatcgtctcggacgaagatctcgatttggaaatcgagaagatcaagtcgatgaagaacggtgcactgtttcccgctaaactagactcaccagtgaccaacaaatccaaatcgtccacctacagagacaacaaagaaagcaaacccaagtcgaaaaagaaccagaagaaagaagcaggaaagatggcccaaaaggatatcgctatcgtcgaagagaaattgacttctctgaaaattagtaaaaataaagaaactcccaaaaagagggagcataaacatagtagtagtaaaaaagatacggaagaactgcaacgacagaacagtgaaagagactcagctaaccacagtccctccgatgtgatgttggctagcccttcattgagcagtatttcagacaaccacagtgagggctccagtgatagcggcaaaggaggcagcgacgttgcgactccccccgcatcccgtaccccaggaattgacgtgtccagcaacgtacgaaccctctacgagttcgtcattccccaatccctcgtaggaaaattaataggcagacacggctgtttcgtcacgcaaatcaaggacaaaaccaacgccttaatcatcgtcagagcgcatcccaccaacaacaaaatgaagctttgtttggtggaaggtacgcgaacggaaatagacggtgccctgaagatggtcagagataagttccccgccaaaaggtatccggaaatcactttggaagaagtccatttggttccagaagtacccacagtgtcgttaatttctgatcatttatacctaaaattggtggaaggcgtcaacaatgacaccgtcctcagctgtctcgtcgcccccaaccacctcttcctccaacaaccgactcatccctcgtatcccagcctgaacctactcaccaattgtatgaacgcctgttacacccaatcggaatcccccttactccccacccccataccagaaaacacgatctgtgccgcattctcagtcaacgcctggtacagggcgatggtactgtcatcggacgatgaatcttcctatgtcaaattcttggactacggaggattcgcatatgtagataattcccagctaagacagatcagaggtgacttcatgttgttacctttccaggcagccgaatgtatgctagctaatattaaatctgtaaatgaggacgggtcctggcctgaagaagcatataatctaatagcagatgttgcaaaaggatcgataatgtatacgcaagtagcagattataccgaagacggacttccattggtattgatctatgcagtcataggaagccagggtgtagtattcctaaaccagcacttggtagataacggttacgccgtatggttacaacagaccgacactcagacccatcgccaggaaatcacagaaggagccgtaggcggcataacggcatgattcgtcgtgccaccctttcgtttttacccacaatgggtctgttttagtcacttggttattcactaatcaagcactcgttatatatatatttttttcttgtcgcaagtttgttctttagtcaccgaaaatatttttatatatagttctcgaaaacattttttaaataatcgactttaactatctggtatcgataatttagttacatatttagagcagagaaaacactaaaatgaaatcaaaaagtgattttattatactaacatacaagataggcaactttaattgtttaacattttgctacaaaaagggtacacataatttattgtggttatcaaaaaactttgcatgctgttataaaatacgtaggcaccaccaattttgacgtgagaaatttaaagatataacaaaccatgaattaagtgattaacacgttcactgccacgttggtcctgcaggaccagcattgatgctgcctcaacaggctacattcgcccgatagggccaacatctttgacggagaattccccaaaattctgagctgttttaagaagttcacttagagacaaagctgtcttatagaatacataacatcattaacagaagttaataagcattcacttctttgactcctttctcaacgatttcaagcagatgaaagaaataaatataagcacttcgtttagttcttcaattgttcaatctcagaaacaagacaatcaaaagccgactttgaaataacttccaataacagcagtacccaaaattttaacaggacagcctctcttaaagaatatactaccgacatggcacaaatagtcacttttcaaactattccagaacaaactgccattactgaaactgtaatctctacatcgcccgtacttcttagcattcctcgcccacaaatagtacaagggtccaatactttgattattttaagtcctgctccatctgcacaaaatgttttagtctctgctccaactctgaaaactgtcaatttgcctccacctttagttactgcaaatgtaactccagtacagcgatgcacctacagtgggattggcaaacataccatccccaactattatacagattcaaggtgaactcaacctgaacttttaaattctctaaacttaccccaggcagaaactattccagtttaaaccactccaacttcagctatccacaaactgattgtgttgacagttgacatattagatataggttatgttatgtggcaccggaccaatggcgcacgtaaataataacttatctcactgggccgcactgccccaatggtaccaacgtttttatatcacggctcactagtgctcaatgtaaaagatatgtttggcgtacttttgaataacatgatcgaagaggataagcaaaggatgaattaaagaaaggtaatatttaccaaccagatccttccgattccagacaatcttcaaaaggggcaagtatcaatgtaaggacatatattaaaaaatatgtctggcaacgaacgtgttaaataaggttatgtgttaaaaatattaagaataataaaaaatattttaagtaatccttaaattcttgttcaaacactaatgctttagcaattttaatattcgaaatttcagaaatactaaaaagttgtcaaaaatgtcatttgtatgattttcagtgtcattgtcaaatgtcattttcaaatggcaaatgtcatttttacgatttaaaactttgactactctttatatattaaaattatttaacaaaacgcatagaaagaaattaagaaattgtgattaaagaacaaacttcaaacaattgatgttaatctttatattgtgaattaattgatagtgcagttagctgtagctgttttatcgacgcgatgatttttgtcccgcttttataagaaaaactgatttatattgttaactagatgatttaatattttatgtactattttaaggttagtttgcacgactgtcaaatatagaatatatcctgacattcaagttttacttgctttctttaggttggtagtcgctataggggcgtaatttttgttgtactattactataggttggcgaaactgcactttgtaaagattgcaattgtgattttcattttttttttcatcaaatatctcattcgaaacaaaacaggtaaagtatgtgttgtaatttgtgtttggtgtcacattatgaagtaaattcagaaaattttcaatcaaaaatatcgtacgcagaaatgctatttctgggatataatctaacttaatctagttaaatgagattaaaatagataatattagtgtatcagtagaaaatactaacgttggcaatctctacgttgagaaataagaagaaagtctagtatatgtgacactaagagctgacatctagtgactagttgcggcttcctaatgtgattctaaatatacacttctctaactttataattatcctatataaattatgtaaatatctacaggcggactgtaaactagtttatatttaatttatttttttcttatttcaaattatagtgctaatggactaaaatattttactgctcatcactattactggatctatgtatttctaaatgccatattgtggtccttcgaaccggatcaacgtttaacgttaaatgaggtttgctacaatgtatctgtacattaaacctgagccctatagttgctttgtttcatcatgctctattctgatttcacggaaacatgagaaactaatgtacttacttatagcttaacactataatggaaagatgttaccaataatataatctcaatatatattttatagcgaattagacggcttaaatttttactctgctccaatttttttttcctttactatcgacctctatatatccaaatcttttctatccttccttcacatcattgtcctactaacaatgaaaataaaaattggttcgcctttcactatataatattaaaaagattcgttt

SEQ ID NO: 4364 - DNA, 4977 bp, Diabrotica virgifera
  SmartBlast Evalue=0; Info=Staufen n=1 Tax=Tribolium castaneum RepID=D6W7Y5_TRICA
tggccggcactaatttgagatgacaaggtctataactatagttttgaaacaattcgaattgaattagaatcaaatttgaaacaggataaagaaaattttatcgatcggtgagatttttgaaacgaaaacgtggcaacgttgttgtccataaggaacaatctggattaatatcaatttcaccatttgcgattattctaacatggccgcatgttagttactgaattttctttattgtttgccaacgtttgttaaagatttagtagtggtgtttgtttaaaatactttaagattgatctagaatacaggtagattgaagtagtggttagtggcaggtatttatacctattttttggataagttgtgccggttttggtcttgttgatctactcctccctattgaggtagttgggcaaagaatagggttttctgattttctctttttgattatttcaacctgaaaaatgttacaagaccatcatcacatgtctcaaaatgggatgcaaagaaatgcaagaatggggatgcaacaaatggggccaccccctaatcaacgaacaccaatgctcatgagtatgccagctactggtgttctagtctcaatgcctcctggtcctgggccaactttaataacaacaacatctatcccccaacaaccacaaccaaaagccaatatccagcaaccagtctatcactatgaaaacgctggtcaacctaccgaaccagatcagcacagtactgagcatcagaactgttcaaacactaatactttgtctacgcccaacgctactttggcaaacataaaagaaaaaacacccatgtgtttggttaatgaattagcaagatacaataagatccaacaccagtatagactcactggggagcaaggaccagcccacaagaaaatattcacagttaccttgaaactcggtaatgaagaatatgaagcagaggggcccagtattaaaaaggcacagcactcggctgccgctcaagcgttggctaaaactgaattcaaacatccaccaccaaaaacggtaagaaatcgtccaggaacacgaccaactaacccaggggttgttactccaactgttgaactcaatgctcttgctatgaagaggggggaacgtacagtatacgttgttgaaaatgggggtgctccaccacatcagaactacgtaactcagccaggttattatccacggcataatttgtacaacgctcaaactcagccgcaaaggtacacctacgatgcccgccgtaacatcagaggtcactatccataccacgagaaccgctattacggccagtttagacctggagcgcctcataatccaggagacccatacacagtgcgtttaagagttggcgaacgggagtatccgggacaagggtacacagtacaggctgcccgacacgatgctgcgtccaaggccatcgaacatattaaacaactaggtacttcggaccaaagtgatggggatatatctcctgatgttactcagcagatatcgaatgactctgctcagggaagcctatctgacattaattcagatctgaagtctcctatttcactggtatatgagattgctttgaagagaaatttgaacgttcattttgaggttctaagcgagaaggggcctccacatatgaaagtatttataacacaatgctgtgtgggctccttcatagccgagggcgaaggaaacggaaagaaaatctcaaagaaaagagctgccgagaagatgctggagcaactttcgaagcttccaccgcttccaaacgtcacgaatatagctcagctgaaaaagaaacgtgttacaaacaagaagaagacacgtaacttgatcaaagttaatacagaccgatctacggaagtggttgaagaaattaatccaatatcgagattaattcagatccaacaagccaacaaggaaagagaaccagtgtatacagttttggaagagcgtggtgcaccaagacgtcgtgaatttgtcatcgaagcttccgttgctggccattcctgcactggcgtggggcccaacaaaaaggtagctaagcgtaatgcagctgaagcattactgatcgatcttggctacagtaacactaacatcaacaatgtcaagcccatcgccaaagacaaggaagaaggcgtcgctccaaacatccatcctaacatggacaaaaatcgcaaggtaacttttgttgaagaagttcctgaggttcaacccactcaatcggttggtggcagtggtggtagacaattggtaccagggattctcttggttactgaacaatctggcttcccgaagcctaaagatactatggacaaacctgtgcaacagcctcctactcagattaaacctccatctacaatccagggcgtacgttctaaggacaaattgctatatttggcccagctgatgaatatccaagtccagttttcggatttcccaaaagcaaaccacgaaatgtatttgacattggtgtctcttagcaccaacccacctcaagtttgtcacggtgaaggtccgacaactgaagcttcgcacgaaaaagctgcccttgaggctttgaaagctctttctgaactgggtctcgatattgcccccaaagatggttctggtggacctaatggcaatgaaaatgcttccccagtggtgtctaacaaggggccggtacaccaaaacggcgtgaagaactaaacttgaactctgcgtaggctgtaccaatggccttaattttttaggaatgcatctcccttagtgactgcttttttttagtcattggtacagaacatttatacatgagttccatgtggccatgtaaaaaatttgcataacttatattcaaataactacgaattattttttttcttatttaatgtgatttcattaacatatgttatatgaaatgatatcatatatatatatgtaattctggttattgcttgagcactgtgtatttcaagtcagtgctacccattttcgttttcgtgggcagaaaacgaatttgggagacagtagttcagaattggtttacaaaattgtaagtcgtgtataaggtatacacatttagggttcgaatatttatcatgttttcaaaatatttctaagtattttaaacacagaaccctccactatatatatagaaaaagacgtcagattctcatattatatcatggtcaaacaaagcagcagcatcaaaggtgaacatagccgtaatgatagctaaccttcttaaaggacacggcaacttaaggaagtaaaagaatgcaaacaaatccagtggatattctagctgtgccagtaaatggattgtagacgtaaagaagacgaacgttcagctaaaaataacttttaaaatgtgaaactacacccgacgtggtaccactattagcggtaccaccaggaaataggagtaaggtttgtagacgcaaagaagacgatcacctcaaagtagctttaaaacgtgaaactatacccgacgtggtaccactattagtggtaccagtaggaaataggagtaaggtttgtagacgcaaagaagacgaacattcacctaaaagtaactttaaaatgtgaaactataccccacgtggttccactattagcggtaccactaggaaataataaggtttgtagacgcaaagaagacgaacattcacctaaaagtaactttaaaatgtgaaactataccccacgtggtaccactattagcggtaccagtaggaaatcggagtaaggtttgtagacgcaaagaagacgaacattcgcctaaaagtaactttaaaacgtgaaactatacccgacgtggtaccactattagcggtaccactaggaaatagtaaggtttgtagacgcaaagaagacgaacattcacctcaaagtaactttaaaacgtgaaactatacccgacgtggtaccactattagcggtaccagtaggaaataggagtagaggtagtccaagactgcgcaaggaagatcagcgcagcaaactggcaacggttcaactagggatgtagcatcagtcctgatgatacccgatgtggcggacggagttcactggctaggtactggcttaccaaatttttcaatttctaaagtaactgggttgtcaccatgcttcggagggcatgtgaagccgtcagcaccggctacgtagtagtcgttacactaaaacctgagccagaagattgacaactacctcacaacagagatatcaaacttctaaagtacaaattgatcatcctctatgtatttgtgcgccaatttgatataacatgataagatgtaactttatgatgtgtaatgtaagggttatatatgttatgttatggttatgagagtatagactgtaagcaaattataaaaaattacaaaagttattaaaagaagtaagtcatttggctcagtgctataactcttgataatctttaattatgtttgagtaaagctattaataaaatagttagaaatactctggaaacagacttagttgtataaattccaatatttcatgtaggtatcttacgcatatatgaaatacttaattgtcatattgtgagtgactaacatagcagaatgttggtataagttaattgttacaaatattatttcggaccctaatattaataattagatattttatgtttattcatttttaaagctagtattcgctaaccgttttctgacaaaatgcacgtgtatctttatattgtcagagaatgaaatcaagttagttgttctctctagatgcgatgcaattctgatctgctgatcaaacactttttttggtgattgatttctgtattccggaggcttcactcttctttttatttaattgaatatttaattctttttatgaatgcgtttttagttctgtgtatttacataagtaggattcatatttaataatgttatgcctctactttgaattcggaatcaataaacatatacacaaattagtattaaaaaaa

SEQ ID NO: 4365 - DNA, 4842 bp, Diabrotica virgifera
  SmartBlast Evalue=0; Info=Staufen n=1 Tax=Tribolium castaneum RepID=D6W7Y5_TRICA
tggccggcactaatttgagatgacaaggtctataactatagttttgaaacaattcgaattgaattagaatcaaatttgaaacaggataaagaaaattttatcgatcggtgagatttttgaaacgaaaacgtggcaacgttgttgtccataaggaacaatctggattaatatcaatttcaccatttgcgattattctaacatggccgcatgttagttactgaattttctttattgtttgccaacgtttgttaaagatttagtagtggtgtttgtttaaaatactttaagattgatctagaatacaggtagattgaagtagtggttagtggcaggtatttatacctattttttggataagttgtgccggttttggtcttgttgatctactcctccctattgaggtagttgggcaaagaatagggttttctgattttctctttttgattatttcaacctgaaaaatgttacaagaccatcatcacatgtctcaaaatgggatgcaaagaaatgcaagaatggggatgcaacaaatggggccaccccctaatcaacgaacaccaatgctcatgagtatgccagctactggtgttctagtctcaatgcctcctggtcctgggccaactttaataacaacaacatctatcccccaacaaccacaaccaaaagccaatatccagcaaccagtctatcactatgaaaacgctggtcaacctaccgaaccagatcagcacagtactgagcatcagaactgttcaaacactaatactttgtctacgcccaacgctactttggcaaacataaaagaaaaaacacccatgtgtttggttaatgaattagcaagatacaataagatccaacaccagtatagactcactggggagcaaggaccagcccacaagaaaatattcacagttaccttgaaactcggtaatgaagaatatgaagcagaggggcccagtattaaaaaggcacagcactcggctgccgctcaagcgttggctaaaactgaattcaaacatccaccaccaaaaacgaactacgtaactcagccaggttattatccacggcataatttgtacaacgctcaaactcagccgcaaaggtacacctacgatgcccgccgtaacatcagaggtcactatccataccacgagaaccgctattacggccagtttagacctggagcgcctcataatccaggagacccatacacagtgcgtttaagagttggcgaacgggagtatccgggacaagggtacacagtacaggctgcccgacacgatgctgcgtccaaggccatcgaacatattaaacaactaggtacttcggaccaaagtgatggggatatatctcctgatgttactcagcagatatcgaatgactctgctcagggaagcctatctgacattaattcagatctgaagtctcctatttcactggtatatgagattgctttgaagagaaatttgaacgttcattttgaggttctaagcgagaaggggcctccacatatgaaagtatttataacacaatgctgtgtgggctccttcatagccgagggcgaaggaaacggaaagaaaatctcaaagaaaagagctgccgagaagatgctggagcaactttcgaagcttccaccgcttccaaacgtcacgaatatagctcagctgaaaaagaaacgtgttacaaacaagaagaagacacgtaacttgatcaaagttaatacagaccgatctacggaagtggttgaagaaattaatccaatatcgagattaattcagatccaacaagccaacaaggaaagagaaccagtgtatacagttttggaagagcgtggtgcaccaagacgtcgtgaatttgtcatcgaagcttccgttgctggccattcctgcactggcgtggggcccaacaaaaaggtagctaagcgtaatgcagctgaagcattactgatcgatcttggctacagtaacactaacatcaacaatgtcaagcccatcgccaaagacaaggaagaaggcgtcgctccaaacatccatcctaacatggacaaaaatcgcaaggtaacttttgttgaagaagttcctgaggttcaacccactcaatcggttggtggcagtggtggtagacaattggtaccagggattctcttggttactgaacaatctggcttcccgaagcctaaagatactatggacaaacctgtgcaacagcctcctactcagattaaacctccatctacaatccagggcgtacgttctaaggacaaattgctatatttggcccagctgatgaatatccaagtccagttttcggatttcccaaaagcaaaccacgaaatgtatttgacattggtgtctcttagcaccaacccacctcaagtttgtcacggtgaaggtccgacaactgaagcttcgcacgaaaaagctgcccttgaggctttgaaagctctttctgaactgggtctcgatattgcccccaaagatggttctggtggacctaatggcaatgaaaatgcttccccagtggtgtctaacaaggggccggtacaccaaaacggcgtgaagaactaaacttgaactctgcgtaggctgtaccaatggccttaattttttaggaatgcatctcccttagtgactgcttttttttagtcattggtacagaacatttatacatgagttccatgtggccatgtaaaaaatttgcataacttatattcaaataactacgaattattttttttcttatttaatgtgatttcattaacatatgttatatgaaatgatatcatatatatatatgtaattctggttattgcttgagcactgtgtatttcaagtcagtgctacccattttcgttttcgtgggcagaaaacgaatttgggagacagtagttcagaattggtttacaaaattgtaagtcgtgtataaggtatacacatttagggttcgaatatttatcatgttttcaaaatatttctaagtattttaaacacagaaccctccactatatatatagaaaaagacgtcagattctcatattatatcatggtcaaacaaagcagcagcatcaaaggtgaacatagccgtaatgatagctaaccttcttaaaggacacggcaacttaaggaagtaaaagaatgcaaacaaatccagtggatattctagctgtgccagtaaatggattgtagacgtaaagaagacgaacgttcagctaaaaataacttttaaaatgtgaaactacacccgacgtggtaccactattagcggtaccaccaggaaataggagtaaggtttgtagacgcaaagaagacgatcacctcaaagtagctttaaaacgtgaaactatacccgacgtggtaccactattagtggtaccagtaggaaataggagtaaggtttgtagacgcaaagaagacgaacattcacctaaaagtaactttaaaatgtgaaactataccccacgtggttccactattagcggtaccactaggaaataataaggtttgtagacgcaaagaagacgaacattcacctaaaagtaactttaaaatgtgaaactataccccacgtggtaccactattagcggtaccagtaggaaatcggagtaaggtttgtagacgcaaagaagacgaacattcgcctaaaagtaactttaaaacgtgaaactatacccgacgtggtaccactattagcggtaccactaggaaatagtaaggtttgtagacgcaaagaagacgaacattcacctcaaagtaactttaaaacgtgaaactatacccgacgtggtaccactattagcggtaccagtaggaaataggagtagaggtagtccaagactgcgcaaggaagatcagcgcagcaaactggcaacggttcaactagggatgtagcatcagtcctgatgatacccgatgtggcggacggagttcactggctaggtactggcttaccaaatttttcaatttctaaagtaactgggttgtcaccatgcttcggagggcatgtgaagccgtcagcaccggctacgtagtagtcgttacactaaaacctgagccagaagattgacaactacctcacaacagagatatcaaacttctaaagtacaaattgatcatcctctatgtatttgtgcgccaatttgatataacatgataagatgtaactttatgatgtgtaatgtaagggttatatatgttatgttatggttatgagagtatagactgtaagcaaattataaaaaattacaaaagttattaaaagaagtaagtcatttggctcagtgctataactcttgataatctttaattatgtttgagtaaagctattaataaaatagttagaaatactctggaaacagacttagttgtataaattccaatatttcatgtaggtatcttacgcatatatgaaatacttaattgtcatattgtgagtgactaacatagcagaatgttggtataagttaattgttacaaatattatttcggaccctaatattaataattagatattttatgtttattcatttttaaagctagtattcgctaaccgttttctgacaaaatgcacgtgtatctttatattgtcagagaatgaaatcaagttagttgttctctctagatgcgatgcaattctgatctgctgatcaaacactttttttggtgattgatttctgtattccggaggcttcactcttctttttatttaattgaatatttaattctttttatgaatgcgtttttagttctgtgtatttacataagtaggattcatatttaataatgttatgcctctactttgaattcggaatcaataaacatatacacaaattagtattaaaaaaa

SEQ ID NO: 4366 - DNA, 5463 bp, Diabrotica virgifera
  SmartBlast Evalue=1E-147; Info="Ubiquitin carboxyl-terminal hydrolase, putative n=1 Tax=Pediculus humanus corporis RepID= E0W2N3_PEDHC"
gaatgttagtattcgaggtttggttgtaggatggcattttttatacttttttaataagaatctaaattaaaatactacggtctggtaacaaacaaaaattaagagcagtgaaatgcaatagataacaatactgaaaaacgtactaagaaaatatagaataatgcctgtcctaagcccccatcgcagctcatcttccggtctgagcggttcctacagatccaccttcagttcatcagcactagatagaccattctactcatcgacatcgtacagtccaagattcaacacctacagcgagagatatacaagtagaagctttacagattcagatggccgcagaatatacactagatctggctctattaccgaagatggggtgacaacaagattcagagaggaatctcgggaacccagcctcaaacgtgattccatttcccgggattcgggaataagttcgatcagagaaaattcgatttccgattatccacgaagggagagttccttaactcgaagtgaccgattgtcgcacgtcaacgtcatcgattctgtggccgaactaagaaataaatactcaccagccaattacgtgcctgcttgtatgagaaaaaatgaaaatttatcgaggtctaagtctaacaatgatataggtttgcctcctctagaagtgaaatcgacaaagaaaaaggtaaacgatagagtggacagtatttatactaacagtgtggcatactctaacaatactaatactgacaatttgactgatgaagacgataacggcaaccgaacatcagtcgcagatttgtgcaaaaggttcgatgacaaactctctagaacagtgaaaaacggtactagcctcaccaacaagacatcggaggtcaagtccaaaatttccgaactaaccaatggcgtcaaacccctaagcggcaagacaaaaaccgccaacgtcaaaaaatctattagcaatggctcggtcgccaaaaagaacgacgcgtcatccattaaatgtcaaaataacgttgatgttttacagtctaactcaaaattggaagtgaatgaagattcggatttgaaaaatgggacagaagtcgagagggaggaggtgagcgaagaaggagcaagtaatcattccctctcgaagaacggttcaagagtaaataatttttcttcttacatttctatttcgaccaaggactttcagaggggggatgaaaatcaatcagatcagaaaaatgatatggatactaaagaatatatcggaaaagtaatacaaaatacagatctgtcgacatctccaaaagtaacaagaacagcaatctctccatccaattccatagcgaatagccttaactcgaattccttatcgcgtcgctcaagcgaaagagagaaccaccgtatccgagattattcggatgatgatagtagtggtgagcgggttcttaacagttacgccaccatcagatcttcagagtgcaccccccaaaaaagcttgggcctcaatgggctgaaaaacatcggaaatacgtgttttatgaatagtgtactccaatgtctgtcgaacaccaggtggttgttggagtatttaaagaaagacggatacatcaaggacatcaatacgagcatatctagcatgaaaggagctctcataaaagcatttgcggaagtgattaaggaattgtggtcagaagatgcatccgatagagtagtaaacaccgcttcattgaaggggcaaatacaacgatttgctcctcgatttatgggttatgcgcaacaggatgcgcaggagtttctacgctacttattggaaggtctacatgaagacgtgaatagagttcaagagaagccaaagcctatattaacagaaatcgatgaaaaattaagtgataatgaaaaagcgcaagaatcgtggacaagatatttaagaatggataactcaagaatagtggatcattttgtaggtcagcttaagtcaacactgaaatgcacacactgcgggcactgttcagtaacgttcgatccattttgggatctttctcttcctataccacagcgaacgggtcagttgagactttcccaatgtctcgattcgttcactcgagaagaaactttggatggcgatgaaaaaccgacgtgttcaaaatgtaaagaaagacgacgctgcactaaatccttctccatacacaaatttccaaaaatattggtcattcacctgaagaggttctctccgacagagagatttagaggcaaattaaatgtaacagtagattttccaatggagggactagacatgagtcaatatgcagcagacaacgtttctccttgtaggtacaatttatatgcgatatcgaatcacagcggcaccacgtatagcgggcactacacagcctattgccgacatccctacacggggcactggcacgaatacaatgactcgagggtgtcttcaatatcttcgaaatcactagttagtggggaagcttacgtcctcttctatgagcaagagggtgcaaaatcccacctttaagtcaataacgttttagttttataatgaaatatttttaaaccaaggctttatttggttttgcaaaatttatttatatacactcaaatagatttatttatatttctccttgtatattttatgtatttaaaattttgttttatataaattgtactatgctgtccgaccctggtgatttttccttaggactctttacaagtctctcgctacgtatgtatcttgtattaacgttaacagatgcagggtactaacaattagatttaaagggtatgcttttccgagatttacatatacaagccgttgaatgtgctagagcgaaaagtaatcttggaaacattaagattactttatgtagatcggttcattttgactcacatcaaagacgattctgttgctactttttacagctattagtcaaaactgtcaccagttgaataatacgtatgtcattcctagaaaaggtccctatgccgctgagaaaaaaagcgatctgacaacactgccttcacaacaactctctctcactctcaccccaccgctttcgtctcgctgcattgctcagtgtcggcctaccagccttcgaggatggaggtcacggtctcagcgcaaatgtgaaattcatgctgtgattgatatcacttattgacattcatcgtgggttaatcgtcgcttatgggtaaaacatgttcgcaaatggtgtagagaattcggtgaaagccgaactgaaattccttcagattcatcgtgaatttccgttcggcctttactgaattctgtacaccgtttacgaacatgttgaacagatatgaacttttacttataaacttcagttaagtgacgatgaatgtcaataggtgaaattcattttgcatttaaaaacgtatcagcatgaatttcacatttgcggtaacagcaaccgtgacctccatcgtcgaaggctgctaggacgacactgagcagtgcagcggggccaaagcggtggggtgagagagggggagacttgatgtgtaaggcagtgttgccagatttctcccagcacttcgcactctttctcagcgacataaagtacctttttttaagaatgaccctcgtacattcacgaatgataatacgtcgttatgctttaccttagagtcaaaatgaaacgatagtgttttgtttttactagaaaagtcgtaatttctgtccattttataatcgcaatgtaattttatcacagatacgtttctacaagatacagaattttggattattacagatcaatccattcatgttttcattgcactttgaaaaaaatgtaaatatatatttactgctgggacccaattgtataattgttaaattatttgaattcacaaagtctagtgggacaaaaataatgtatgtgaatattttcgtgggtcattatagaagttcccaacagtattagacgttctttaaaaatttcgcaattacggcttttatgtcgcatatgattgaatagtcactatattattaaaccttaaacatttaaaggcattttaagttttgaaaatacgaagaagttaaggagtgccatgtctgaactatacaaaggctgatggagttgtctagccttttgttttcacaaaaaccgttgcacaaagttcaatgaatgtgccggcgtgttgtcgtgataactcaactagtcgccactcatccaaaaattagttttgttgtcagttgatcttaaaactcatttatttatattctgaccttctacatcgtattgatgttgtacaacactttcataatcgaaaaaaaaaatcaagatggtcgctaaggtggaagcttccgttgtgaagacttgtaagtttctctttaagcatattgttgtcattagcgagcatttctaaattgttcagggcgattttttcaagcacacgtttcaaatattctatattttccggttttgttgtgttggaaagtcggccaggacgtaggtcacttagacagacattattttagtcatattttgcttatatattcatctccaaatgattttgcaaaacttgcaaatttgttgcccgcatctcttagccattttcagcgacaacaaaatgcgataaacgttttggcgaagttataaatttatacgtccacaatatctttactttcacatttatgagtactaccaatcaaagagtagttttacagttgtttatgctgatattgcagttgaaatgcttatatttttttaacattcctaacaattgtaacacaaaaatttatcacgtcgttatatctgttgtatttaaatgtataagggtatattatcttctttctgtactaaagattacttttaacattttgtcaattgattccaatctctgtttattctaattctaatcaatttatataatgttctacactgcaaattattaatttagaagatatagattctagatgtactctagaattgatattcaagaaaaatgaaatggattgctctgtatgttgcctttttatttttactatttatttatatgttgttaatagaattataggatcggagaaaatgtacttattttgttttttgttttatatatttatctagtctatttttcaaggtacaagtttggcaatgcaaattaaaatgtgaatcatccacattgttaaaaaaatagttatattgtaaagatattctagaatcataacaagtacatatcgaaaaaaaaaaaagaataatctctattgttaacttttttctttttatttacgtttattagagatgcagaacgggtgtttttttactttcttctctttttactattctgttaataacacagcatagctgaacaaatacacgagttaaaattaattgacacatacacagtatcaaaaataatttgaggtagttatgcgcttacaacagtaggaaataatagaaatatttaaaactatatagctgtattagtactccggac

SEQ ID NO: 4367 - DNA, 4340 bp, Diabrotica virgifera
  SmartBlast Evalue=1E-148; Info="Ubiquitin carboxyl-terminal hydrolase, putative n=1 Tax=Pediculus humanus corporis RepID= E0W2N3_PEDHC"
caacgtcatcgattctgtggccgaactaagaaataaatactcaccagccaattacgtgcctgctgtatgagaaaaaatgaaaatttatcgaggtctaagtctaacaatgatataggtttgcctcctctagaagtgaaatcgacaaagaaaaaggatctgtcgacatctccaaaagtaacaagaacagcaatctctccatccaattccatagcgaatagccttaactcgaattccttatcgcgtcgctcaagcgaaagagagaaccaccgtatccgagattattcggatgatgatagtagtggtgagcgggttcttaacagttacgccaccatcagatcttcagagtgcaccccccaaaaaagcttgggcctcaatgggctgaaaaacatcggaaatacgtgttttatgaatagtgtactccaatgtctgtcgaacaccaggtggttgttggagtatttaaagaaagacggatacatcaaggacatcaatacgagcatatctagcatgaaaggagctctcataaaagcatttgcggaagtgattaaggaattgtggtcagaagatgcatccgatagagtagtaaacaccgcttcattgaaggggcaaatacaacgatttgctcctcgatttatgggttatgcgcaacaggatgcgcaggagtttctacgctacttattggaaggtctacatgaagacgtgaatagagttcaagagaagccaaagcctatattaacagaaatcgatgaaaaattaagtgataatgaaaaagcgcaagaatcgtggacaagatatttaagaatggataactcaagaatagtggatcattttgtaggtcagcttaagtcaacactgaaatgcacacactgcgggcactgttcagtaacgttcgatccattttgggatctttctcttcctataccacagcgaacgggtcagttgagactttcccaatgtctcgattcgttcactcgagaagaaactttggatggcgatgaaaaaccgacgtgttcaaaatgtaaagaaagacgacgctgcactaaatccttctccatacacaaatttccaaaaatattggtcattcacctgaagaggttctctccgacagagagatttagaggcaaattaaatgtaacagtagattttccaatggagggactagacatgagtcaatatgcagcagacaacgtttctccttgtaggtacaatttatatgcgatatcgaatcacagcggcaccacgtatagcgggcactacacagcctattgccgacatccctacacggggcactggcacgaatacaatgactcgagggtgtcttcaatatcttcgaaatcactagttagtggggaagcttacgtcctcttctatgagcaagagggtgcaaaatcccacctttaagtcaataacgttttagttttataatgaaatatttttaaaccaaggctttatttggttttgcaaaatttatttatatacactcaaatagatttatttatatttctccttgtatattttatgtatttaaaattttgttttatataaattgtactatgctgtccgaccctggtgatttttccttaggactctttacaagtctctcgctacgtatgtatcttgtattaacgttaacagatgcagggtactaacaattagatttaaagggtatgcttttccgagatttacatatacaagccgttgaatgtgctagagcgaaaagtaatcttggaaacattaagattactttatgtagatcggttcattttgactcacatcaaagacgattctgttgctactttttacagctattagtcaaaactgtcaccagttgaataatacgtatgtcattcctagaaaaggtccctatgccgctgagaaaaaaagcgatctgacaacactgccttcacaacaactctctctcactctcaccccaccgctttcgtctcgctgcattgctcagtgtcggcctaccagccttcgaggatggaggtcacggtctcagcgcaaatgtgaaattcatgctgtgattgatatcacttattgacattcatcgtgggttaatcgtcgcttatgggtaaaacatgttcgcaaatggtgtagagaattcggtgaaagccgaactgaaattccttcagattcatcgtgaatttccgttcggcctttactgaattctgtacaccgtttacgaacatgttgaacagatatgaacttttacttataaacttcagttaagtgacgatgaatgtcaataggtgaaattcattttgcatttaaaaacgtatcagcatgaatttcacatttgcggtaacagcaaccgtgacctccatcgtcgaaggctgctaggacgacactgagcagtgcagcggggccaaagcggtggggtgagagagggggagacttgatgtgtaaggcagtgttgccagatttctcccagcacttcgcactctttctcagcgacataaagtacctttttttaagaatgaccctcgtacattcacgaatgataatacgtcgttatgctttaccttagagtcaaaatgaaacgatagtgttttgtttttactagaaaagtcgtaatttctgtccattttataatcgcaatgtaattttatcacagatacgtttctacaagatacagaattttggattattacagatcaatccattcatgttttcattgcactttgaaaaaaatgtaaatatatatttactgctgggacccaattgtataattgttaaattatttgaattcacaaagtctagtgggacaaaaataatgtatgtgaatattttcgtgggtcattatagaagttcccaacagtattagacgttctttaaaaatttcgcaattacggcttttatgtcgcatatgattgaatagtcactatattattaaaccttaaacatttaaaggcattttaagttttgaaaatacgaagaagttaaggagtgccatgtctgaactatacaaaggctgatggagttgtctagccttttgttttcacaaaaaccgttgcacaaagttcaatgaatgtgccggcgtgttgtcgtgataactcaactagtcgccactcatccaaaaattagttttgttgtcagttgatcttaaaactcatttatttatattctgaccttctacatcgtattgatgttgtacaacactttcataatcgaaaaaaaaaatcaagatggtcgctaaggtggaagcttccgttgtgaagacttgtaagtttctctttaagcatattgttgtcattagcgagcatttctaaattgttcagggcgattttttcaagcacacgtttcaaatattctatattttccggttttgttgtgttggaaagtcggccaggacgtaggtcacttagacagacattattttagtcatattttgcttatatattcatctccaaatgattttgcaaaacttgcaaatttgttgcccgcatctcttagccattttcagcgacaacaaaatgcgataaacgttttggcgaagttataaatttatacgtccacaatatctttactttcacatttatgagtactaccaatcaaagagtagttttacagttgtttatgctgatattgcagttgaaatgcttatatttttttaacattcctaacaattgtaacacaaaaatttatcacgtcgttatatctgttgtatttaaatgtataagggtatattatcttctttctgtactaaagattacttttaacattttgtcaattgattccaatctctgtttattctaattctaatcaatttatataatgttctacactgcaaattattaatttagaagatatagattctagatgtactctagaattgatattcaagaaaaatgaaatggattgctctgtatgttgcctttttatttttactatttatttatatgttgttaatagaattataggatcggagaaaatgtacttattttgttttttgttttatatatttatctagtctatttttcaaggtacaagtttggcaatgcaaattaaaatgtgaatcatccacattgttaaaaaaatagttatattgtaaagatattctagaatcataacaagtacatatcgaaaaaaaaaaaagaataatctctattgttaacttttttctttttatttacgtttattagagatgcagaacgggtgtttttttactttcttctctttttactattctgttaataacacagcatagctgaacaaatacacgagttaaaattaattgacacatacacagtatcaaaaataatttgaggtagttatgcgcttacaacagtaggaaataatagaaatatttaaaactatatagctgtattagtactccggac

SEQ ID NO: 4368 - DNA, 4612 bp, Diabrotica virgifera
  SmartBlast Evalue=0; Info=Chitin synthase n=1 Tax=Tribolium castaneum RepID=Q6WD24_TRICA
taaaattttattaaatataaaataataatataatacaaagacaataataattacattttaaaagttttactaaatatttaaccttcagcttcattttcagcggggttgtcaagaaatattgcactatctggtctttcgtaatttcttgatactccacctgtgaattctggaagacgggagtgcctcatcaatatggtatttcgtatgtgggctatttgaggcattgtgtctctaaacggattattttgctctttatattttccgctgttaaatagactcagccttttatagaaggcctgttctaagtcttctattactggctgagccttcttttctctttttaaagctaaccaatgagctgtttccctccttattactgaggtatcctctttatcatcctcgtcatttatgccttgcaatctgatgagttgcttaaagatctttatgggatctctttccagcagagatttttctgtaatatttttaacttctgatccaaaaaggctgaaatctatatgagtattggccataatttgacagtaggtaccgaaacgatgaatacccataccaataaattgaactagcaatagcgcagagaacataacaaggaatacaaatccaataggttgtagttgcaaataagtcttctcaattattatcatattttcgtcggtgatataagtgaaatttactttagggttaatgggccagttaacgtgaattatatcctgttgtaagttcagaagatatattatcaacacaaatagcgcattcaacataaaaaatgtcatcaccattctgtctcttaagtcctttaaatctttagcgacagcgtcctttttatgagtttcatctaatggagacagatatttttcaataagtttctcccaaaattttttttctttcttatcaatgaattcgaccccgcttttaatcaaactaccgtcgtagtaccagctattgggctcaacgtcttccgaaggagtgatatttgaagaatcatcctcatcatcgtcgtcatcagcatcgccatcttcatcagcgaactcctgcgtttgtagaggaattgctgcttgtgaaactcttgcagcttgtaaacccacaaaaagctgagtttgtctagcggtttttcttggttccaggatcgaatctctagctcctagtttattcttctccatctggtccaattttttttgcatattttgaatggaagtttgtatgttcctgagtacttccctttcctcgcctttactatcgtaggtacaacacaataatttaaaaagtcctccgaaagaaaactcgaaggatcccgcattatctttggagttaccaaaaaatgataatggttggtttgctctgggcgcaggagcaggtgctgcatttggtgtagcttcctgagttgcctcttgcggtttgggtgctacagtgacctcgcgggtaccccatgatacgttattcatgttaaatattgaatatattaccaacaacatatacatgctgggaatagttacgtagtaaataattaaatatttgaggcagtagaattcttggggatgcatcaaggcggctatcaaaaattctcccatcgtggccactaagaaaagggatgaaggagccagccacccatcttgttcgatctggatcatcataccgacgaatactgtcatcatgacaagaccatatactccagtgataagagcagcaaagaataattgcgtatctgatttacacgtggcacatactactataaagatgagaactggtatagcattccaaatcaagctctcgtattgtgaaattttaaaagcagccacaaaagccccaactaacataagaaaaatagttccgggaccaatcactgtaccaatcataatgactacttgatataaaatgtacaatttggatatgttgtcgttgattgaaacaatatgtttgtaatctgtcagtagatccataatatttgcggtagtggaaggcatccatcttcttcgctgattataaaattcactaaaaccttctggacaatgggtgtaggcatcagaagctgctgaatattctacacggtaacctctctgcaataataaagtacacagccaccgatcttcaccttgatcatattgtacatagtgtcgtgcttctgaagattctgtggtatattttgccattacattgtcatccataagggctccagctctgaataaagaaaaacaaccaggactacaaagtacacaaccaatgacgtgttcggttgccttttgaagccaatgaccaaccgcatattcaaacacctgataccaagccattgcacctgaaccgactggatgaattctaccacaagcagctcccaaactggagtttttcttcatgtaatccaccaagagatgtacggcagcgggttgaaaatcgatatctccgtctaaagcaagtatatatgtattgtgggccatgtttttaatttctgttgggtggagcttatcattgtccataatcctaaatcctaataaataatacatatacatgacctgtgaccatcttttcttagcccttattttggccttatcttttaaatgagctatcatcttagttttacccggtaatgtccattctaacctgcccccatatggagttgagtacacagtgggcggtttaattttacaattcacagcatgtactttactagctgcatcactgacagtatcaattaaagacagaacatattcattaacatgcggatcattatcattttgtgactgtcgaataaaggcgtcatcgaagaatatatgagtttctaactcgtagtaatcaggcagttggaactgtaaatactgtcggacaattctatgcgcacattgatcttcatccaatctaaagacagattttaaaaattcaaccatttcttctttagtctcatgccacatcgtcgcgcatgcatatatccttgtgattttatcatgaggtacattttcgttttcagtctgttctcttccaattttaataagtctgtcatgttctcttcgtctattcatagcaagcgattggtcaattaaaaaggcatcgtacatcggtttctttaacagttgttctgtcgacatcagtttttcgtgatcgttagaccaaatatgaatagttatccatgtttgagaaagcaaccataaaaaccatatccaggaatattgatggccaataaagtcttcaagtcgcgacatggttggagtattgaagaataagtaagcaggaaaaacgttggtgtaagcgcattcattcttgttatacataccgcacatggacaccaaagctgttaaaagaacgggaacagctagatttacaggtagtgcgaagctcatggactgaatcataattttacatgcaaattttccaaaagcatagcaaatatatgtactgagaatatttattagccaagtaactattggtgtccaatatgacgtttccattgtagtaggatgtatatctgctactgcatctgtgtaattaatgttggatgttcctaccactggttcgatctgtgtaacattaaacgagtgactactaaatgcatctccaaatttatcgaacaagaagccaacatctccttctcttatccatataattgttactgcagataaaaggaagatcaaacatttgatgggggtgattaaggcatatgtaaaataaacatctgttttaaattgtttttttgcctttgcaaatttttttacccagggaattggagttttctccgagagaaaattttcccaccatccaacagatattagactgagagctataggaatgatatacaatattttcctgttttctaccagaggccacacaactaaagcacttgcttgaataactatggctgctatatccagtccataacatagtccttggcgaactttcgatgttgatcttgatatcattgcgacaattcctggtaccaagcaaacgccattggttaacatggctgctttaattacatcaatttcaggaaaaactataaatacaagaagagcgctcccgatgactggcaaaatttctgttgttgccaaaatcaaaaagtccagcttagtgggataattccaacttttgaaacttattattctgaccgatctgataaatgttcctagttctggtaccatatacgaaaatattattatccaaatccatactgttctttcttcttgtgggtggatcacaatatattgttgtcgtgtatccaagttttcattacaatataacctagtaatatttggctttatttgagatgtcataaatagtaaacttgcttttgacactacggcgcaccctaagactattaacattgtaaatataactgtgaaaatttttagatattttacagataaatcaatgtacttagattcaattgtggatccagatattgtctctctaggtacattattaaatagatcccattgatatttcggttgtgtttgagtattctccacaaggggttcgagttcgtcatcatataattccctccttctcatgattgctttgagatttccttaggtaacaatcaagtaagcatgaccttgctaagtaggccccaattcaagatattccttattctacgactgtatttacgaacact

SEQ ID NO: 4369 - DNA, 4517 bp, Diabrotica virgifera
  SmartBlast Evalue=0; Info=Chitin synthase n=1 Tax=Tribolium castaneum RepID=Q6WD24_TRICA
ctttgatatatattttaaattattatctgttgtgatttgcagcatctttatcgaattaaaaattttatgcaagttccctattatttttagcttcaatactttattttgatgtcacatagtatcctttacctaatgtccaattaattgttgataccctttatattttccgctgttaaatagactcagccttttatagaaggcctgttctaagtcttctattactggctgagccttcttttctctttttaaagctaaccaatgagctgtttccctccttattactgaggtatcctctttatcatcctcgtcatttatgccttgcaatctgatgagttgcttaaagatctttatgggatctctttccagcagagatttttctgtaatatttttaacttctgatccaaaaaggctgaaatctatatgagtattggccataatttgacagtaggtaccgaaacgatgaatacccataccaataaattgaactagcaatagcgcagagaacataacaaggaatacaaatccaataggttgtagttgcaaataagtcttctcaattattatcatattttcgtcggtgatataagtgaaatttactttagggttaatgggccagttaacgtgaattatatcctgttgtaagttcagaagatatattatcaacacaaatagcgcattcaacataaaaaatgtcatcaccattctgtctcttaagtcctttaaatctttagcgacagcgtcctttttatgagtttcatctaatggagacagatatttttcaataagtttctcccaaaattttttttctttcttatcaatgaattcgaccccgcttttaatcaaactaccgtcgtagtaccagctattgggctcaacgtcttccgaaggagtgatatttgaagaatcatcctcatcatcgtcgtcatcagcatcgccatcttcatcagcgaactcctgcgtttgtagaggaattgctgcttgtgaaactcttgcagcttgtaaacccacaaaaagctgagtttgtctagcggtttttcttggttccaggatcgaatctctagctcctagtttattcttctccatctggtccaattttttttgcatattttgaatggaagtttgtatgttcctgagtacttccctttcctcgcctttactatcgtaggtacaacacaataatttaaaaagtcctccgaaagaaaactcgaaggatcccgcattatctttggagttaccaaaaaatgataatggttggtttgctctgggcgcaggagcaggtgctgcatttggtgtagcttcctgagttgcctcttgcggtttgggtgctacagtgacctcgcgggtaccccatgatacgttattcatgttaaatattgaatatattaccaacaacatatacatgctgggaatagttacgtagtaaataattaaatatttgaggcagtagaattcttggggatgcatcaaggcggctatcaaaaattctcccatcgtggccactaagaaaagggatgaaggagccagccacccatcttgttcgatctggatcatcataccgacgaatactgtcatcatgacaagaccatatactccagtgataagagcagcaaagaataattgcgtatctgatttacacgtggcacatactactataaagatgagaactggtatagcattccaaatcaagctctcgtattgtgaaattttaaaagcagccacaaaagccccaactaacataagaaaaatagttccgggaccaatcactgtaccaatcataatgactacttgatataaaatgtacaatttggatatgttgtcgttgattgaaacaatatgtttgtaatctgtcagtagatccataatatttgcggtagtggaaggcatccatcttcttcgctgattataaaattcactaaaaccttctggacaatgggtgtaggcatcagaagctgctgaatattctacacggtaacctctctgcaataataaagtacacagccaccgatcttcaccttgatcatattgtacatagtgtcgtgcttctgaagattctgtggtatattttgccattacattgtcatccataagggctccagctctgaataaagaaaaacaaccaggactacaaagtacacaaccaatgacgtgttcggttgccttttgaagccaatgaccaaccgcatattcaaacacctgataccaagccattgcacctgaaccgactggatgaattctaccacaagcagctcccaaactggagtttttcttcatgtaatccaccaagagatgtacggcagcgggttgaaaatcgatatctccgtctaaagcaagtatatatgtattgtgggccatgtttttaatttctgttgggtggagcttatcattgtccataatcctaaatcctaataaataatacatatacatgacctgtgaccatcttttcttagcccttattttggccttatcttttaaatgagctatcatcttagttttacccggtaatgtccattctaacctgcccccatatggagttgagtacacagtgggcggtttaattttacaattcacagcatgtactttactagctgcatcactgacagtatcaattaaagacagaacatattcattaacatgcggatcattatcattttgtgactgtcgaataaaggcgtcatcgaagaatatatgagtttctaactcgtagtaatcaggcagttggaactgtaaatactgtcggacaattctatgcgcacattgatcttcatccaatctaaagacagattttaaaaattcaaccatttcttctttagtctcatgccacatcgtcgcgcatgcatatatccttgtgattttatcatgaggtacattttcgttttcagtctgttctcttccaattttaataagtctgtcatgttctcttcgtctattcatagcaagcgattggtcaattaaaaaggcatcgtacatcggtttctttaacagttgttctgtcgacatcagtttttcgtgatcgttagaccaaatatgaatagttatccatgtttgagaaagcaaccataaaaaccatatccaggaatattgatggccaataaagtcttcaagtcgcgacatggttggagtattgaagaataagtaagcaggaaaaacgttggtgtaagcgcattcattcttgttatacataccgcacatggacaccaaagctgttaaaagaacgggaacagctagatttacaggtagtgcgaagctcatggactgaatcataattttacatgcaaattttccaaaagcatagcaaatatatgtactgagaatatttattagccaagtaactattggtgtccaatatgacgtttccattgtagtaggatgtatatctgctactgcatctgtgtaattaatgttggatgttcctaccactggttcgatctgtgtaacattaaacgagtgactactaaatgcatctccaaatttatcgaacaagaagccaacatctccttctcttatccatataattgttactgcagataaaaggaagatcaaacatttgatgggggtgattaaggcatatgtaaaataaacatctgttttaaattgtttttttgcctttgcaaatttttttacccagggaattggagttttctccgagagaaaattttcccaccatccaacagatattagactgagagctataggaatgatatacaatattttcctgttttctaccagaggccacacaactaaagcacttgcttgaataactatggctgctatatccagtccataacatagtccttggcgaactttcgatgttgatcttgatatcattgcgacaattcctggtaccaagcaaacgccattggttaacatggctgctttaattacatcaatttcaggaaaaactataaatacaagaagagcgctcccgatgactggcaaaatttctgttgttgccaaaatcaaaaagtccagcttagtgggataattccaacttttgaaacttattattctgaccgatctgataaatgttcctagttctggtaccatatacgaaaatattattatccaaatccatactgttctttcttcttgtgggtggatcacaatatattgttgtcgtgtatccaagttttcattacaatataacctagtaatatttggctttatttgagatgtcataaatagtaaacttgcttttgacactacggcgcaccctaagactattaacattgtaaatataactgtgaaaatttttagatattttacagataaatcaatgtacttagattcaattgtggatccagatattgtctctctaggtacattattaaatagatcccattgatatttcggttgtgtttgagtattctccacaaggggttcgagttcgtcatcatataattccctccttctcatgattgctttgagatttccttaggtaacaatcaagtaagcatgaccttgctaagtaggccccaattcaagatattccttattctacgactgtatttacgaacact

SEQ ID NO: 4370 - DNA, 4497 bp, Diabrotica virgifera
  SmartBlast Evalue=0; Info=Myosin heavy chain 95F n=1 Tax= Harpegnathos saltator RepID=E2C7U5_9HYME
attaaataaattttatttaaatatatttttttaatttcatatacatatagcttcccttttaatactgtgtaaagcaaaacatacataataataaacactgtaagtaattgactccaatttatcaacaattaatcaaacatttttcgaactaactatacttcattccaattacaaaattgcaaattaagtaaatagcaccaatcagagtacagatatcatctgctaaatgttgactttatattaaatctagtggactctgttaattttttccactttttaatagtcgccgcttcaaaaatacgctaaattcattgttttatctattgttacgataggaaacctcatatattcttacctagaccggctctgaccatcctacttatcattaaactacctcacttctgacaccagtgttacgtttttactaaatttatttaacagtggtgtcaaaattggagtcgtttactgttaagtcaggattgtcaaagcagacctagtcaagaacatgtgcggttgactatcgtaacactactttcgcccacaaaaatactgactgttaatattaataacattccaagtaatgtgaaccaccaactgcattgtctagacaatctgaacatcgcccatgttaactattggaatgaactaaagtgttgaacaaagtaatgaaacacaatctcaaagatgttactggagtccatcaaagagctttactttctgtcagccggacgaacgtacttagtgcctccatttttctcccattccttgttaaactcgttctccaaaatttctgccccacgctttctggttaggccggtttcttcaagggagagttcgcacatttgcatatcgtctttgcctgatacgagcaatatgggcggcttatccggatgcagttccatttgcctagctacatactgtccatcgaaatgggcgtaccaccatcctctcctgctctggtccgagccgggcctttggaacgggattctgaagaacctctggctgttgttgtccaaaaccggtttttgggcttggacttggcgttggggagtcttcaccgccgactccatgacagaccgaggggcgcgttcgttctcgtccatgatggtgcgtttgcggttcttcgctttccaggcgtggtaaaccttaagacgacgatgaaattcatgccgacaagcttctagcaagtcaatatcacaggaagtgttgatagtatcacgaagttccgagtatttccatttagacaggtcatatttgctattggccaaagtagcttgatggtttctgtgtgcttctgacttgcgaatcataggtggactttcttcaattgatccgttgctttcttgtgctagtcgcaaggccaattccctatcttgcttttcttggtcttcctgttcttggagacgtctttgctcttcttcatccttggcatgctgctcctgaagtttttttgctaataacctatcagcctcttcctgcttccttctttcttcctcctcaattttccttctagcttccatttcagctttaagtctcctgttttcttcctcctccctcagtcttctttcctcttcttcctttaacttcctctgtctttccatctcttcctgtaacttcctcagcctttcctgctcatcagcgatcttctgctcttggattttcttctgtaacgctgccatttgtaggtttaccttgtcggataaggatttgtagaggttttctgcggttgctttatcgattttatcatctttcttaattctatcaatagctgcatcaaactgagtctttaaattattaatgtcattcctcacagagtctttgtcttttttgagctgctgtgcactctgttctatttgtgccaaggttgagttcagttttttgatatttctgagtgtatttattctgggtccatgcttcttcctcacaagataacctctaacgactttctgcatgaatataagttgtttgtttctgtacttgattaagtttttcattttaataaccgtgagagcgcaaaactgtgccttgatccatcttgccctaaccaaccatttcttgacttgattcacaattgctttcaaattctccgtatcagatttcatgatgctatcaaattcggcaaattttccaggtctgaagaacacttttgttacaccaaacttgaaatccttatcatgtagcttcaaggcatgcagcatcgactcgcaaaactgttttggagaaagcatggataactctttgggaagatattgcttgtacatcgaatggagctcgttgaaagacgttctgcttggataaccgtactccatgagttccaggacgttggtcattccagaacacttcagctgcatcaagctcaagtttccatcgaattgctggtctaccattctggagtttggtttaatacaccggataaagttagttccgttgcacctcaatttctccataagctcgcctaactgtatcttgaatttatttcccacgctgctaaaggtaagtttacctttcaacgtggttgatatcgaaaacagggtctgaatgaatttatttttactctcttgaatgattccttcaagggaagcatgtagggcatcattgtttttgtcaataaagtatttcgtttgataacatacagctccggcaaaatgtctaatcaggaacccttcgttgtccctaaggctacgatgagccttaagcttggacgatctgggtagtcctaggcggaattccttaggccaggttttgtgaatttcttcagtaaaatgtgtatacgacgatttaggcagtttggattcctcatcaagaagagttaatatgcccttgttctttgtttcgattaaatctatacagtcttgattgtcaacaaattgaatttccggtacaacaaggccttcctttttgtacagttcttgctcttgtttgaggatcatgtcattgaaaaattgctgcagcttttcattacaatagtttatacagaactgctcaaaactattaacagtgaagaattcaaatccagcaatatctagcacacctatataatagcttgaggcttggaacggtatacttttgtttatcctgttgacgatgtaatcaaacaaattactatagatggctttagctagggcatctctggcgttgttggcttcgtatattttcaaaggtaccataatgacggtacctttcaatccgcctctcgcactctgcatcacgcgcgatatcagcgcttgcttcaattcactgggatctatttccagaagtttggaggccaaaagtagggatttttctccagaagctccaactcggcatccacctctggtatcttcaggattatcttcgaaatcaacgttgcccaaatgcagaacagctgccactgtggagtagatttgtagtctttcactttcgctaatttccagtcgggagagagcttcatccagctctttgaaatctccaacatcgtccaagaggatatccttcagagatccagcttttttgtgagctgcgcttttcctgttggcatctaatgctttttcagacgcgtttgttgtaaaataccttgtgcatccgtgttttaaataattgaagtcatcaggctggctaagatacagcttgctcctcaagccttctggagctcctgccaacaacatataaaatatgtggtagttcctttcgtctccctctgtggaacatatccttgatttttctaaaagatagtgcgatatgtgacccccagcaactttaaatttgttgtcaaagtggacttctatgaattttccaaacctagaactgttgttgtttcttgtagttttggcatttccaaaggcttccagcaccggattagcgtccaaaattttcttttctaaagttccaacttcagctccccagttgtcgcataaatacttcaacaaatgtttcgtagactccgttttaccagctcctgattcaccacttacgataatagattgtgactgcttcaaaactaacatgtccctgtaagctttgtctgctacagcgaagatgtgcggtggcatttgacctagtgattttcctttgtagtttttgatagtttgtgatgcatacagcgtgggaatatctttatagggattgacggctatcaatatgttggctacgtacgagtaaattttgtcctgatagtaacgtgatcgtatgttgtttagtaaggaaccttcattaaggaacatcatttcacagttgtcatcgtagtttttattattgtcatcaatattggctctaaatatttcactaaatggcaagattctctttggaaatttggaactttggggtgtcacttcggcaccatcgtccaggagctcgcttatcttgcccaaaacgtagccctcggtatggtcacgagcccacacgtagtcctccatgttttatctgtgtctgtagccttttgttcactgtgttgttgacaattaggtgtttaaaacaacaaaagtctcgtttgaaaaccgcacaaccacctgtacaaacacc

SEQ ID NO: 4371 - DNA, 4500 bp, Diabrotica virgifera
  SmartBlast Evalue=0; Info=Myosin heavy chain 95F n=1 Tax= Harpegnathos saltator RepID=E2C7U5_9HYME
attaaataaattttatttaaatatatttttttaatttcatatacatatagcttcccttttaatactgtgtaaagcaaaacatacataataataaacactgtaagtaattgactccaatttatcaacaattaatcaaacatttttcgaactaactatacttcattccaattacaaaattgcaaattaagtaaatagcaccaatcagagtacagatatcatctgctaaatgttgactttatattaaatctagtggactctgttaattttttccactttttaatagtcgccgcttcaaaaatacgctaaattcattgttttatctattgttacgataggaaacctcatatattcttacctagaccggctctgaccatcctacttatcattaaactacctcacttctgacaccagtgttacgtttttactaaatttatttaacagtggtgtcaaaattggagtcgtttactgttaagtcaggattgtcaaagcagacctagtcaagaacatgtgcggttgactatcgtaacactactttcgcccacaaaaatactgactgttaatattaataacattccaagtaatgtgaaccaccaactgcattgtctagacaatctgaacatcgcccatgttaactattggaatgaactaaagtgttgaacaaagtaatgaaacacaatctcaaagatgttactggagtccatcaaagagctttactttctgtcagccggacgaacgtacttagtgcctccatttttctcccattccttgttaaactcgttctccaaaatttctgccccacgctttctggttaggccggtttcttcaagggagagttcgcacatttgcatatcgtctttgcctgatacgagcaatatgggcggcttatccggatgcagttccatttgcctagctacatactgtccatcgaaatgggcgtaccaccatcctctcctgctctggtccgagccgggcctttggaacgggattctgaagaacctctggctgttgttgtccaaaaccggtttttgggcttggacttggcgttggggagtcttcaccgccgactccatgacagaccgaggggcgcgttcgttctcgtccatgatggtgcgtttgcggttcttcgctttccaggcgtggtaaaccttaagacgacgatgaaattcatgccgacaagcttctagcaagtcaatatcacaggaagtgttgatagtatcacgaagttccgagtatttccatttagacaggtcatatttgctattggccaaagtagcttgatggtttctgtgtgcttctgacttgcgaatcataggtggactttcttcaattgatccgttgctttcttgtgctagtcgcaaggccaattccctatcttgcttttcttggtcttcctgttcttggagacgtctttgctcttcttcatccttggcatgctgctcctgaagtttttttgctaataacctatcagcctcttcctgcttccttctttcttcctcctcaattttccttctagcttccatttcagctttaagtctcctgttttcttcctcctccctcagtcttctttcctcttcttcctttaacttcctctgtctttccatctcttcctgtaacttcctcagcctttcctgctcatcagcgatcttctgctcttggattttcttctgtaacgctgccatttgtaggtttaccttgtcggataaggatttgtagaggttttctgcggttgctttatcgattttatcatctttcttaattctatcaatagctgcatcaaactgagtctttaaattattaatgtcattcctcacagagtctttgtcttttttgagctgctgtgcactctgttctatttgtgccaaggttgagttcagttttttgatatttctgagtgtatttattctgggtccatgcttcttcctcacaagataacctctaacgactttctgcatgaatataagttgtttgtttctgtacttgattaagtttttcattttaataaccgtgagagcgcaaaactgtgccttgatccatcttgccctaaccaaccatttcttgacttgattcacaattgctttcaaattctccgtatcagatttcatgatgctatcaaattcggcaaattttccaggtctgaagaacacttttgttacaccaaacttgaaatccttatcatgtagcttcaaggcatgcagcatcgactcgcaaaactgttttggagaaagcatggataactctttgggaagatattgcttgtacatcgaatggagctcgttgaaagacgttctgcttggataaccgtactccatgagttccaggacgttggtcattccagaacacttcagctgcatcaagctcaagtttccatcgaattgctggtctaccattctggagtttggtttaatacaccggataaagttagttccgttgcacctcaatttctccataagctcgcctaactgtatcttgaatttatttcccacgctgctaaaggtaagtttacctttcaacgtggttgatatcgaaaacagggtctgaatgaatttatttttactctcttgaatgattccttcaagggaagcatgtagggcatcattgtttttgtcaataaagtatttcgtttgataacatacagctccggcaaaatgtctaatcaggaacccttcgttgtccctaaggctacgatgagccttaagcttggacgatctgggtagtcctaggcggaattccttaggccaggttttgtgaatttcttcagtaaaatgtgtatacgacgatttaggcagtttggattcctcatcaagaagagttaatatgcccttgttctttgtttcgattaaatctatacagtcttgattgtcaacaaattgaatttccggtacaacaaggccttcctttttgtacagttcttgctcttgtttgaggatcatgtcattgaaaaattgctgcagcttttcattacaatagtttatacagaactgctcaaaactattaacagtgaagaattcaaatccagcaatatctagcacacctatataatagcttgaggcttggaacggtatacttttgtttatcctgttgacgatgtaatcaaacaaattactatagatggctttagctagggcatctctggcgttgttggcttcgtatattttcaaaggtaccataatgacggtacctttcaatccgcctctcgcactctgcatcacgcgcgatatcagcgcttgcttcaattcactgggatctatttccagaagtttggaggccaaaagtagggatttttctccagaagctccaactcggcatccacctctggtatcttcaggattatcttcgaaatcaacgttgcccaaatgcagaacagctgccactgtggagtagatttgtagtctttcactttcgctaatttccagtcgggagagagcttcatccagctctttgaaatctccaacatcgtccaagaggatatccttcagagatccagcttttttgtgagctgcgcttttcctgttggcatctaatgctttttcagacgcgtttgttgtaaaataccttgtgcatccgtgttttaaataattgaagtcatcaggctggctaagatacagcttgctcctcaagccttctggagctcctgccaacaacatataaaatatgtggtagttcctttcgtctccctctgtggaacatatccttgatttttctaaaagatagtgcgatatgtgacccccagcaactttaaatttgttgtcaaagtggacttctatgaattttccaaacctagaactgttgttgtttcttgtagttttggcatttccaaaggcttccagcaccggattagcgtccaaaattttcttttctaaagttccaacttcagctccccagttgtcgcataaatacttcaacaaatgtttcgtagactccgttttaccagctcctgattcaccacttacgataatagattgtgactgcttcaaaactaacatgtccctgtaagctttgtctgctacagcgaagatgtgcggtggcatttgacctagtgattttcctttgtagtttttgatagtttgtgatgcatacagcgtgggaatatctttatagggattgacggctatcaatatgttggctacgtacgagtaaattttgtcctgatagtaacgtgatcgtatgttgtttagtaaggaaccttcattaaggaacatcatttcacagttgtcatcgtagtttttattattgtcatcaatattggctctaaatatttcactaaatggcaagattctctttggaaatttggaactttggggtgtcacttcggcaccatcgtccaggagctcgcttatcttgcccaaaacgtagccctcggtatggtcacgagcccacacgtagtcctccatgttttatattctttcaaccaacagtaacctcacagtaactgtattcgtgatcctatgaagtcatccagcaatctcatttatcttatcaaactaattccaccttatcatc

SEQ ID NO: 4372 - DNA, 4575 bp, Diabrotica virgifera
  SmartBlast Evalue=5E-10; Info="Glutamic acid-rich protein, putative n=1 Tax=Pediculus humanus corporis RepID=E0VDK4_PEDHC"
agcgaagagagcaattaaagatgtctgcagctgttgggactcactcgggggccggccctctgagtctgatgtcctgcgtgcgcgagtcatcaccattgcaagatttcgactccgacacagaaaaaagtgtggcgtcgaaaagaaggttttggaatccgaagaaatggttccgaagaaaaacaaaaacagcaatgatgaagtcgtcgttgtagaagttaccgaaatcggaaaggatgcgctgcgtagcaggtctaccagcgaactttccgtcgccgaggaagggagaagaagatcgtcctcttctatgcaccctggcctcagcgtttcccacgacagcgttttccattcgccaaactcaggttctgatatggaactggatgctgcacaaagttcatcatctctgtcgatatcacagcctcacgtcgatcttagattgcagagtgaattaagtgagagattgagactaaggcgaggaggacgaggtgacaccagcgaagatgacgaaggtcttccgcatagcccatgcaactcaccaactgcctccgatggactccttgttgaaaagactgcaaataaagatctccctacgaaatcacatagtacctgtagcgatggatcgttacagagtatgggtagttatgatgatgacgactccttcgaacacgtgcaaacaagacattcctcgaaattatcgttgcatgataagaaagattcgtacacagaattcggacccgattctacaacctcacctcttaaccatagcgcagcacaccatagagtatcggtaaagccaaaaaggacacacggagcgccgagaagaagacgaacgcaacagctttccacggcactaccagtcacaccagaagtcaatgaagattcgtcaattagaagtacatcaccagaagtacataaaaaaggttccgcagatagcaagttgaaccgaagcaagtcaaatgccgggagcaaatcgcaagacctcttctctcagttaccggaggacgccaacgaaaaggaagagaagctctccctattcgacaggatattcccgagaaagagcggaaggaagaagaagaaggaggggaaggagaaagcggacgagcaggttgtcgagagcttcgagcaagcaatagaaacttccaggcaagaaactgtgacagactcgggaaaatcatacatggaaagttcttcagtagtaacaaagaaagtagaaaccaagccgataccagccccacgttctggggcagctatgagacagagagtgatacctatggatataagcgaaaatgtggacgaacctaagagagagcctcttcttccaaaattatcaccagagcctacgattgaaggtacttccccattacaggctgaattggagagtatatttaaacaaagacagatctccacgagcccaataccgtttccaagagttgcagatacctcgccgtcgcctaaaagtcctgtttccccaagactaccaagaaatcttcaaagccccaacataccaactgtgatatcctccaaatatgattactcccaagtatcaaggcactctaccaacatgagattcacggaaacaaaagtcaaaagcgacgaaaccagacacaaactaaaaatgccagctctgtcttctttgcaacaacgtgtcttatctttaaacgaagaagacaatgagaacagcttcatgtctttgactgatcttcaaactgagaacaaaccttcccgacctatctccaagtcacacagttttaaagctgtaaaacatcaacctttcagccctgaaagaaactacgaagatgttaaaaataaaacagcgaattttctggacttggaaaagaaagaagacagtaaaatttcttttaccaaagctgcttccttggatagtgtaaaaaatttcgacgagacaatgcatctatccgaggtcaagatagaactgaagaaaaaacctttgaattttaagactgaagaaaaacatgtagaagtttcttctagcctgggagattcctctataactatttcagggccaagtcacacagctgttgttaacgtcaccagcaatgttgatgactacaatagtttatcgaaaaccaaacttccgaacaaatcgatggctctactactatatccataaaagaacagcaggtttcggttaccaagatacaagtcaaacgagaaactactcaagtaactcagagttctattacagtaccggagtttatgaacaaacaactcaataaagttgaaatcaaaccatctagcaatatcgtattttcaatgaaatcacccaaaccagctgaagaacaaaacagacctaagactttatttacgtttgatgtagagactgatgtaactgccaaaccacctactcctaggaaatttagcaaggacaacgttgaaattatcgagaaagacgcatcttcgcctaaaacttccccaattataacggttaactctcctattagattgaagaaaagtgattccaggaaatcttctattacttccaatacttccaacatagagtcacctgtacgggagagagctatgtttaagagtaaatctgccagcttagattccttgaatgatactgacaagtcatcgcaagatagtctggataaacttgaagctagatataaagaaaaggacagtcctctaagtgaaacggtcgtgctacgtagaaaatctgtagctacaaagaagaatgaagaggaaccagaactaatgaaagtttttgcaaggcgttccttgaagattaaagacagtgatgttgacgctcttcaagattctttgaaagacatgaaagctagagatagcgataaagaaaatcaaatggattctcctgtagaagaacgaaagaaaacagagagcttcgagactcaagccattgagattaagaccaagattgaagagaaactagaagttaagtctccagttaaagagccttcagttgacaacaagacttcccctgtagtattaaggaggactctaaacaataatgtatttttgggacaacgggctgtgactatcaatcccacgaagaactccgatttaataatcaagaagcaaatgggtttcagcgaacatagaaagaccgaccaatggatttctaatattaagaacgaagatgcaaacacgaaagaagacgatttactaagtaacattccatcaggtggggattttattatggaacctaagaacaactttagtcagagaaaggcggaatgggagaagagggcgcaacaggcacagaaaaagactaccccttaaattgggtacctacctacacgtgaagccaccacccatcttccattttgttatagttatgtttgtttttattgtaaatatatttgtttatacatatgtagcagtcaacatcacaattttgttgaaaaattgtcttttttattggttagttggtgccattgtgataaaaaccagcatttattatgtgtatcttgttttaaatgtagatagataagtgcctttttacggagaattttatctagatccaaaaagattgttaaatcacagacatgatcaaaaaggggaagtttcttaagcgatcaaacgacaaagacagtgcacatgtatgtcatcccttcttagttttatcttttaatacaatttgaaccatacgttgctccaataagtagtgcagaatcaataaagaattgtacaaatactcaaaacatagctttgcatacccaattttatcaaagttatgttgaaaaatacaaagccaatatttggaaaaatctttttacgtggtaggacgaagatttaacactttcctgacagtctacagatttttatcccgtattaccgtatctattatgatataaagtgatgatcgtgctaataaccgcagaataacgcaaaagatggaaaacataatggattgcgaagtaaagagagatgcaacgagtagaggtggaaattatcggtataaacgtataaattaacattacattgcacagtttcccacctttagacatctgtcactagagtattttataaaattttcctgtcacagtgacagttgtcatattccttcgatacgtctaaagatgggaaactatgtaatgtgatgttgatttgtacgtttatatcgattatttccaactccactagtttcatttttttttatctcacaacttaatgtgttttctatcttttgcgttattctgccggttattagctcgctcatcactgtataaccattttaaactgtcggctatttggattagttcgagattttaaaaatcagtttctatttttgtcatggtttcaacaagagaaacgttgatttcgaaataaaccagaagcaccgcggcggatccacctaggggatgggagaatttctccaccccaacaatatctagcattatagaaaaacaatgttgaaatgtaaacaacatttgtatcaaaagtattccgatggtgggtgttaacggaatcaattaaaaataagtgtaaacaatatttattttattttggttaaaaagcgtgcttatgcatctcgtaagagggttgtttattgttttggggcagcgagggtgcgtctgaactgcctgcctgctg

SEQ ID NO: 4373 - DNA, 4368 bp, Diabrotica virgifera
agcgaagagagcaattaaagatgtctgcagctgttgggactcactcgggggccggccctctgagtctgatgtcctgcgtgcgcgagtcatcaccattgcaagatttcgactccgacacagaaaaaagtgtggcgtcgaaaagaaggttttggaatccgaagaaatggttccgaagaaaaacaaaaacagcaatgatgaagtcgtcgttgtagaagttaccgaaatcggaaaggatgcgctgcgtagcaggtctaccagcgaactttccgtcgccgaggaagggagaagaagatcgtcctcttctatgcaccctggcctcagcgtttcccacgacagcgttttccattcgccaaactcaggttctgatatggaactggatgctgcacaaagttcatcatctctgtcgatatcacagcctcacgtcgatcttagattgcagagtgaattaagtgagagattgagactaaggcgaggaggacgaggtgacaccagcgaagatgacgaaggtcttccgcatagcccatgcaactcaccaactgcctccgatggactccttgttgaaaagactgcaaataaagatctccctacgaaatcacatagtacctgtagcgatggatcgttacagagtatgggtagttatgatgatgacgactccttcgaacacgtgcaaacaagacattcctcgaaattatcgttgcatgataagaaagattcgtacacagaattcggacccgattctacaacctcacctcttaaccatagcgcagcacaccatagagtatcggtaaagccaaaaaggacacacggagcgccgagaagaagacgaacgcaacagctttccacggcactaccagtcacaccagaagtcaatgaagattcgtcaattagaagtacatcaccagaagtacataaaaaagcaatagaaacttccaggcaagaaactgtgacagactcgggaaaatcatacatggaaagttcttcagtagtaacaaagaaagtagaaaccaagccgataccagccccacgttctggggcagctatgagacagagagtgatacctatggatataagcgaaaatgtggacgaacctaagagagagcctcttcttccaaaattatcaccagagcctacgattgaaggtacttccccattacaggctgaattggagagtatatttaaacaaagacagatctccacgagcccaataccgtttccaagagttgcagatacctcgccgtcgcctaaaagtcctgtttccccaagactaccaagaaatcttcaaagccccaacataccaactgtgatatcctccaaatatgattactcccaagtatcaaggcactctaccaacatgagattcacggaaacaaaagtcaaaagcgacgaaaccagacacaaactaaaaatgccagctctgtcttctttgcaacaacgtgtcttatctttaaacgaagaagacaatgagaacagcttcatgtctttgactgatcttcaaactgagaacaaaccttcccgacctatctccaagtcacacagttttaaagctgtaaaacatcaacctttcagccctgaaagaaactacgaagatgttaaaaataaaacagcgaattttctggacttggaaaagaaagaagacagtaaaatttcttttaccaaagctgcttccttggatagtgtaaaaaatttcgacgagacaatgcatctatccgaggtcaagatagaactgaagaaaaaacctttgaattttaagactgaagaaaaacatgtagaagtttcttctagcctgggagattcctctataactatttcagggccaagtcacacagctgttgttaacgtcaccagcaatgttgatgactacaatagtttatcgaaaaccaaacttccgaacaaatcgatggctctactactatatccataaaagaacagcaggtttcggttaccaagatacaagtcaaacgagaaactactcaagtaactcagagttctattacagtaccggagtttatgaacaaacaactcaataaagttgaaatcaaaccatctagcaatatcgtattttcaatgaaatcacccaaaccagctgaagaacaaaacagacctaagactttatttacgtttgatgtagagactgatgtaactgccaaaccacctactcctaggaaatttagcaaggacaacgttgaaattatcgagaaagacgcatcttcgcctaaaacttccccaattataacggttaactctcctattagattgaagaaaagtgattccaggaaatcttctattacttccaatacttccaacatagagtcacctgtacgggagagagctatgtttaagagtaaatctgccagcttagattccttgaatgatactgacaagtcatcgcaagatagtctggataaacttgaagctagatataaagaaaaggacagtcctctaagtgaaacggtcgtgctacgtagaaaatctgtagctacaaagaagaatgaagaggaaccagaactaatgaaagtttttgcaaggcgttccttgaagattaaagacagtgatgttgacgctcttcaagattctttgaaagacatgaaagctagagatagcgataaagaaaatcaaatggattctcctgtagaagaacgaaagaaaacagagagcttcgagactcaagccattgagattaagaccaagattgaagagaaactagaagttaagtctccagttaaagagccttcagttgacaacaagacttcccctgtagtattaaggaggactctaaacaataatgtatttttgggacaacgggctgtgactatcaatcccacgaagaactccgatttaataatcaagaagcaaatgggtttcagcgaacatagaaagaccgaccaatggatttctaatattaagaacgaagatgcaaacacgaaagaagacgatttactaagtaacattccatcaggtggggattttattatggaacctaagaacaactttagtcagagaaaggcggaatgggagaagagggcgcaacaggcacagaaaaagactaccccttaaattgggtacctacctacacgtgaagccaccacccatcttccattttgttatagttatgtttgtttttattgtaaatatatttgtttatacatatgtagcagtcaacatcacaattttgttgaaaaattgtcttttttattggttagttggtgccattgtgataaaaaccagcatttattatgtgtatcttgttttaaatgtagatagataagtgcctttttacggagaattttatctagatccaaaaagattgttaaatcacagacatgatcaaaaaggggaagtttcttaagcgatcaaacgacaaagacagtgcacatgtatgtcatcccttcttagttttatcttttaatacaatttgaaccatacgttgctccaataagtagtgcagaatcaataaagaattgtacaaatactcaaaacatagctttgcatacccaattttatcaaagttatgttgaaaaatacaaagccaatatttggaaaaatctttttacgtggtaggacgaagatttaacactttcctgacagtctacagatttttatcccgtattaccgtatctattatgatataaagtgatgatcgtgctaataaccgcagaataacgcaaaagatggaaaacataatggattgcgaagtaaagagagatgcaacgagtagaggtggaaattatcggtataaacgtataaattaacattacattgcacagtttcccacctttagacatctgtcactagagtattttataaaattttcctgtcacagtgacagttgtcatattccttcgatacgtctaaagatgggaaactatgtaatgtgatgttgatttgtacgtttatatcgattatttccaactccactagtttcatttttttttatctcacaacttaatgtgttttctatcttttgcgttattctgccggttattagctcgctcatcactgtataaccattttaaactgtcggctatttggattagttcgagattttaaaaatcagtttctatttttgtcatggtttcaacaagagaaacgttgatttcgaaataaaccagaagcaccgcggcggatccacctaggggatgggagaatttctccaccccaacaatatctagcattatagaaaaacaatgttgaaatgtaaacaacatttgtatcaaaagtattccgatggtgggtgttaacggaatcaattaaaaataagtgtaaacaatatttattttattttggttaaaaagcgtgcttatgcatctcgtaagagggttgtttattgttttggggcagcgagggtgcgtctgaactgcctgcctgctg

SEQ ID NO: 4374 - DNA, 5434 bp, Diabrotica virgifera
  SmartBlast Evalue=0; Info="Talin-2, putative n=1 Tax=Pediculus humanus corporis RepID=E0W1B5_PEDHC"
gatctagtgaccagccttgaagctatttctacacagagtggtatagtgtctggtgtagttgataatctcacaagagccatgactcgattgtcggatagtcgtgcttctctcatcttatctgatggtgatattggattcgttgattaccaaacacgaatggtggactgtgcgaagagtatagctaaaatcgccggagaaattgctagcaaagctgccactgaccctcagaaggtggctcaattatctgcagatcttgcgcacaaatatgcacaactatctggcgatagtattggagctgcagcagctgccactaatgccgaagttgcaatcagactaagggaagttgttcaacaactgggtggcgcctgcgtagaactcgtccaaacaggaggccagtgcttagtccgaaaagatgacgtactcttgcgagaagtaggagattgctcacgcaacgtaactgagaaagtttcccgtgttcttgccacattacaaaacgaatccagaggtacccaagcttgcatcaatgcagcttccaccgtatctggtatcatcggcgatttagaaactaccatcatgtttgccactgccggaaatctcaatcccgaaagcgaacatgaatcgttcgctaatcacagagagaatatattgaagactgctaaggcgttggtagaggatactaagactttggtagctggcgcagcttcatcacaagaacaactggctgtagctgctcaaaattctgttgcgaccatagtacaattagccgaagtagtgaaattcggagcagccagcttaggcgttgacaatccagattcccaagtgatgcttatcaacgcagtacgtgacgttgccagtgctcttggtgacttgattcaagctactaaggctgctagcggcaagcccatcaacgatccggccatggctcatttaaaagacagcgcaaaggttatggttacgaatgttacatcattgcttaagaccgtcaaagcagtagaagatgaacataccagaggtaccagggctttggaatccaccgtagaagccattggacaggaaatgaaggcactatattcaagtgaaggctacagacagggagttgtagcagaagagttaatacgctgcaccaaagcattaacgaacgcgacagcaaaatgtgttgcagctggtattagcaacaaacaagacgatatcattgcagccgccaatctttccagaaaggctatctcagacatgttaataatttgcaaaagtgctgcctacagcttggcagaaactccagaattaagaacagaaaccttgaatgccggacacgattgcgcgaaacaattcagagaacttctgcttcttatcttgcgagacagtggcacaactgaagtcaaacaaattttgcctttgacgtcgagaaagattgcacagagcgttaccgaactgctgagtgtagcaaagaggctgaaaggttctgattgggttgatccagaagatcctacagtcattgctgagaatgagttgcttggggcagctgcttccattgacgctgctgctaagaaattggccagtcttagacctagacaaaatattaagactcaagacttggacgagtcgttgaacttcgacgaaatgattctagaagccgccaaatctatcacagctgcaacctcagcacttatcaaggctgccagtgctgcccaacgtgaactaatagatgcaggaaagatgtctggtacgcctgtttcatcatctgacgacggccagtggtcagaaggtctaatatcagccgccagattagttgcagctgcaacacacagtcttgtagagagtgcaaatgctttagttcaaggactgggcagtgaagacaagctaatagcggccgctaaacaagtggcgagctctactgctcaacttttagtcgcatgtaaggtaaaagcagaaggtgatacagaagcaaccagaagattgcacgctgctggtaatgctgtaataagatctaccgataatttggtaagggccgctcaacgagcgaagagtgtggaagaagaaagatacttaattttgaataagaaaatggttggtggaattgcacaagaaattaacgcaagatctgaagtactgaaaaaagagagggaattagaagaagcccgtaacaaactcagtgctattcgccaagctaagtacaaattgaagggatacgacacttcaggtgatgacactgatggttacattagctcagcagccgaaatggattcatcttcaatgagcgtgagggttgttgttactaaagaaattaacagacagtattaagatacaaccagagctatgactaccaatcacattcaagccctcatcagagatactaccaagataattattcccaattagaaagccccgagaaagttaattccctcgaacgaaacaaaaatgccctaaaatcccaaataaaggacctggatacggcgacatacggttcaaccaatacttacggacagcaagattataattcatatttgccgacctcccccaggttttacccgaaagacacttacacaagcactcctagtcatttgagaagttacgaacctcaaaaaacagattcgtattatccacccgtagacacaaacacgaagtattactcagatggatactcgagctctgaatatatgactaacagttacaaaactccagaaggctacaaagtgaatacgtacaaatacgaaagttatcaagcgcctccacagcagacgtattcttctagcagcgaaaagtactacaccagtgctccagctgttatttctccaatttctcccagagacaaaaagacgttcgaaacgttcaaaaacggtgcagattcacagtactcgactcagtatgcaacgaacgttgagtatattaacgaacctccggtatttcgagacgacgaaacgctagaacaaaaaatgttaaagaagtctattactcaacaaatcatcgagaagaaaaccgtatccgtgacgaagagcagtaaggaagagtcatctacaaagagttttagatttgaatgagttttagctaacgtacaaagcataaaaggtaggaattttaagtatcacacttaaatgaacaagttgattatatttatatttaaatttgtatttttttagccaacgatgacttttgttcatgtataaatttgtcaaaatttctattttcctcttaatatatcttacacttcctcctaattgtctgaaaaaatcattaaatgctctaaattttacacaataatcagtaaaaaatgttcagtaatgttaaaaaaggaagtatgtactgtaagatagtccctcggaaaccaaataaataacaaccgaataggaactaatttatctagtaaagctactcaattgcttacctaaccagttatttaaactaccagttaattcactctcgaattttgatggttccaattttgcaatctactcctgagacaaaattttgaatgcgcaaaggactaggaaaaaaatggcgctgttgcaagacttaaaatattccattttattgatttaagaacatgaccctcacataagaatattaataataagaaatggctaaatctggatttaaatttttgggagatacacctgcacaccaagtcatctaaggctagggctcgataacatgggaagagtcccaccagagctcaatccttttgataccgtaggtatctgggatgagccaataagagggagtgtgagttttatggctaaatctgagaaaacaaagtagtaaaataaaccataggcgttcttatttggtttaaataaagtcatgagaacttcctcaattataacctcaaaaaattcatgaaagtcagatgacgataaccaaggagctgtcatgcgtctgcgcgaagaactaaaatgtttgacgcgccgtcaccaaaatggaacatggagaacaaaggattttcgcggagtgaccctactgattatttagcattatactaatctcaaacacattaggtttgttctagcatcagtttcaagcggtttgaaatcatcagaagcatgcgcatttgtttgatggcgtttaagcacacaaattactagtttgaaactactagtccagcgttctaactttgatttggaaactagcttgcgacggtcaaaagggtttgcggattttgttctgagtcaatttgtgacttgcgaggtggaattattgtttgaggtttataaatactaaatgaaaatgatatgttttgactgtttgttacttaccattatttacgtttataacattaattttctcacaatggaacactgaagcgtttgtttttctatacttccacaaaattttgtggaagtatggaagaacaaacgtttttcagtgttttattgtgagataaaatgaacttccatcaagtaacggtcgaatccatcaattacattgattttcaatatttaacgtaaatcttgaaaatttggataacacaagaaaaatatatttctaatctaacctcaaaattataaataaaaacaaacatgaaccagtctcatttgacgttagtattttctccgaaaaaaaagcgttctagcaaaaaacagtttgctaccagtttgtggattgaacatgcgcagtaaagcagtacaatatctggtgtcaaaccatacaaaactacatgctagaacaaacctattatctatttagtcagattccgtttagtctatttatccagtcaaacagattccgttatttgtttcggttttcgtttattgcatcagggatttatgatgtattaaaaatgtttctttttatgtaaaattattcctttattttaacgactcaaagcatgtatgtataaagtttgaatgtttctgtgtggatgacgatagtacaatgaaatcaatagaactgcttaggttggtgatattttcattggttatttttttcttgggacatttgatgattggtttggacttgatttagaagaatacgtacctgctataattttagaatgcattggcggtactacagtgaggctgtacttaacaaaaatataaatattttttatctatacacacacaggtttaaaaattgaaatttgcagatatatacatgaacagatttttctttaaacttttcttgcgacacgggtatgtaaaattcaataggaagccacttcctaacatttgcttggaaatcatttatagtgtgatagtgttcagtgcactgccttttatttattgcagtttttttttgtgtttttattaaatgtatattgttttgtatttgtaagtgaccttactatggtgctaatatgtttgcttgtcccatttacatacttaaccaaaaatgatgtaagtgccaataatattgcttaagcttttaagaaatgtttatatttttaattacttgtacattaaaatggatattgtattttaaaccaaacatccgaaagtgccta

SEQ ID NO: 4375 - DNA, 3243 bp, Diabrotica virgifera
cagtgctattcgccaagctaagtacaaattgaagggatacgacacttcaggtgatgacactgatggttacattagctcagcagccgaaatggattcatcttcaatgagatacaaccagagctatgactaccaatcacattcaagccctcatcagagatactaccaagataattattcccaattagaaagccccgagaaagttaattccctcgaacgaaacaaaaatgccctaaaatcccaaataaaggacctggatacggcgacatacggttcaaccaatacttacggacagcaagattataattcatatttgccgacctcccccaggttttacccgaaagacacttacacaagcactcctagtcatttgagaagttacgaacctcaaaaaacagattcgtattatccacccgtagacacaaacacgaagtattactcagatggatactcgagctctgaatatatgactaacagttacaaaactccagaaggctacaaagtgaatacgtacaaatacgaaagttatcaagcgcctccacagcagacgtattcttctagcagcgaaaagtactacaccagtgctccagctgttatttctccaatttctcccagagacaaaaagacgttcgaaacgttcaaaaacggtgcagattcacagtactcgactcagtatgcaacgaacgttgagtatattaacgaacctccggtatttcgagacgacgaaacgctagaacaaaaaatgttaaagaagtctattactcaacaaatcatcgagaagaaaaccgtatccgtgacgaagagcagtaaggaagagtcatctacaaagagttttagatttgaatgagttttagctaacgtacaaagcataaaaggtaggaattttaagtatcacacttaaatgaacaagttgattatatttatatttaaatttgtatttttttagccaacgatgacttttgttcatgtataaatttgtcaaaatttctattttcctcttaatatatcttacacttcctcctaattgtctgaaaaaatcattaaatgctctaaattttacacaataatcagtaaaaaatgttcagtaatgttaaaaaaggaagtatgtactgtaagatagtccctcggaaaccaaataaataacaaccgaataggaactaatttatctagtaaagctactcaattgcttacctaaccagttatttaaactaccagttaattcactctcgaattttgatggttccaattttgcaatctactcctgagacaaaattttgaatgcgcaaaggactaggaaaaaaatggcgctgttgcaagacttaaaatattccattttattgatttaagaacatgaccctcacataagaatattaataataagaaatggctaaatctggatttaaatttttgggagatacacctgcacaccaagtcatctaaggctagggctcgataacatgggaagagtcccaccagagctcaatccttttgataccgtaggtatctgggatgagccaataagagggagtgtgagttttatggctaaatctgagaaaacaaagtagtaaaataaaccataggcgttcttatttggtttaaataaagtcatgagaacttcctcaattataacctcaaaaaattcatgaaagtcagatgacgataaccaaggagctgtcatgcgtctgcgcgaagaactaaaatgtttgacgcgccgtcaccaaaatggaacatggagaacaaaggattttcgcggagtgaccctactgattatttagcattatactaatctcaaacacattaggtttgttctagcatcagtttcaagcggtttgaaatcatcagaagcatgcgcatttgtttgatggcgtttaagcacacaaattactagtttgaaactactagtccagcgttctaactttgatttggaaactagcttgcgacggtcaaaagggtttgcggattttgttctgagtcaatttgtgacttgcgaggtggaattattgtttgaggtttataaatactaaatgaaaatgatatgttttgactgtttgttacttaccattatttacgtttataacattaattttctcacaatggaacactgaagcgtttgtttttctatacttccacaaaattttgtggaagtatggaagaacaaacgtttttcagtgttttattgtgagataaaatgaacttccatcaagtaacggtcgaatccatcaattacattgattttcaatatttaacgtaaatcttgaaaatttggataacacaagaaaaatatatttctaatctaacctcaaaattataaataaaaacaaacatgaaccagtctcatttgacgttagtattttctccgaaaaaaaagcgttctagcaaaaaacagtttgctaccagtttgtggattgaacatgcgcagtaaagcagtacaatatctggtgtcaaaccatacaaaactacatgctagaacaaacctattatctatttagtcagattccgtttagtctatttatccagtcaaacagattccgttatttgtttcggttttcgtttattgcatcagggatttatgatgtattaaaaatgtttctttttatgtaaaattattcctttattttaacgactcaaagcatgtatgtataaagtttgaatgtttctgtgtggatgacgatagtacaatgaaatcaatagaactgcttaggttggtgatattttcattggttatttttttcttgggacatttgatgattggtttggacttgatttagaagaatacgtacctgctataattttagaatgcattggcggtactacagtgaggctgtacttaacaaaaatataaatattttttatctatacacacacaggtttaaaaattgaaatttgcagatatatacatgaacagatttttctttaaacttttcttgcgacacgggtatgtaaaattcaataggaagccacttcctaacatttgcttggaaatcatttatagtgtgatagtgttcagtgcactgccttttatttattgcagtttttttttgtgtttttattaaatgtatattgttttgtatttgtaagtgaccttactatggtgctaatatgtttgcttgtcccatttacatacttaaccaaaaatgatgtaagtgccaataatattgcttaagcttttaagaaatgtttatatttttaattacttgtacattaaaatggatattgtattttaaaccaaacatccgaaagtgccta

SEQ ID NO: 4376 - DNA, 4337 bp, Diabrotica virgifera
  SmartBlast Evalue=0; Info=Canalicular multispecific organic anion transporter 2 n=1 Tax=Culex quinquefasciatus RepID=B0W304_ CULQU
tttgtacttaaaatatttatttagcataatatatacaattttattactacaattaaataatttactagtttaatcacattcattcttcaatcagcaaattcttatcaaacgtatttttcgcaactgttttcaattgctcacacgtaccaggaccagtgtcctccaccatcttagagaagataccgttggaattctgaagtaaaagatgtgggtggtcaaattctgctgctgttccctgatccataaccaatactttgtcagaatccatgatggtgttcagtctatgagctacggttaggacagtacaatttgcaaatttggttcgtatggtcttctgaatgagagcgtcagtctgagggtcgacgtttgctgtagcttcatccaacatgaggatcctattattccttatgatagcacgagctaaacaaatcagttgtctttgcccgacactgtaattggaacctctatccataactctattttctaatctgttaataatgttattgggatctttcagctccacttcgtctaatactttgtacagttgttcgtcggagtattcttcaaatggatctaagttgtaccgaagcgtacccgaaaataaaacagggtcttgaggaatgatggaaattttcgatcggaggtccctcaagtaaatgtctctcgtatcgatatcgtcaattgcaattttgccctctacgttagctagtctaaatagagcagcgattaaagatgatttgccggcacccgttctaccaactattccaactttttccgttgccttaacatttagagacaaatcttttataatcgtaggaccaccttcgaagtattggagcttaacattttgaaaatcaatctttcctgaactgggccaattcttgggaagtggctttggatttttcggttgaggttcaggtggaagttgttcgtattccagaactctttcgaccgacatcatctggttagatatgtcagctgtcattcgcatagccatttgaatcattccggttaaggtgctagcttgagacactgccagacccacagttcctcccgttagtcccatagctttatcgaacgtaagtatgctgaatattagtactgctataaatatatttgaacacatacttaaactgattccaaaagctgcaccgcacgtgaaattcatgaatccggcactgatatggtaattttgaattttatcgaattctgcctgcagaattttctctgttcttagtgccctgattgttggtaatccttgtaaagttgcacttaggtgagtaaacactggacttttcagtattccttccactctctttaaatttttcgaggtttttaaataaatatttcttaagaaaaatgcagctattgccaaaattaaggccattgcaattgcgtatggattggcaactcctactagaatgagagatccaaatatttgcaagatcatctgacctccatccaaaagtactcttggtatactctcatcaacacttccaatatccttagcaaatctgttgagcactctgccgctaggattagtatcgaaaaatctcattttagcataaatgacacctttgaacaaaatttggtgaagattgcgtgaacaagacataaccaaagaataaaacgaaaatgatcttcctaaagtcatcaaaattgaaatggatataagtatgccatagatgtaaagacattcctcagtagtccaagcaggaaattggatccaagcttgtggttcgagttttacagtggtatttaatgtatttaatgctgcatcacttaaagtagtagaaggaatagttgaaggaaaatcagctaggacgacagttgaatttatattattggaagcaattgtggtagaaatatcctctagtaaggtagatgaactattcgattctaataagatactagcactggttctttcatcttcaatatttgtccagatacttaagaaataatctaccatgctactggaaacttgtactaatacgtaaagagataaaatgagaaagacgttgaaacaattggctccagtcctaaagtatcttaaaagtaaggatcctaaaactttgcccttcgatgattcttcttgcatatctcgcatctccaattttttggtgttctcttcatcttcactatcttcgtcactatcttccattaaaccttctacgattgtcttttcacttatgatacttgtcatcgacgattttctactctttcttgattgtctagaaacttgtctggcaaattcaatttgcttaactttttcctcttctgttatttctggttctttcgttaaaagttgagcgtataaattgtcactattagcaagatcattaaatgaaccttcgccttcgattcttccattgtttagaataattatgtgactagcatttttcaagtaatgtacttgatgtgtaactaaaactcttgtcttattttttaaaaatccattaatacattcatcgtaaagtactttagacacgtgtatatccacagctgacaagggatcgtccaacaaatatatatctttttctctatacacagctctagctaaattgattctcgctttttggccaccgctcaaagaagctcctttatctccaacaacagtcatatcccgatctttgaactgctccaaatctctttccagagcacaaacacgaatgacttccttgtatcgttttctatcatagtcagctccaaacaaaatattttgccgaatggtagaggaaaatatccaaggttcttgtgaagcgtaggagtaagttccgttggcatttatggatcctttgtctatatccagctcacctaataacgtctgaagaagtgagcttttaccggcaccaactggtccaataacacctagtagctttcccttgttgagctctaaagtaatatcattaagtacacaatcgctcaatgaggcatcccatttagcatagatgtttttgagagataacattgattttgagttttcattcggatctgagcttatcttattttgatcgtacttgtattcatcattttcaaggaatttttgaagacgggcgattgacgtgaacatctcagcgatttctgcaattcctcttgtcaaaataccagttaaagtcatagatagcatgttgaagtatgaaataagtacaaataccttcgctgccgttatttctccaccagttaatgtaatagtaacaagcgtagcaaatagagccaatttggtcgtaaccattcccaaagtcataaaaagagccctgatgtatgaattttttttaattattttaatttctgcctttcttgccaatccaattactttttggaaaggaatttcccaagcatacattttgataacttgaataccaagaatgacttcgtccatcagcctgattctttcatctgttctcagagcagtcatcttcctgaattttgttgccagtttagcggatgttgcttgtaaaggagacattataagtatgactaatattccagctattcctggcagttgtgctctttgatataaaaagtaaataacgggtattgtggagactggtccaatccacagctgatggatcatcattgatgcgaagtcaaaccttgcgacgtcgttggagaggagatttacaacctttcctgcaggtgtgtctcccagagcagttctactgagtcgagttgcttttcggtatattaaagcacacactgaagatcgaactttcatccccgcatgggctgcattagtcatgtactgattcattaaaatagaagaggtcaaagacattatcaccataccagatccataaaagtatgcttccaattttgattttttagatccaggagtgtaatagtccaaaactccacctaacatagatggttgaaacgatcgtatacctatatcagatactgcagctataattcctatgaggagatattctaaccagaaggttctgacgacggctttaaatagactaggtttttctttttttgttttgttttaccagttctaattctctattccaatttttttctaatctatctcctaaatattcgcttctatcacttcttagtgtattatatacatcctctacgcctatctgttttttcataccagttctaaatgttggtattgtaaacccaaaaaacataattgataagatcccagcagtttccctgggattgggattgttttgcacctccgtcgaatccatcgctgattacaaaatatattttatttcacacaaaattctgtaggtataataaatttaatgtgttaatacctaaaattcttctttttcatattcagtggaggacgagctttggtatgatatgataagcgtgtaacc

SEQ ID NO: 4377 - DNA, 4329 bp, Diabrotica virgifera
  SmartBlast Evalue=0; Info=Canalicular multispecific organic anion transporter 2 n=1 Tax=Culex quinquefasciatus RepID=B0W304_ CULQU
tttgtacttaaaatatttatttagcataatatatacaattttattactacaattaaataatttactagtttaatcacattcattcttcaatcagcaaattcttatcaaacgtatttttcgcaactgttttcaattgctcacacgtaccaggaccagtgtcctccaccatcttagagaagataccgttggaattctgaagtaaaagatgtgggtggtcaaattctgctgctgttccctgatccataaccaatactttgtcagaatccatgatggtgttcagtctatgagctacggttaggacagtacaatttgcaaatttggttcgtatggtcttctgaatgagagcgtcagtctgagggtcgacgtttgctgtagcttcatccaacatgaggatcctattattccttatgatagcacgagctaaacaaatcagttgtctttgcccgacactgtaattggaacctctatccataactctattttctaatctgttaataatgttattgggatctttcagctccacttcgtctaatactttgtacagttgttcgtcggagtattcttcaaatggatctaagttgtaccgaagcgtacccgaaaataaaacagggtcttgaggaatgatggaaattttcgatcggaggtccctcaagtaaatgtctctcgtatcgatatcgtcaattgcaattttgccctctacgttagctagtctaaatagagcagcgattaaagatgatttgccggcacccgttctaccaactattccaactttttccgttgccttaacatttagagacaaatcttttataatcgtaggaccaccttcgaagtattggagcttaacattttgaaaatcaatctttcctgaactgggccaattcttgggaagtggctttggatttttcggttgaggttcaggtggaagttgttcgtattccagaactctttcgaccgacatcatctggttagatatgtcagctgtcattcgcatagccatttgaatcattccggttaaggtgctagcttgagacactgccagacccacagttcctcccgttagtcccatagctttatcgaacgtaagtatgctgaatattagtactgctataaatatatttgaacacatacttaaactgattccaaaagctgcaccgcacgtgaaattcatgaatccggcactgatatggtaattttgaattttatcgaattctgcctgcagaattttctctgttcttagtgccctgattgttggtaatccttgtaaagttgcacttaggtgagtaaacactggacttttcagtattccttccactctctttaaatttttcgaggtttttaaataaatatttcttaagaaaaatgcagctattgccaaaattaaggccattgcaattgcgtatggattggcaactcctactagaatgagagatccaaatatttgcaagatcatctgacctccatccaaaagtactcttggtatactctcatcaacacttccaatatccttagcaaatctgttgagcactctgccgctaggattagtatcgaaaaatctcattttagcataaatgacacctttgaacaaaatttggtgaagattgcgtgaacaagacataaccaaagaataaaacgaaaatgatcttcctaaagtcatcaaaattgaaatggatataagtatgccatagatgtaaagacattcctcagtagtccaagcaggaaattggatccaagcttgtggttcgagttttacagtggtatttaatgtatttaatgctgcatcacttaaagtagtagaaggaatagttgaaggaaaatcagctaggacgacagttgaatttatattattggaagcaattgtggtagaaatatcctctagtaaggtagatgaactattcgattctaataagatactagcactggttctttcatcttcaatatttgtccagatacttaagaaataatctaccatgctactggaaacttgtactaatacgtaaagagataaaatgagaaagacgttgaaacaattggctccagtcctaaagtatcttaaaagtaaggatcctaaaactttgcccttcgatgattcttcttgcatatctcgcatctccaattttttggtgttctcttcatcttcactatcttcgtcactatcttccattaaaccttctacgattgtcttttcacttatgatacttgtcatcgacgattttctactctttcttgattgtctagaaacttgtctggcaaattcaatttgcttaactttttcctcttctgttatttctggttctttcgttaaaagttgagcgtataaattgtcactattagcaagatcattaaatgaaccttcgccttcgattcttccattgtttagaataattatgtgactagcatttttcaagtaatgtacttgatgtgtaactaaaactcttgtcttattttttaaaaatccattaatacattcatcgtaaagtactttagacacgtgtatatccacagctgacaagggatcgtccaacaaatatatatctttttctctatacacagctctagctaaattgattctcgctttttggccaccgctcaaagaagctcctttatctccaacaacagtcatatcccgatctttgaactgctccaaatctctttccagagcacaaacacgaatgacttccttgtatcgttttctatcatagtcagctccaaacaaaatattttgccgaatggtagaggaaaatatccaaggttcttgtgaagcgtaggagtaagttccgttggcatttatggatcctttgtctatatccagctcacctaataacgtctgaagaagtgagcttttaccggcaccaactggtccaataacacctagtagctttcccttgttgagctctaaagtaatatcattaagtacacaatcgctcaatgaggcatcccatttagcatagatgtttttgagagataacattgattttgagttttcattcggatctgagcttatcttattttgatcgtacttgtattcatcattttcaaggaatttttgaagacgggcgattgacgtgaacatctcagcgatttctgcaattcctcttgtcaaaataccagttaaagtcatagatagcatgttgaagtatgaaataagtacaaataccttcgctgccgttatttctccaccagttaatgtaatagtaacaagcgtagcaaatagagccaatttggtcgtaaccattcccaaagtcataaaaagagccctgatgtatgaattttttttaattattttaatttctgcctttcttgccaatccaattactttttggaaaggaatttcccaagcatacattttgataacttgaataccaagaatgacttcgtccatcagcctgattctttcatctgttctcagagcagtcatcttcctgaattttgttgccagtttagcggatgttgcttgtaaaggagacattataagtatgactaatattccagctattcctggcagttgtgctctttgatataaaaagtaaataacgggtattgtggagactggtccaatccacagctgatggatcatcattgatgcgaagtcaaaccttgcgacgtcgttggagaggagatttacaacctttcctgcaggtgtgtctcccagagcagttctactgagtcgagttgcttttcggtatattaaagcacacactgaagatcgaactttcatccccgcatgggctgcattagtcatgtactgattcattaaaatagaagaggtcaaagacattatcaccataccagatccataaaagtatgcttccaattttgattttttagatccaggagtgtaatagtccaaaactccacctaacatagatggttgaaacgatcgtatacctatatcagatactgcagctataattcctatgaggagatattctaaccagaaggttcttacgacggctttaaataaactaggtttttctttcttgttttgttttaccagttctaattctcgattccaatttttttctaatctatctcctaaatattcgcttctatcacttcttagtgtattatatacgtcttctacgcctatctgttttttcataccagttctaaatgttggtattgtaaacccaaaaaacataattgataagatcccagcagtttccctgggattgggattgttttgcacctccgtcgaatccatcgctggttacaaaatatattgtcctttacacaaaatgctgtaggtataataaatttaatgtgttaatacctaaaattcttctttttcatattcagcggagggcgagctttggcatgatatgataagcg

SEQ ID NO: 4378 - DNA, 4393 bp, Diabrotica virgifera
  SmartBlast Evalue=0; Info="CG4562, isoform A n=7 Tax=Sophophora RepID=Q9VDT3_DROME"
attttatataagtgtaagtttttttattttataacaacatagacgtattgtaagttgttattgcgtaataacgtacagttgacaaatatttgcaagcttgtggcgatgtgaggatggtcagggataatcatgaacaagaataaactaagtgataacagacaggaacatcccatacagaattccaacttcttatctagaatcatatttttatacaccttgccaatattttggaaaacacacaaaagaggaaccttcgaagaggatgaactttatgaagtactcaagaaatgcaaagcagaagaagccggaaatgaggtcgaaaaatgtattaaagatgacgtaaaaaatcatggatacttgtctctttttcgaatattatgtaaatgctatggtttaaaatattttttactaggaatgatacaagtgattgttagatctatagttataataaccatccctttgacgttatccaaagttataaagtactttcaacctggtcaagacgaattatccagaagctcagccatatactgcgccatcctacttgtactcctgaattttctcagtgtgacttacctacacaactaccttctggttctatctgaattgggaatcaaggtacgaactgcattctgttcggccatatttagaaaatctttacgactgacccagaaatcgctgttagaagtgagctcaggaaaaattgtaactttgatgacgaaagatgtagcagcgatagaaaacttcattttctatttcaatgacgtgtgggtaggaatagtgcaagcgattattgtgttttatttaatatttaacaaaatgggcgttggttctttaattggaattggattcttcctgttagttattcctgctcaagttttattgggaaagttgatatcaaaattaagactggaatctagtaagaagactgatgaacgattgcaaactaccaaagaaatgttgtctggaatcagtacaataaaaatgaatgtatgggagtttgaatttgaacacaaaattaaccaaacgaggaagaaggaaatgaaagcgatattgaaaatatttcttgccaaaaccaccgttctgctaattggaagtctaacatcaaagatagcctactatctacttttaaccactttcatccttttgggcaacactatttcagcagagctggtatactacatcacaactttgtttttaagaataagacatgccctcaatgtcgctatacccatcggtgttactgttacagctgacatgtctgcagctatgaaaagaattcagcagatgatgactgctgaagaagtaattgttaatgacgaaattgaggttgatcaaaagaaatcatatgtttcactgaacaatttatcaattgaagtagatgataaagtgctactaaaagatattactttaagatttgattctggtctatacattattagtggttcgactggtagtggcaaaacggttcttttaaaaagcatcttgggtgaatttgatacaaaaagtgatcatataattaaatatggaactatttcttatgctgcgcaggaaccatggattttcccagcaacttttaaacaaaatattgtttttgatgagcctttcgacgaagaacgttataaccgaattttggatatatgtgctttgggttttgatattgagcattttaccctagcaaacgacctaaaaataggtgacaaaggtgccaacctcagtaaaggacaaaagtctagaataaatttagcaagagctttgtatcgaaatgctgatatttacttaatagatgattgtttatcctctttggatgtcaacgttcaacgccacgtatttcaaaagtgtatcagagagttcctctcagataaaatatgtatctttgttactcaaaaccttcaatatactaacggaaatgacaaaataattgtattgaacgaaggtaaaacatttgtatcacaaaacctatccgaagaggatgaccaggatatcaaaaccattttaaaaaaagaacaacagttaaagaatctgatcgaagttaataacaacgctgatgaggttaacaatgatgaaaccactgaagaatcttcgctgttgaagaaattaaatattggaagaaataatatgtaccaagaaaataaaaagtctggaaaagttgatttttatacctatagaaaatatggaaattatggtggaggaattttggtcattgcaattgtattggtattttttattggttcacaattttcaaaaagttatactgaaaagattttaagcaactgggtaaatcacattcatcacaacacaacgaatatcaatgaagaaaatacagtgtgggatttttctttgaagatatattcagcgtttacactgtcaaccacgattctttccatattctcagcctttttgttatttaattttacaagaaaggcttctataaaactacatcgatgcttaagtaacactgtaatcaatgcaactatgaaattttttgatagtcacctaattggaaacattattaaccgattttcgaaggatcttagcattgtagatgaacaaattccttttgcaatatatgaatttttagaaattgttttgagtttatgcggagtaataattctaataacattagtaaacgttgggttcattataccaactgctgtagttttcatacttttgtattttttaaggaaactttacttgccaactggtcgaaatctgcagagactggatacagcagttcgaagtccaatgcttggccatttaaactcatctctcgaaggactttcaactattagagcatttaaagccgaagaaaccattagcaaagaatttgatagacatcaagatttatatacatctgcaaactatacttcaaaatgctgccagagggcttttgggtactacttggatgtttgttgtactacatttataggtgctattattgcagcgttcatcattgttggaaaagaaactggtgttggggatgttggtttagcaataacacaagcgtttatgttgaatggcattgcccaatacgccattaggctttgggcagatattgagaataaaatgacatcggtagaacggattttggaatacgttggtataaaaacagaagacaatgaccttagggacatatttaaagattggacttcaaacaatataatccaatacaaaaatgtaaattttcgttacgataatagtcaacagtatattttaaaaaacattaatattacaattaatgaaggagaaaaagttggaataattggaagaacaggttcaggaaagtcttcattgataactttattacttcggctctttgattacgaagggaaaatcaccattggtaatgaagatatccaaagtcttccgcttacattacttcgttcaaaaatatccataatttctcaagatcctgtgcttttttcgggaacaataaaaagcaatatggcacctaaagttttcggtgtatacccagacgaagacatttggaaggtcatccataagctggagttaacaacaataatagattctctagattttcaaatatgcgaaggaggaaaaaatttaagtgctggacaaaggcaattaatctgtcttgccagatgcttgttgcatcaaaacaaaatcattcttttggatgaagcaacttcagagatggatcagggatctgagtctttgttcaacaacattctggagaaacaaattttggactgttatagttttcgaagtacagttatagttgtggcccatagtctaaaaactattctaaattgtgatagagtcctagtggtacaaaatggagaaattgttgaaaatggcgcagttagtactttggcacaagatgaacatagcctattttataatatgctaaaaagttctgggttattgactattaaatgttgatatacattaaatataatgtataattgggtaatattacaaaggcagtattttttaaacttatgtattattctttatcattatacagggtgtcccgaaaagattggtcataaattgtaccacatgttctggagtcaaagagagttcgattgaacctaacttaccttagtacaaatgtgctcataaaaaagttacagccctttgaagttgcaaaatgaaagtctatttttttcaatatatcaaaaactattaaagattttttattgaaggtgggcatgtgtcatttttatcgcaacaacatcttgaaacaaaattatagtgagatttgtccgcaccatagaaaattttatgggggttttgttcccttatacctccccaaacttttgtctacgttaaaattaattcattattgtggtaccattagttaggaacaatatttttaaaactttttgcctcttagtattttttcgataagagagttgttatcgagatg

SEQ ID NO: 4379 - DNA, 4085 bp, Diabrotica virgifera
  SmartBlast Evalue=0; Info="CG4562, isoform A n=7 Tax=Sophophora RepID=Q9VDT3_DROME"
attttatataagtgtaagtttttttattttataacaacatagacgtattgtaagttgttattgcgtaataacgtacagttgacaaatatttgcaagcttgtggcgatgtgaggatggtcagggataatcatgaacaagaataaactaagtgataacagacaggaacatcccatacagaattccaacttcttatctagaatcatatttttatacaccttgccaatattttggaaaacacacaaaagaggaaccttcgaagaggatgaactttatgaagtactcaagaaatgcaaagcagaagaagccggaaatgaggtcgaaaaatgtattaaagatgacgtaaaaaatcatggatacttgtctctttttcgaatattatgtaaatgctatggtttaaaatattttttactaggaatgatacaagtgattgttagatctatagttataataaccatccctttgacgttatccaaagttataaagtactttcaacctggtcaagacgaattatccagaagctcagccatatactgcgccatcctacttgtactcctgaattttctcagtgtgacttacctacacaactaccttctggttctatctgaattgggaatcaaggtacgaactgcattctgttcggccatatttagaaaatctttacgactgacccagaaatcgctgttagaagtgagctcaggaaaaattgtaactttgatgacgaaagatgtagcagcgatagaaaacttcattttctatttcaatgacgtgtgggtaggaatagtgcaagcgattattgtgttttatttaatatttaacaaaatgggcgttggttctttaattggaattggattcttcctgttagttattcctgctcaagttttattgggaaagttgatatcaaaattaagactggaatctagtaagaagactgatgaacgattgcaaactaccaaagaaatgttgtctggaatcagtacaataaaaatgaatgtatgggagtttgaatttgaacacaaaattaaccaaacgaggaagaaggaaatgaaagcgatattgaaaatatttcttgccaaaaccaccgttctgctaattggaagtctaacatcaaagatagcctactatctacttttaaccactttcatccttttgggcaacactatttcagcagagctggtatactacatcacaactttgtttttaagaataagacatgccctcaatgtcgctatacccatcggtgttactgttacagctgacatgtctgcagctatgaaaagaattcagcagatgatgactgctgaagaagtaattgttaatgacgaaattgaggttgatcaaaagaaatcatatgtttcactgaacaatttatcaattgaagtagatgataaagtgctactaaaagatattactttaagatttgattctggtctatacattattagtggttcgactggtagtggcaaaacggttcttttaaaaagcatcttgggtgaatttgatacaaaaagtgatcatataattaaatatggaactatttcttatgctgcgcaggaaccatggattttcccagcaacttttaaacaaaatattgtttttgatgagcctttcgacgaagaacgttataaccgaattttggatatatgtgctttgggttttgatattgagcattttaccctagcaaacgacctaaaaataggtgacaaaggtgccaacctcagtaaaggacaaaagtctagaataaatttagcaagagctttgtatcgaaatgctgatatttacttaatagatgattgtttatcctctttggatgtcaacgttcaacgccacgtatttcaaaagtgtatcagagagttcctctcagataaaatatgtatctttgttactcaaaaccttcaatatactaacggaaatgacaaaataattgtattgaacgaaggtaaaacatttgtatcacaaaacctatccgaagaggatgaccaggatatcaaaaccattttaaaaaaagaacaacagttaaagaatctgatcgaagttaataacaacgctgatgaggttaacaatgatgaaaccactgaagaatcttcgctgttgaagaaattaaatattggaagaaataatatgtaccaagaaaataaaaagtctggaaaagttgatttttatacctatagaaaatatggaaattatggtggaggaattttggtcattgcaattgtattggtattttttattggttcacaattttcaaaaagttatactgaaaagattttaagcaactgggtaaatcacattcatcacaacacaacgaatatcaatgaagaaaatacagtgtgggatttttctttgaagatatattcagcgtttacactgtcaaccacgattctttccatattctcagcctttttgttatttaattttacaagaaaggcttctataaaactacatcgatgcttaagtaacactgtaatcaatgcaactatgaaattttttgatagtcacctaattggaaacattattaaccgattttcgaaggatcttagcattgtagatgaacaaattccttttgcaatatatgaatttttagaaattgttttgagtttatgcggagtaataattctaataacattagtaaacgttgggttcattataccaactgctgtagttttcatacttttgtattttttaaggaaactttacttgccaactggtcgaaatctgcagagactggatacagcagttcgaagtccaatgcttggccatttaaactcatctctcgaaggactttcaactattagagcatttaaagccgaagaaaccattagcaaagaatttgatagacatcaagatttatatacatctgcaaactatacttcaaaatgctgccagagggcttttgggtactacttggatgtttgttgtactacatttataggtgctattattgcagcgttcatcattgttggaaaagaaactggtgttggggatgttggtttagcaataacacaagcgtttatgttgaatggcattgcccaatacgccattaggctttgggcagatattgagaataaaatgacatcggtagaacggattttggaatacgttggtataaaaacagaagacaatgaccttagggacatatttaaagattggacttcaaacaatataatccaatacaaaaatgtaaattttcgttacgataatagtcaacagtatattttaaaaaacattaatattacaattaatgaaggagaaaaagttggaataattggaagaacaggttcaggaaagtcttcattgataactttattacttcggctctttgattacgaagggaaaatcaccattggtaatgaagatatccaaagtcttccgcttacattacttcgttcaaaaatatccataatttctcaagatcctgtgcttttttcgggaacaataaaaagcaatatggcacctaaagttttcggtgtatacccagacgaagacatttggaaggtcatccataagctggagttaacaacaataatagattctctagattttcaaatatgcgaaggaggaaaaaatttaagtgctggacaaaggcaattaatctgtcttgccagatgcttgttgcatcaaaacaaaatcattcttttggatgaagcaacttcagagatggatcagggatctgagtctttgttcaacaacattctggagaaacaaattttggactgttatagttttcgaagtacagttatagttgtggcccatagtctaaaaactattctaaattgtgatagagtcctagtggtacaaaatggagaaattgttgaaaatggcgcagttagtactttggcacaagatgaacatagcctattttataatatgctaaaaagttctgggttattgactattaaatgttgatatacattaaatataatgtataattgggtaatattacaaaggcagtattttttaaacttatgtattattctttatcattatataaactatcgaaatttaaaaaatattattttcacgttattttcatcattttatattttaagttattatactgatcctctgattttaagttattatactcc

SEQ ID NO: 4380 - DNA, 4171 bp, Diabrotica virgifera
  SmartBlast Evalue=2E-87; Info="Ubiquitin protein ligase, putative n=3 Tax=Arthropoda RepID=B7PUM1_IXOSC"
caaactttcaagtcaagaacaagaccggccattttacaataccttgttgtgggattattcacctttcaaaattaaaattgtaattaatgtcagaaccacagtcagctctcctattaagaaaacagctagcagaactgaacaaaaaccctgtggagggtttttctgcaggccttatagatgataatgacatctacagatgggaagtactcataataggtcctcctgatacattatatgagggaggttttttcaaatgtcatctttattttccgaaggaatacccacttaggccaccaaaaatgaaatttgtaacagaaatttggcatcctaatattgataagaatggtgatgtatgtatttcaatattgcacgaacctggagatgataaatttggttatgaaaaagcctcggaacggtggttaccagtacatacagtagaaactattttaatatcagttatttcaatgttagccgatcctaatgatgaatcacctgccaatgttgatgctgcgaaagaatggcgagaatcatactcagaatttaaacggaaagtagcaagatgtgtccggaagtcacaagaacaagaggagtgttaggactgtattaaatttgaattgataaacaactaattatataaaaacccataattgatttgattcccgggctgttaaaatctacgtgacttttgtatgtcgtttccgtagttttttatacaacttaataatagtaatatactttttaaacattcgatagacttcaacatgccgccggaatcaaatcacgtgtttcaacatttctttcttgtgttttttaaatataattttgcgatctcaacaacaactgagtaattttttttttaaattaggaatccgaaataaatttttagtttaattttattacaatttgaataaatgtcaccttgatttgaaaattgatttgcattttttgttgtcacgactggtcttgtaaaaagtttatgctctgcagagattggttcctattttaactggaagtatttaaaggaagacgcacaaacattgtctgtctgatcttttgaataagttttctcatttacatagagaaagcgagttctcatttacattttatttttaattttattattaatttaatgccgggtttcaccaacaaatcttaagctccagcttagtctagctcagctgttagatagggccgctttaagtctcacttacgttgcaccataattctcgattcttatctaagcgcgtcgtaactgagatgaggtttaagatgcagtccacgtggcaatccattgtggcaagctgaaaattgatctaagactcaatggtgcaacgcgtgtttcgtaagctgagtttaagacgtttcttaagctgaagatctgttggtgcaaccaggcataaaatatctgtgaatttcacattaaaagagaatcggtcattattatcactggagtacattatttcgttttgcttaaaaccaaaatctgtgattctaaattcaaaatgacaatattgatctgacacaataaactgtccgttttcacgattgctgtgtattattttcacaactcaactacttaggttaggttaggttcaatatgagtgggtgcttaaccagcattccatatgatctaagaaatctattgtggcttatcccttggtaaaagttgtccttttagcccagccttttgaccaaagtctattgtggcctttggtgacacttctacaaagttatagggatcgagttgataatgctcaaatgtattaagccttatcctatccaaccctgggcagtagcacagaaagtgttccgccgtattgtctttagcctgacaaaaactgcaatcgtctctttttgtcggtccgatcttcatgtgctactggaggtgacagcagtgacggaaacgtcgaggttgtgtatgcagttaatcgactcgatctttacaaacaggaaatcttgtgaactgccctcatagacttgctggtggcactcctctgttatgtgcttgatagattggacctcaccgctgcatggtggtgatgatagcttaccccatttgtgcaacatatacgcacatcgaccaggttgagttctgatgtgatgaagttcgcaccaggtcttacgtggtaggtcaaatccaggaggtgtttctgtgatgcaaggtgtgactgtatttggttgagcttccgaacatttatggattcacttggtgatcatgttgaacccggtggctgtggttgattctgcggtttgtattgaagattttctggagcgcagtcgacttttggttgcatcttccatatagttatgaatcggcagcgccgtgttgctaaggatcttgttatattattcggttaggagaccgcacgtttgagaccagtttgtttgtaccagtggttagtttcatccgttccaaccagtccattcagttcttttggttgtgcttcttgcaataccaatgaaaggttcggagcctgtgcatgtttataggcatccagagtaagcttactattattgctgataaatggtgaagtaaatttctactttatttttttatttgatgtactgaataatttcaccaaattatgagataatatattacctaattttttctaacggtagtttctgtgagggttaaaatgccttatgttatagagataaatataaatttcggcctagtttttatctacaataaatggttcattgtataaaacattgtccattgttgtaaaatataaaaattttcttttttctctctgcttgctttttgtttcttgagtgatgttggtaaattttatgtataaaagacaaaaaatgtaataatattcaaaagttcagaagatatttgtgcgtatttctttgttttttttttattttaaaaagaataaaattcagtgaatctatttaagctaatacattagtgtttttaagacaaacaatatgttcaaatagtagatgtcagaaatttttttgatgttttgatggttacaatctgagtcgtgtggtcctgaaacttatttcttgtgaatttttatatcaactactgtattttgtttccaatttgtttgaaattgttcccaaaataccaatcaaacaaatcattattactcgaaaatagaaaaaaatccttatagtttaattttatggtttaactcatccagttttcttcatgccattattttgttccatattttactaaaatgaagataaaggaacaatagtcctgctgtagatctgtttagttttataattattgtatacctaacttgcaatacctgacaaaaaaggtacacctgtacctccatctaccagtgagaagacaaaagattccttcgttcaagaaaacaatcacccctcatacctcatctttcaggaattaagtgcatcagattaattacaaaattttcgagtaaatatctactcaacaatatattttccagtattgtagaatttttatcaagacttcttgactttctgtcaattcaacacatgcctttacatctatgtgtttatttatacagggaaaaattgtcaccggttgacctgtataaaaccataacctcaaattagaaccaaaagactacaatttacataatttatgacactttagctgggcttttgtgtacgttatggtgtaactactgtaataggtgcgttcgcgggtacagttgacaaattgtcgtcgacaatttctaacctcacttaatataaataataccgttaatagatatacaaggtatatttacttttaattaatattcataaccaattattaaattataccatgtaaatataccttgtatatttatctattaacgatattatttatattattttaaagtgcgcatgcgtgttctgataatttatccaattttctgacaatttcaggtacccgcgaacgcaacttataacattgtctttttaaaagcacaatatgttgagcaaaaagtaggacactgtattgccgatgatgatatttatttgatacttccatttgtccattatcgtaacttttaaggttaagttgtactatataaactgtgttaagccttcgaattgtggatgagtaattaattttttttcagaatttaccaagcttcaagagagggtttaaataatcgtaagacagtgaaatagtcaaaaaacttggaattgctcctagacatttaaa

SEQ ID NO: 4381 - DNA, 4123 bp, Diabrotica virgifera
  SmartBlast Evalue=2E-87; Info="Ubiquitin protein ligase, putative n=3 Tax=Arthropoda RepID=B7PUM1_IXOSC"
caaactttcaagtcaagaacaagaccggccattttacaataccttgttgtgggattattcacctttcaaaattaaaattgtaattaatgtcagaaccacagtcagctctcctattaagaaaacagctagcagaactgaacaaaaaccctgtggagggtttttctgcaggccttatagatgataatgacatctacagatgggaagtactcataataggtcctcctgatacattatatgagggaggttttttcaaatgtcatctttattttccgaaggaatacccacttaggccaccaaaaatgaaatttgtaacagaaatttggcatcctaatattgataagaatggtgatgtatgtatttcaatattgcacgaacctggagatgataaatttggttatgaaaaagcctcggaacggtggttaccagtacatacagtagaaactattttaatatcagttatttcaatgttagccgatcctaatgatgaatcacctgccaatgttgatgctgcgaaagaatggcgagaatcatactcagaatttaaacggaaagtagcaagatgtgtccggaagtcacaagaacaagaggagtgttaggactgtattaaatttgaattgataaacaactaattatataaaaacccataattgatttgattcccgggctgttaaaatctacgtgacttttgtatgtcgtttccgtagttttttatacaacttaataatagtaatatactttttaaacattcgatagacttcaacatgccgccggaatcaaatcacgtgtttcaacatttctttcttgtgttttttaaatataattttgcgatctcaacaacaactgagtaattttttttttaaattaggaatccgaaataaatttttagtttaattttattacaatttgaataaatgtcaccttgatttgaaaattgatttgcattttttgttgtcacgactggtcttgtaaaaagtttatgctctgcagagattggttcctattttaactggaagtatttaaaggaagacgcacaaacattgtctgtctgatcttttgaataagttttctcatttacatagagaaagcgagttctcatttacattttatttttaattttattattaatttaatgccgggtttcaccaacaaatcttaagctccagcttagtctagctcagctgttagatagggccgctttaagtctcacttacgttgcaccataattctcgattcttatctaagcgcgtcgtaactgagatgaggtttaagatgcagtccacgtggcaatccattgtggcaagctgaaaattgatctaagactcaatggtgcaacgcgtgtttcgtaagctgagtttaagacgtttcttaagctgaagatctgttggtgcaaccaggcataaaatatctgtgaatttcacattaaaagagaatcggtcattattatcactggagtacattatttcgttttgcttaaaaccaaaatctgtgattctaaattcaaaatgacaatattgatctgacacaataaactgtccgttttcacgattgctgtgtattattttcacaactcaactacttaggttaggttaggttcaatatgagtgggtgcttaaccagcattccatatgatctaagaaatctattgtggcttatcccttggtaaaagttgtccttttagcccagccttttgaccaaagtctattgtggcctttggtgacacttctacaaagttatagggatcgagttgataatgctcaaatgtattaagccttatcctatccaaccctgggcagtagcacagaaagtgttccgccgtattgtctttagcctgacaaaaactgcaatcgtctctttttgtcggtccgatcttcatgtgctactggaggtgacagcagtgacggaaacgtcgaggttgtgtatgcagttaatcgactcgatctttacaaacaggaaatcttgtgaactgccctcatagacttgctggtggcactcctctgttatgtgcttgatagattggacctcaccgctgcatggtggtgatgatagcttaccccatttgtgcaacatatacgcacatcgaccaggttgagttctgatgtgatgaagttcgcaccaggtcttacgtggtaggtcaaatccaggaggtgtttctgtgatgcaaggtgtgactgtatttggttgagcttccgaacatttatggattcacttggtgatcatgttgaacccggtggctgtggttgattctgcggtttgtattgaagattttctggagcgcagtcgacttttggttgcatcttccatatagttatgaatcggcagcgccgtgttgctaaggatcttgttatattattcggttaggagaccgcacgtttgagaccagtttgtttgtaccagtggttagtttcatccgttccaaccagtccattcagttcttttggttgtgcttcttgcaataccaatgaaaggttcggagcctgtgcatgtttataggcatccagagtaagcttactattattgctgataaatggtgaagtaaatttctactttatttttttatttgatgtactgaataatttcaccaaattatgagataatatattacctaattttttctaacggtagtttctgtgagggttaaaatgccttatgttatagagataaatataaatttcggcctagtttttatctacaataaatggttcattgtataaaacattgtccattgttgtaaaatataaaaattttcttttttctctctgcttgctttttgtttcttgagtgatgttggtaaattttatgtataaaagacaaaaaatgtaataatattcaaaagttcagaagatatttgtgcgtatttctttgttttttttttattttaaaaagaataaaattcagtgaatctatttaagctaatacattagtgtttttaagacaaacaatatgttcaaatagtagatgtcagaaatttttttgatgttttgatggttacaatctgagtcgtgtggtcctgaaacttatttcttgtgaatttttatatcaactactgtattttgtttccaatttgtttgaaattgttcccaaaataccaatcaaacaaatcattattactcgaaaatagaaaaaaatccttatagtttaattttatggtttaactcatccagttttcttcatgccattattttgttccatattttactaaaatgaagataaaggaacaatagtcctgctgtagatctgtttagttttataattattgtatacctaacttgcaatacctgacaaaaaaggtacacctgtacctccatctaccagtgagaagacaaaagattccttcgttcaagaaaacaatcacccctcatacctcatctttcaggaattaagtgcatcagattaattacaaaattttcgagtaaatatctactcaacaatatattttccagtattgtagaatttttatcaagacttcttgactttctgtcaattcaacacatgcctttacatctatgtgtttatttatacagggaaaaattgtcaccggttgacctgtataaaaccataacctcaaattagaaccaaaagactacaatttacataatttatgacactttagctgggcttttgtgtacgttatggtgtaactactgtaataggtgcgttcgcgggtacagttgacaaattgtcgtcgacaatttctaacctcacttaatataaataataccgttaatagatatacaaggtatatttacttttaattaatattcataaccaattattaaattataccatgtaaatataccttgtatatttatctattaacgatattatttatattattttaaagtgcgcatgcgtgttctgataatttatccaattttctgacaatttcaggtacccgcgaacgcaactattaattatactaattattaataatagacatttttgaatgaaataccaaccgcataacttcaaaatcgcataaaaataatccgcataaaaagagaccttactgtacacgattttttcaataatcatgtatgaaaaatacaaaaaatatattcaaatttactaattttgtaacgcaaacaaaattaataaatttgtcagtttgtttacatattgataa

SEQ ID NO: 4382 - DNA, 4136 bp, Diabrotica virgifera
  SmartBlast Evalue=1E-144; Info="Huntingtin-associated protein- interacting protein, putative n=1 Tax=Pediculus humanus corporis RepID=E0VF59_PEDHC"
aaaagttcgtttatttatgtataggtaaaatataattataaatatatacgattgattaacaagctaaaacggaaataatcaaattggtcacaaattaaaatatatttacaaagaacaatatctacgattgggactaaagagcatcttctttataataattcgagttcgagggtggcaagattcatggggtgtcttcgctgcatgaacatttttagacgtgctgccgggatagatgctgaaccgctagcctcttttatccaaacacattgaagactcttctccatattcaacctttgcgctggaactagcaccaacaaactcttcgtcaaatccttggcttcttgcgatacgtctccaaaatactcatcggggaaacaaaaatcgcatttgagaatattcgcagtggtttcttccactgagtcgtcgaggaagggagacactccgctgagcatgacgtagaggaacactcctacagcccaacagtcagtgtggacgccaactggttgaccgagaaccagttcgggcgaggcgaattcgaggcaagctggtggcaagatgacgttcttggaggtgttgactgagtcaccgaagtctactaattttatagggggatgggaacggttatatcgatcattacgttttcgggcttaacatctagatgcgcaatacttttttggtgcagccattttaaggcagatattaactgacacgtgtagtttcttacatctgactcactgtaagtttctttatcactaatatacttaaataataaaggtcctttgactaattccaatatgatcgtatcgatgccaggtaatggagcattgtcgaacaaagccaatgatctaatgatgttgggatgttgcattcctgctaacagcgaatattccgcttgagtcacctgatgagattgttttcgtcgtgaaatttgttttaatgctacttcttctccagtccccctgtctcttgctaaacggacgattgaaaatcttcctctgtctatttcttctaactctacgtacctttgcttaaactgttcctgctgccatctcaaattttccgccacaggcaacgtcacagcaacactaggcaagctgaccacgttgttctgagcagatacgatcctaaaactgtacgtctccccaggaatcaaattctcgactgtaaaagagtgtgagtttacgggatggttattattgggtgagatccattcgccggaacccaacttgcaatattccactataaactgagagtaatggttgctttcccactctaaggaaacacttgagcatgatattacttgaattttgggttctggtatgggagggtagctgctggtgatggacaatttagccatacaggtgatactcccgaattcgttggatactgtcaagcaataggtacctgcgtcagaagctctggcgttttctatcaccatcaacgctatgcctccttcattatcaccttgcacaaacttgccgttatgtaggactacgacatttggttccatcttcttccaagtttgcctcgtgttcctattccaattcttcactctacacttaaacaccaccttggatccactctgaacggtaatatctttcagtctatcacgaaattctggtacacaacggtccgagttctccgagaggattccttccagagattttcttggtttctttaacctaaaagaccatagtttcctactgtaattggctagaacgtgagcaggaatccaaaactcttccaggctagagctggttcggacaaaatatccttgggttgggtcgtagcggatgattgtgactaagtcccccaggttgaggtgcggccattcgcagaccaaacgcgcttgagtgccgggaggcattattagatgatccgccatttttaattataaacttgtgtcgactggcattgcattcccaattatttccatttcaacttgttaatacaggttaaaactaacggcaataaatagttttattgtttatatagatttatcttaacataacatatcacagccatctcttatggttagttggtagtatttgaagctctttattacgataccgtatgattagcttccgaccacctcctgtgcatatcacccttctcgctattctccttcgcagtctccaacaccactgtatcactcttatgcttgtttctcaaactattcttaaagccttcgaaaaagttcagtctcgagcgtggattattgtttttgctatcgttcaaatcgtcttccgatgggataccaatggtgttagccttatgaacataatggttctttttgtgggacttgctgggctctgacggcgatccatgaggtagggctcttcttaggggcgccacttcccacattgataggtcggataaggaagcttctttagtggttaactctttctggtaggctatgggactttggatggctttgaggaagtccctctgtttttgaagggtgtcgtggatagtgatcaaccattgctcttgcaaatctaccgttcctgcttgcaggacgaaacccaaacaacggctgggatccgtcgattctaatataaaacagtcttcttttgtgtttaaggacattttgttgacttgaatatgagctttgtaaatatattgcggactagtgaactgcgtcttctttcctaccacttcagaaaaaataatactttgttcgaagaaaaatacatgcaaatccttgtttttgcctatgattggattcgatccaggtagatcggaaactgttaacattccgtgcagaagcagagttccctgtgcagtaattttaccctcaaatccctgtagtcttccaacatccatcatatcattagcagtcttcggtacgatcaccattatgttgtatgctgccctaagtggttcaatctccgccgttattcccgccctttcagtatatttcaaaatatccttaagcatcaattggtatttcattattctttgcactggcttgattaacaaatcacaaagttgcaacttatgtcctaattttacccgtaaatcttcgaaataggtctctaggtattcggaaactatatattcggatacatgtttgttcttacaatagataacgtacatttgtaatttgcgttcataacgtttgaaaagcgaagctagttcaatgggattttctacggcttgttttagggattttaagaaaaagtttttatgccaatcataaatgacttcgatatttccaaacaccagtttgtcctttccatccttcaaatcctctggcatgggtatttcacattcgggatcctttatagtagctatgtaaccatcaacgattaaagacaagtctctaacgtacgcttcttcagtatctattaactcctgcagaacgtattcccttttcctcaataagatttctgtcttcttggcggtgtccatgttgtcttcggacggcttgtcgctttcatcgccactgaaagccaaccctgtggcttcgttggagaaaccttgagctgatagatcccctccgtactccgaaatggcattttctgacttggcatctcgcataagagaatgacgttcttggttttctgaatgttgttctcttttgcaagggttctcttcgatctccggcacacctggaaccccagggggcggcgacgtcaccaagatcggctcctggatcggtttcatcggcggtggcagctccaactcttcgtcggcatcttcagctgctccgctgccattcgctaattcagacccgagagatttggcgcctttgagcgcctgcgtaggtcgctcttcttcctcttcgccttcggagaccgagggcttgttgcccatttcggatggcacctttattctcttatcggaaccagtctttttgaggggtggtggtgtgttggcttgcgctttgtccactttaccctgtgacaattttcgaagtggaggtggcagccatttccgtccgctgaatcctcttcttttatttaccggagatgacgtattcactgcggcggaggcgtcattctgaagactagtatctgatttttttagtttaaacataatccaaaaatcgtttcattcgaacaacacattacttaaaaagaaccgaattgctgacagtagtaataattcagaaccaatactacaccaaatcg

SEQ ID NO: 4383 - DNA, 4076 bp, Diabrotica virgifera
  SmartBlast Evalue=1E-130; Info="Huntingtin-associated protein- interacting protein, putative n=1 Tax=Pediculus humanus corporis RepID=E0VF59_PEDHC"
aaaagttcgtttatttatgtataggtaaaatataattataaatatatacgattgattaacaagctaaaacggaaataatcaaattggtcacaaattaaaatatatttacaaagaacaatatctacgattgggactaaagagcatcttctttataataattcgagttcgagggtggcaagattcatggggtgtcttcgctgcatgaacatttttagacgtgctgccgggatagatgctgaaccgctagcctcttttatccaaacacattgaagactcttctccatattcaacctttgcgctggaactagcaccaacaaactcttcgtcaaatccttggcttcttgcgatacgtctccaaaatactcatcggggaaacaaaaatcgcatttgagaatattcgcagtggtttcttccactgagtcgtcgaggaagggagacactccgctgagcatgacgtagaggaacactcctacagcccaacagtcagtgtggacgccaactggttgaccgagaaccagttcgggcgaggcgaattcgaggcaagctggtggcaagatgacgttcttggaggtgttgactgagtcaccgaagtctactaattttatagggggatgggaacggttatatcgatcattacgttttcgggcttaacatctagatgcgcaatacttttttggtgcagccattttaaggcagatattaactgacacgtgtagtttcttacatctgactcactgtaagtttctttatcactaatatacttaaataataaaggtcctttgactaattccaatatgatcgtatcgatgccaggtaatggagcattgtcgaacaaagccaatgatctaatgatgttgggatgttgcattcctgctaacagcgaatattccgcttgagtcacctgatgagattgttttcgtcgtgaaatttgttttaatgctacttcttctccagtccccctgtctcttgctaaacggacgattgaaaatcttcctctgtctatttcttctaactctacgtacctttgcttaaactgttcctgctgccatctcaaattttccgccacaggcaacgtcacagcaacactaggcaagctgaccacgttgttctgagcagatacgatcctaaaactgtacgtctccccaggaatcaaattctcgactgtaaaagagtgtgagtttacgggatggttattattgggtgagatccattcgccggaacccaacttgcaatattccactataaactgagagtaatggttgctttcccactctaaggaaacacttgagcatgatattacttgaattttgggttctggtatgggagggtagctgctggtgatggacaatttagccatacaggtgatactcccgaattcgttggatactgtcaagcaataggtacctgcgtcagaagctctggcgttttctatcaccatcaacgctatgcctccttcattatcaccttgcacaaacttgccgttatgtaggactacgacatttggttccatcttcttccaagtttgcctcgtgttcctattccaattcttcactctacacttaaacaccaccttggatccactctgaacggtaatatctttcagtctatcacgaaattctggtacacaacggtccgagttctccgagaggattccttccagagattttcttggtttctttaacctaaaagaccatagtttcctactgtaattggctagaacgtgagcaggaatccaaaactcttccaggctagagctggttcggacaaaatatccttgggttgggtcgtagcggatgattgtgactaagtcccccaggttgaggtgcggccattcgcagaccaaacgcgcttgagtgccgggaggcattattagatgatccgccatttttaattataaacttgtgtcgactggcattgcattcccaattatttccatttcaacttgttaatacaggttaaaactaacggcaataaatagttttattgtttatatagatttatcttaacataacatatcacagccatctcttatggttagttggtagtatttgaagctctttattacgataccgtatgattagcttccgaccacctcctgtgcatatcacccttctcgctattctccttcgcagtctccaacaccactgtatcactcttatgcttgtttctcaaactattcttaaagccttcgaaaaagttcagtctcgagcgtggattattgtttttgctatcgttcaaatcgtcttccgatgggataccaatggtgttagccttatgaacataatggttctttttgtgggacttgctgggctctgacggcgatccatgaggtagggctcttcttaggggcgccacttcccacattgataggtcggataaggaagcttctttagtggttaactctttctggtaggctatgggactttggatggctttgaggaagtccctctgtttttgaagggtgtcgtggatagtgatcaaccattgctcttgcaaatctaccgttcctgcttgcaggacgaaacccaaacaacggctgggatccgtcgattctaatataaaacagtcttcttttgtgtttaaggacattttgttgacttgaatatgagctttgtaaatatattgcggactagtgaactgcgtcttctttcctaccacttcagaaaaaataatactttgttcgaagaaaaatacatgcaaatccttgtttttgcctatgattggattcgatccaggtagatcggaaactgttaacattccgtgcagaagcagagttccctgtgcagtaattttaccctcaaatccctgtagtcttccaacatccatcatatcattagcagtcttcggtacgatcaccattatgttgtatgctgccctaagtggttcaatctccgccgttattcccgccctttcagtatatttcaaaatatccttaagcatcaattggtatttcattattctttgcactggcttgattaacaaatcacaaagttgcaacttatgtcctaattttacccgtaaatcttcgaaataggtctctaggtattcggaaactatatattcggatacatgtttgttcttacaatagataacgtacatttgtaatttgcgttcataacgtttgaaaagcgaagctagttcaatgggattttctacggcttgttttagggattttaagaaaaagtttttatgccaatcataaatgacttcgatatttccaaacaccagtttgtcctttccatccttcaaatcctctggcatgggtatttcacattcgggatcctttatagtagctatgtaaccatcaacgattaaagacaagtctctaacgtacgcttcttcagtatctattaactcctgcagaacgtattcccttttcctcaataagatttctgtcttcttggcggtgtccatgttgtcttcggacggcttgtcgctttcatcgccactgaaagccaaccctgtggcttcgttggagaaaccttgagctgatagatcccctccgtactccgaaatggcattttctgacttggcatctcgcataagagaatgacgttcttggttttctgaatgttgttctcttttgcaagggttctcttcgatctccggcacacctggaaccccagggggcggcgacgtcaccaagatcggctcctggatcggtttcatcggcggtggcagctccaactcttcgtcggcatcttcagctgctccgctgccattcgctaattcagacccgagagatttggcgcctttgagcgcctgcgtaggtcgctcttcttcctcttcgccttcggagaccgagggcttgttgcccatttcggatggcacctttattctcttatcggaaccagtctttttgaggggtggtggtgtgttggcttgcgctttgtccactttaccctgtgacaattttcgaagtggaggtggcagccatttccgtggtttatcggacatatccgaatagctatccttataaccagtacattgatttttcagagatttacaattacacaagttgtggaagaaccgtctcatcttcgtcatgatttcttgagaaaaaaactaccgcgcat

SEQ ID NO: 4384 - DNA, 4590 bp, Diabrotica virgifera
  SmartBlast Evalue=3E-21; Info="Leucine-rich transmembrane protein, putative n=1 Tax=Pediculus humanus corporis RepID= E0VUL3_PEDHC"
aagagtttaaaatacaaaaaatatgttgctgattgtattgctattgatgttatatccaaacgaaggaattggtggatcctgttggttcaagggccataccttttactgcagcagaataaatcaagaccagtttttgtacgaattatttagacaagaagagtatttatcaagtaattatataaacacgatcataattgaggactccgactttcaggctattactgacttccctaatttaagtgatttattaccaaatataacaataacagatttggctattcgccgatcagttgtaaactatatatctgaaagcaccttcaccgtatttgatcagttggtaaatctggatttaagtgaaaattatatagataatgttgcgttttgtgcaggtttgtcagtttccgttaaaacggcaaatctaagtcataaccgtatttctagtatagatataagccaaagaaaagtagttttagattacctagatttaagttataacaatcttaccaaatacaccgagtcttctattgatcgggatttcatggggaaatctcttgacctaagttacaacacatacttaactgatgtttacgttttggaaaaaagtgaactgtacattttgggatgtaacgtacaaaattttgttaatcatttaacagtaaaaaaaatgtttactaactttttgccttaccattgcaaacttaatgttgttgacttttttacaatttctaatacaaatttaaacgtaataactcaaaatgtagcacctaacattttctgtgaaagtggttctactctaatagatttttctaataccaatcttactgcaataccaaaaaatttttttgattttgactcagactgttttgaactaaatcttagttacaatgacctgtcaaatttagaggaccatatattagggtcaacaacattgaaaaaaataaatctttcattttccagaataagtaatatctcatccaaattttttaaagcaaataatcgtataggtgaaataaatttaacagcaaattatttagataaaagtgtttgtgatggtagcgaaaatttgaatgacctatattctcttgacatgtcattgaatagtctaacagaacttacttcaaatagctttaaatcttgtgtttatttaaaatacataaatatgtcacggtgttttatagaccatgttgcatctgatagttttaaatcgttacggaatgtagagtcaatcaatttaagcaataataaaatactcatcatagaatcagatactttctacaacctgcaaaatttaatggccttagatctttccgaaaactatttggaagctataagagaaaacgccttctcaaaattagactccctggagaaaatactattttctaaaagtgacaagactaaacgtgttgggttaactattcatactggtgctttccaagatctaaggaaacttaatgaactgcaacttgcagaattgggaattcagcaaatgatgcccggtgcatttaaaaatctattaaacttaaatatcattgacttaaggaaaaattatttatccttcctaggtactgatgtatttttcaatattaaggctcatgcattatattctggttatgtgtccatgccagtgcattttgattcaactgtcaacattactaatttgtttctagagacataccaatcaatattacatgaacggtctgtggtaagccttaacttgaagcatttacatatcttgaattccaatatttatcttatatcgtcaagttttctgttaggctcatataaattagaatatctggacttcgaaaatacaactgtacaaattgcaaactccgaagtttttactggtttatttaatttgttggaattggatgcaacaattttcttcagagatatagacgttctcaaagactatacgtttaaagatttaaatagtctaaaatctctgtatttgtcaaatggcaaattgacgacaatcgaaaaggatgcattttttgggctcaaaaacttagaaaatttatatttgaataacaataagattgaatatttggatgcatcacttttcagaaatcttaaactatctctattggatttatcaaacaatgcttttgaaactatagatatattgtcttttcctagtaatttaccttacttaaaaaatttggatttaagtcattgtcaactgaaaaatttgagtgcatcaaataagacacaacacgaaaacttggagaggttgattttatcaaataatatgttaactgaaatatctaatttgattattgactcatttccaaacttacggattctacatattaaccaaaatatgatttcaagaattccctatatagaggatggcagaaatataacggaaatacgagcagatggcaatcacttaacatatttaagcaatattgatgctaaaaaaaacttacaatttttaaacatctctgataacccaaatttgggagtaaacgtgcaagtaacttacttaagagaagttccatttttggagacatatttaatggacaatactggcatagtgcttagatataacgaaatagcttattactttccaagcttaaaacaggtagggcttaactataacaattaccagtgcaatgagttacaaaggattgtacaaaaaatggacgaaagaaacattagttatataccagatagtcccaggtatgacattgataatatcaatggtataacctgtgtaaataaaatatcatcgtcgtaatcatcatcatctactataaccacaacaaactaacaaacattatcattctcacttgttgagggttttattcatcatcatcatgatatctatactcacagagaagtgaatcatcccaatcgatttttcgcggggaatcagtccgcattacctttttggttttacagttgattctgtgaagtggcatcttcgacaatatttctctattcgttcctgtttttgcttattgttggctattttctaactcacatgttcttaatgtcctcaattatctggtttccccatgtggctttgggtcttcctcatggtctgcctaatactgaacatcatttagtgattttcttagtaacttattctggatttctccattctataagtatatctcattaatctgcttctgtttctcttgataaacctaacgatgttttttcctttcaaaagttatcttactccgtagtccttcagttttctaaattcattagtacctttgtttaatgcacctggtatactccaaaatatttttatctctagggctctcaatcttttatgtgattactggcctaattgcagcttaattgctgcctaatggaaaataattgtaataaatcgacttaaatataaaataaatattatatagaacataaagtttgtatctatatagatttttatcaactgaaatattccttgaatgtatggacacattgtcacatatttatattatattaaaattattgtatttattaagtgctaaagtctcacgcacaaggggtgctacttttatacactgtggtctagttatacaatggtgctacttttgtattagaaaaggtagctcaacttcagtgagttttttatgtttattttttactcattatgttttttgtttcgtgtaaatctttattattattcctaaatgagtaatataattattattgtatactgagcgacataggatatatttaataagatattacttataaacaataatttatttggaagggtaaagttaataagcaataattattataaatattattttttttaaattttctttccaatagtgtagaaagatttttcatcacgtgtttaatactgtccactcagattattattgtatcagagaatttctacctagattattatactgggaatatttttaggtagattgttactgtttatttacaacgagtttactagttttgacaactgaagcatttaagaaaatgagccataataaactgttagttctgcaatcatgttaaattatcaggaggataataaaaatcggcaattttaagcgctcgagtgtactttggtaacattatttcatgaataaaactgtattataaataatttttactaacattttatttatatcttcgtctgaataattgctaaactgtgctgttgactttgttaagttgaaaaatttgtgtcaaattaaatggaataaatgttactgcatgtttttacacaaagacttgaattttgtatttaagtattgaaaaataatatgtccaacatcacacgatagtaagaataaataagaagatattgctccaattttgttcaaaaacttgtttccattcggcaatcgtcactcaaaccttccgagctctcgcgtctattgccagacaacaagttttcgaaaaatagtcgcattagtgtcaatttcttgtcaatctcttgtgagataaatattgataacttatttattatattgaatattcttggaaatgtattgatttatgttttaaggtttaaaagataataaaaccttttaagtgatctttattttttataatctttaaaatttttgatactttataaatattaaaatattaaatctt

SEQ ID NO: 4385 - DNA, 3299 bp, Diabrotica virgifera
  SmartBlast Evalue=2E-21; Info="Leucine-rich transmembrane protein, putative n=1 Tax=Pediculus humanus corporis RepID= E0VUL3_PEDHC"
aagagtttaaaatacaaaaaatatgttgctgattgtattgctattgatgttatatccaaacgaaggaattggtggatcctgttggttcaagggccataccttttactgcagcagaataaatcaagaccagtttttgtacgaattatttagacaagaagagtatttatcaagtaattatataaacacgatcataattgaggactccgactttcaggctattactgacttccctaatttaagtgatttattaccaaatataacaataacagatttggctattcgccgatcagttgtaaactatatatctgaaagcaccttcaccgtatttgatcagttggtaaatctggatttaagtgaaaattatatagataatgttgcgttttgtgcaggtttgtcagtttccgttaaaacggcaaatctaagtcataaccgtatttctagtatagatataagccaaagaaaagtagttttagattacctagatttaagttataacaatcttaccaaatacaccgagtcttctattgatcgggatttcatggggaaatctcttgacctaagttacaacacatacttaactgatgtttacgttttggaaaaaagtgaactgtacattttgggatgtaacgtacaaaattttgttaatcatttaacagtaaaaaaaatgtttactaactttttgccttaccattgcaaacttaatgttgttgacttttttacaatttctaatacaaatttaaacgtaataactcaaaatgtagcacctaacattttctgtgaaagtggttctactctaatagatttttctaataccaatcttactgcaataccaaaaaatttttttgattttgactcagactgttttgaactaaatcttagttacaatgacctgtcaaatttagaggaccatatattagggtcaacaacattgaaaaaaataaatctttcattttccagaataagtaatatctcatccaaattttttaaagcaaataatcgtataggtgaaataaatttaacagcaaattatttagataaaagtgtttgtgatggtagcgaaaatttgaatgacctatattctcttgacatgtcattgaatagtctaacagaacttacttcaaatagctttaaatcttgtgtttatttaaaatacataaatatgtcacggtgttttatagaccatgttgcatctgatagttttaaatcgttacggaatgtagagtcaatcaatttaagcaataataaaatactcatcatagaatcagatactttctacaacctgcaaaatttaatggccttagatctttccgaaaactatttggaagctataagagaaaacgccttctcaaaattagactccctggagaaaatactattttctaaaagtgacaagactaaacgtgttgggttaactattcatactggtgctttccaagatctaaggaaacttaatgaactgcaacttgcagaattgggaattcagcaaatgatgcccggtgcatttaaaaatctattaaacttaaatatcattgacttaaggaaaaattatttatccttcctaggtactgatgtatttttcaatattaaggctcatgcattatattctggttatgtgtccatgccagtgcattttgattcaactgtcaacattactaatttgtttctagagacataccaatcaatattacatgaacggtctgtggtaagccttaacttgaagcatttacatatcttgaattccaatatttatcttatatcgtcaagttttctgttaggctcatataaattagaatatctggacttcgaaaatacaactgtacaaattgcaaactccgaagtttttactggtttatttaatttgttggaattggatgcaacaattttcttcagagatatagacgttctcaaagactatacgtttaaagatttaaatagtctaaaatctctgtatttgtcaaatggcaaattgacgacaatcgaaaaggatgcattttttgggctcaaaaacttagaaaatttatatttgaataacaataagattgaatatttggatgcatcacttttcagaaatcttaaactatctctattggatttatcaaacaatgcttttgaaactatagatatattgtcttttcctagtaatttaccttacttaaaaaatttggatttaagtcattgtcaactgaaaaatttgagtgcatcaaataagacacaacacgaaaacttggagaggttgattttatcaaataatatgttaactgaaatatctaatttgattattgactcatttccaaacttacggattctacatattaaccaaaatatgatttcaagaattccctatatagaggatggcagaaatataacggaaatacgagcagatggcaatcacttaacatatttaagcaatattgatgctaaaaaaaacttacaatttttaaacatctctgataacccaaatttgggagtaaacgtgcaagtaacttacttaagagaagttccatttttggagacatatttaatggacaatactggcatagtgcttagatataacgaaatagcttattactttccaagcttaaaacaggtagggcttaactataacaattaccagtgcaatgagttacaaaggattgtacaaaaaatggacgaaagaaacattagttatataccagatagtcccaggtatgacattgataatatcaatggtataacctgtgtaaataaaatatcatcgtcgtaatcatcatcatctactataaccacaacaaactaacaaacattatcattctcacttgttgagggttttattcatcatcatcatgatatctatactcacagagaagtgaatcatcccaatcgatttttcgcggggaatcagtccgcattacctttttggttttacagttgattctgtgaagtggcatcttcgacaatatttctctattcgttcctgtttttgcttattgttggctattttctaactcacatgttcttaatgtcctcaattatctggtttccccatgtggttttgggtcttcctcatggtctgcctaatactgaacatcatttagtgattttcttaataacttattctggatttctccattctataagtacttatatctcattaatctgcttctgtttctcttgataaacctaacgatgtttttcctttcaaaagttatcttactccgtagtcgttcagttttctaaattcattagtacctttgtttaatgcacctggtatactccaaaatatttttatctctagggctcccaatcttttatgtgattac

SEQ ID NO: 4386 - DNA, 4097 bp, Diabrotica virgifera
  SmartBlast Evalue=3E-49; Info=Enhancer of rudimentary homolog n= 4 Tax=Endopterygota RepID=ERH_AEDAE
gttccgatttctgcatttctgggaaaaagtattttttggaagtttgtgaagcttgaagctatttaattgaattaaataattaggttgtgctagaaacaaataaaaatggcgcatacgattctgttagtacaaccgggtatgaatccagaaacccgtacctattctgattatgaatccgttaacgaatgtatggaaggagtctgcagaatatacgaagaacacttaaaaaagcgtaatccgaacacacctactattacttatgatatatcccagctcttcgattttgtagaccagctctccgatttaagttgtcttgtgtaccagaaatcaacaaacacatacgccccatacaataaagattggatcaaggagaagatttatatattactacgacaagccgcaggacatgaagtataatattttcgaatgtattaaatacttatgagctgtgaagcaaagttaccttcaaacctagctagtaataatgtgtatatgtatgtatgtagtgtatacatttctaacacctatgggaacatccataaactatgtcaccacccatcacctttttcgtaaaaccaggattcacagttgaggccccctcatgtcaatgttgcaaatgcaactcataaccccccttcccccttttaaaaaaattcaatgttatttgattttttcaaattaatattaaaactttatttacaagtgtaatgttaagatttataatctgcttaaaataatttaatttaataaaaaaatatgtacacagcttttaggtaagaacatatacttacacttatttcatccattctatgtcgacattaatattattttattgctctctttattttctactgggaaagttacttcaggatatatattttctatatcgatcaattctaaatatttagattcatcagtatctttaaaaaaggcatttcagatttctatatttagtaatttttattgggcgaactcagctgcatattgagctaatattctgcttttttctatgaacttttgatccatgtagttcaacagattttttggtgggacactacacatacatgatagaagctagtaaaaaattatatttataaagacaaaatcgataaatttaaatgactaaatgatgtaggatgtgcactgatgtcccactcccctgtcatataccatcctaataagcaaagtccccctccctcttctgtatgaagtagtttatggatgctctctttctggaataaattattaagttatactgatttttcagtcaatgttgtttctgataattttaacttttatgtattttttgtacagtttcataaaatagaacaccaataaaattgacatgctaggagccatgtaaagtatttaaaaaaattaaattttatattgattaaattattttatactgtaaaacaactgaaatgaaaatgtgggagaaaacaattccatcttgtgacccacggctcaaaaattacaaaattttttcttaagctataaactggtgaagtaagctacatatagatatcgaatttatgaaaacaatgttacaaaaaatgtcatgttttgataatttggcagtaaagtaaatcatatggacggcgttatgcataactcgaccaagcaccaaaacatagttttgagataaatggcttcaaagtttttcgtttcttggttgcttaatggtcgcttaatggtaagtggattaatgtcgcttggtttaattttgtttttcttagtaaccgttaaagtgacaataacagggattttttccaagatagttttagctgtgtcaccagaatccgctgttatctctatattaaagaaatggcgcttggtcgagttatgcataacgccgtccaattatggtgcaacatacaacataaagccgacctatctataagctgagctgggctaagctggagcttaagatttgttggtgcaaccaagcattattattttacaatatagtctgcctagtttgacaagtatagcaaaggtcatattagttcgttttatataatataattatatagtccaaataactgtaagatataagagaataacacaatttgataatatatttttcggttaccattcgtacttaaatatacactgttctaatattatttttcacctaacctttactaacttctatatctagatccttatctgtcaaatatggcaacttaaccttttcgtggagggaaataaccgtagtcgctaacacttttggtgcccggtagatggttaaatacaaagaggacttgtttaggtaccgttaattatcgtaaataccagtaaatgattcatttaggattaaaattacttgctaaagtaagctgagtaagttttatcggtgataatattacagccttctagtttgtcaacgatacgccatctaggttttcaaagatatattccaggacccggtataaaaccgtgggagaaataatacccaccttgatgtattcctcgatttacggtgttttgtctgcatctatccagacttcatccaaataccatcactttcatgtatgtacttgataaggctcgaatgcctggagtcaaatcttgcttaatccagggccttacaaattgaccaaatttccaagacttttcggttctacaaatttaatctacacaattaagtgtatggatacattgtattctgcgtaatatttctttattacagttcttattgcataaaggtggttagtaatatttaacgcgtttcaaaaacccgcctgttcgacagtgaagagtgatcaattcaaatagcacagacctataagtgatgtattggcaaccgtaaactatatttgttataatcaaatcaataattttataagctaaatcagggtagttctcggaagttggctgtataccatttagttaaaaaactttcaacatcaaagtaaaaaaacttctgttgtaatttgtgaagtattaaattaaaaatccaaacggttagaatagttgttcagaacaaacgttttcggacttatcagtcatcttcagtgaactttgaagtgcttgagctaataacagcacaactaaacaatggctgggtttaaattgtagactacatacttgggggtattaaattaaatgacataaaatgaatgaaaatggatatatctctccgggaacagtatattatgtctctactcaaaatggacagatgtaattgtgattttgagtagggatacatactgtttcctgttatatccatttttatcgactttgtcatttaatttaatacctttaagtatgcagtctacaatttaaaccaaatcactaattggttttgcggttaatatcacaagtacttcaaagttcactgaagatggactgataagatggtccaaaaacgttccttctgaacaactattgtaatccagttatatttttaattacatttttaaataaatatttatacctattacaacagaagtttttttagttctatgttagttatttttcaataattttatgattcttccagactaacatgttaattcttttatattaactcagaatgtaattacgtagtagcatacaggctttatataataattttagttttaacaaatattgaataaaggttactaaaaagtgctgatctcaatgttgtattagttttatctcacatttagtcatttaaagatatgtacaaatcctataaacataaactattagaagcatttctagagtgttgaattttcacaaattttatttctctactgcgaaagatcttataaaaagtacttgattaattgatgtgtgtacctcgttaaaataaatgtaaataattagcgtttatgttaaaatgacattttacttttgatgtatttgacgtgtgcaaagtttgtgatgtccccaaaaaccaaacccgcatataatttcgatcatcgagaaaacattttcagatgtaaatgtctgataaacacaaaaaccatttcttctaaagtattgtatatatttttttagaaattcagaatgagcactgttggatgtattattgtatttatagaaatgattagtaatttttgcatataagttggtttttttatacataggttatgtattaagtt

SEQ ID NO: 4387 - DNA, 3667 bp, Diabrotica virgifera
  SmartBlast Evalue=1E-128; Info=Endonuclease-reverse transcriptase n=1 Tax=Schistosoma mansoni RepID=Q4QQE8_SCHMA
gttccgatttctgcatttctgggaaaaagtattttttggaagtttgtgaagcttgaagctatttaattgaattaaataattaggttgtgctagaaacaaataaaaatggcgcatacgattctgttagtacaaccgggtatgaatccagaaacccgtacctattctgattatgaatccgttaacgaatgtatggaaggagtctgcagaatatacgaagaacacttaaaaaagcgtaatccgaacacacctactattacttatgatatatcccagctcttcgattttgtagaccagctctccgatttaagttgtcttgtgtaccagaaatcaacaaacacatacgccccatacaataaagattggatcaaggagaagatttatatattactacgacaagccgcaggacatgaagtataatattttcgaatgtattaaatacttatgagctgtgaagcaaagttaccttcaaacctagctagtaataatgtgtatatgtatgtatgtagtgtatacatttctaacacctatgggaacatccataaactatgtcaccacccatcacctttttcgtaaaaccaggattcacagttgaggccccctcatgtcaatgttgcaaatgcaactcataaccccccttcccccttttaaaaaaattcaatgttatttgattttttcaaattaatattaaaactttatttacaagtgtaatgttaagatttataatctgcttaaaataatttaatttaataaaaaaatatgtacacagcttttaggtaagaacatatacttacacttatttcatccattctatgtcgacattaatattattttattgctctctttattttctactgggaaagttacttcaggatatatattttctatatcgatcaattctaaatatttagattcatcagtatctttaaaaaaggcatttcagatttctatatttagtaatttttattgggcgaactcagctgcatattgagctaatattctgcttttttctatgaacttttgatccatgtagttcaacagattttttggtgggacactacacatacatgatagaagctagtaaaaaattatatttataaagacaaaatcgataaatttaaatgactaaatgatgtaggatgtgcactgatgtcccactcccctgtcatataccatcctaataagcaaagtccccctccctcttctgtatgaagtagtttatggatgctctctttctggaataaattattaagttatactgatttttcagtcaatgttgtttctgataattttaacttttatgtattttttgtacagtttcataaaatagaacaccaataaaattgacatgctaggagccatgtaaagtatttaaaaaaattaaattttatattgattaaattattttatactgtaaaacaactgaaatgaaaatgtgggagaaaacaattccatcttgtgacccacggctcaaaaattacaaaattttttcttaagctataaactggtgaagtaagctacatatagatatcgaatttatgaaaacaatgttacaaaaaatgtcatgttttgataatttggcagtaaagtaaatcatatggacggcgttatgcataactcgaccaagcaccaaaacatagttttgagataaatggcttcaaagtttttcgtttcttggttgcttaatggtcgcttaatggtaagtggattaatgtcgcttggtttaattttgtttttcttagtaaccgttaaagtgacaataacagggattttttccaagatagttttagctatgtgtcaccagaatccgctgttatctcgatattaaagaaatggcgcttggtcgagttatgcatctctcttggaccatcactcctagtggagtattgggcgcatctgcgtttcttggccgatagtgtaagacagctggtggccagctcagcgcgtcttcttgtgtttattctctggttaatctgcgtaccagttccttccattctcctctgtttcttgctttgtttttcacttccccccaacttaagccgattctgttgtgttctctggttactgttttctttcaagtattatctggtcgtcccctcttccttgtaccctcaggttgatattcgagtgcttatcttgtgatgttacttaacgtatggccgatccatttccatttcttctgtctgattgttgttattatactggtttgtttcgttcatttccatagttcttcatttgttattatattaggccagtaaatttttaagatctttcttaaggacctatttacaaaagtctgtagcctctttgttgtgctttcgtcatgcttccaagtttctgctccatagagtaatatgctttttacacatgtattgaatatattgatttttgttgactctgttatttcacttgtttgccagattttatttaacgcattgaaggcgaattgtgccttcgttattcttgcttgtatgtctttcatgcatcctccttttctttccatgattgatcccaaataagtgactttctctacttcttcaatttctttgtcttttatttttattttgttaatttgcgagttatcattttttaagatatttgtcttctctgtatttatccggagaccaatcatatcagagtactgtgttagcttatcgacttttgtttgcatgtgagttctgtgttctgttaacaggtagacgttgtcagcaaatttaagatcttcaagctgattaaagaggttccatctaatgcctgtccgatcatccgttactttcctcataatccagtctaccaagataaggaacaaagtaggagataagatacaaccttgtttaacaccgctttcaatagctatttcttctgtgattgctccctcgtgttctagtctagctttatacccatcataaaacagtttgatcaggttaataatttttgttggtagaccatactgtcttaaaattttccacatttgttccctattgactcggtcgaaagccttttcaaagtcgataaaacttaaatttatgtctttctgccattcattagcttgttctaggaagattcttaaggtgcatatgtgatctatagtagagtgtttagcacgaaagcctgcttggttacttctcagtttcttgtccaattcttctttcattctttcgagcagaatttttgttagcaccttggatgaggcgcttaatagagttattgcacgccaatttttacagttactcagatctcccttctttggtatttttattatcagtccctctttccattcttgtggcagttcttcgttggcccatattttatttaaaagtttatgtagcatatctatggcttgttcggtgtctgcttttatcaggtcgataggtaaattatctgttcctgcggatttgccattctttaataatttaagtgcgttggcaatttcctctcttgtaattaccccagtgttaacctctaattcttgtatttcaatttgctcatccaattcttgggttcggtcatgtttggcgtatatttcttcaaagtattctctccatctttgagttatttctttctcagatttaattaattttccttgtttatcttttatttctcttacatttcttgctcgattgcctgttaggtttcgtataatcgtgtattgtgttcgtagatcattatc

SEQ ID NO: 4388 - DNA, 3878 bp, Diabrotica virgifera
  SmartBlast Evalue=0; Info=Cytosolic purine 5'-nucleotidase n=1 Tax=Harpegnathos saltator RepID=E2C3D3_9HYME
aatgctacaaaaacttacggctagaaaaaaagttactaattaaaaaacatcacatgggaatttttttaaattcttatgagcaattattaaaaaaattagtataaaactttctaaatacgttttaattattgtgcaagttggcggttccttgtattctctgtattttagtctaacaaaactgttttttttttcatcaaacaagtggtcaacagaacttgattgataaaaaaacagaaataataaaatatgattttctttattacagaaatgtacgttactctcaaatgaaatacgacaaacgctaattacgatcaatagggcattacaacgcttctcatttgtttcgggctcctgccatatgtcgtatattaatattatacacggattatacgacatattagagaagcccgaaacaaatcccgggcccgagaagcccggactgaaaagtcctattttcagccggttgtacgaatagggcttttcaacgattctcatttgtttcgagctcctgtcatatgtcgtataatccgtgtataatattaatatacaacgtatgacacaagctcgaaacaaatgagaatcgttgaaaagccctattacttattttcacttccaatcatcagtgaaacgtttgacaggacattcatgcagtggtacatcttccaagagttagttactaataagtaagtgttatccactattcaaaaagtatttcgcccttttaaaacttttgtcgaaagttcaccctaattagcttttgtcgtatgtcacattatattcataaaaaatattagatgccaaaaaacagtatacagtcgaacccgcttattggaatagccttcgtgccaagcaaaaatattcttaaaagcgggatattctaataaccgatcattggtggctagctgaaataagtgtaccgaatatatctacgtcagaatagtatatactaagtcaatatgtagatactcgtatatgcatatggttttaggtctttttatgccaataaaaatttataatctatttacaaaaataattacgaaacgattagaaaataaattggaattgagttttagaaaagacttccgaacaaacgatcaactattcgtaataaataatcttaggtatataaaaatgtgtggcaatatgtacctatagaaatttggagaccaatgaaattattttatgaccttgtcggctaacgattgaattttctgtgggaaagtagcgcttactcataacacagtaataaagtgtttattaggtacctgacaaaccgtaatacaaaacagcaggctttcgaagctcttaccgacaaaccaggcaaaatttaaatttttaagaaattgtacgtaacaatttattcgttgacctgaaaaaaatattctattaagcggtattattttactaaaccatattccaataaacggataaatttattagaggataaatggaaacgtttcgggacctcgaatttatattccataaaccgggatattcctataactggtactctaataagcgggttcgactgtatacccaaatctagggaactcacattactgcaaagtcaactaatttcagagagcatctaacttttctgtattatggtatatacaaaatatatttcatagcataaaaatacatttcgggggctatttgttaaatattattagaatgtcacagaacgataattatatagtaaattctaaggttttgtgacaacttaaaggtgcgtattcactgttgttttaattctgtgaaatttttaaaacttccgttaaacttacaatcatatttcatcatatctgtaaaaatatgacaaagggcaattgacataacaaaatacctacctatctataaggcgcgtgtttttaaaaatatttcggttgttaacagctagtgaaggtatctatctagccctatgaaaatgtcgaaaacctattattgtgcgtgtgtctcgaccttgttttctgaactgcttattggtaaattgttattttcagttctcgataatttttcttcgctatcgtcgtcagagaagtcttcgtcgtgggtatgcgtgaccgactgaggcgtggctggacgtacgtgcgggatttgactctgggcccgctccaagggcttcttctctctggattcaattgaagattgtggagtaaccgtattatgctccctgttcagctccatgacgaaatgttgctcatgagctactgtagattcgtgaggtaacaacattgctggcgccctgaacatgtacgagaagggatagtacaacagattaaggtgagtagctgcatacagatctgcataccttacaacctgagaagagaaaaacgtctgccttgatccagatctaaacaaactgcccatcataccatacgacatatccattttgtgtgtcacgtctcttatagatgtcctaagttttgaaatatctggtttttctttcgcactactgtctaagtttttgtacatttcacccaatttaatatccaatccctgtaattcctcaaacagctgacacttatcagtccacacgtgcaactctctaaccaattcgggcacgatcaagaaggttcgccagcctctgatcttcttactcttcaaaatatcaccgaaaatgtgatccccaacatagagcacgtcttttcctttagccccgatgaatttcgtgaagacatcacaagaacctccggaatagacatggtcggatagcaggggacctgtatggacgcccactcgaagacctccggtggaagtgtccacttgacggagaatagttccttcgccgaagaagagtggtttgcgagcgtcgcagacgactatgtcaaagtaggttttccagtttcgatgaggatcttcgggcctaggtccatgggagaagtcgaaaagatagttcataattttatcggtatacgtataatcgctgttcgttaataagaaagtcttggctccactctctcttagcctactcaaaaacattggaagacgttcatcttttttgacatatttttctaaattttcgattgtcctatttttgaggtccccatgtaaatggacatagtctactgcgtttctaacatcctgaaaaatagatttgtacgacatcagaagttctccacattttactcccgtgtcggttttggagtattccttacaattggtgaaaaagtctactaaacaagctaacaaataagtctcaggtaaattaaatagtgtattcagtacgtacactcgagattcgtccagcgttaaaaatttattgggatatagttcataaacacgggaatgctttataaattcgaatccatgcacacatactaaaatatttccatatgcgtctacttttaaaagatttccatacaatgagtcgaaccacaatcctcttactgcaaatgttggatcatactcaaattgtaaaatttcttgtgggtatcctatcgataccatatgctccttaactaaatcgaaacctaatttttcatattcgggagatttgtactctgctaaggtataatccatatcaaaaccatagaacttgatgttttcgagatgaagacttctgttgacgaatattttatttctggcatcttcgagtccataatcatgatgtccattgatgttcatgttaaacacaaaaaccacataaacgaatgccttctaaaacaaccaacactaaacgtcgttcaactgcccacaaagattatgataaaacaactagtacttagttgaaaaaattttatacccagcgagagaaaatcaaacgcactcgacctccactctagtaattttaatactgtgaactgtgaacatacacaaagcagatacgaaaacgaagtgaatgtgtatgtatggtgtgtatgtgtgtgagtagaatc

SEQ ID NO: 4389 - DNA, 3806 bp, Diabrotica virgifera
  SmartBlast Evalue=0; Info=Cytosolic purine 5'-nucleotidase n=1 Tax=Harpegnathos saltator RepID=E2C3D3_9HYME
aatgctacaaaaacttacggctagaaaaaaagttactaattaaaaaacatcacatgggaatttttttaaattcttatgagcaattattaaaaaaattagtataaaactttctaaatacgttttaattattgtgcaagttggcggttccttgtattctctgtattttagtctaacaaaactgttttttttttcatcaaacaagtggtcaacagaacttgattgataaaaaaacagaaataataaaatatgattttctttattacagaaatgtacgttactctcaaatgaaatacgacaaacgctaattacgatcaatagggcattacaacgcttctcatttgtttcgggctcctgccatatgtcgtatattaatattatacacggattatacgacatattagagaagcccgaaacaaatcccgggcccgagaagcccggactgaaaagtcctattttcagccggttgtacgaatagggcttttcaacgattctcatttgtttcgagctcctgtcatatgtcgtataatccgtgtataatattaatatacaacgtatgacacaagctcgaaacaaatgagaatcgttgaaaagccctattacttattttcacttccaatcatcagtgaaacgtttgacaggacattcatgcagtggtacatcttccaagagttagttactaataagtaagtgttatccactattcaaaaagtatttcgcccttttaaaacttttgtcgaaagttcaccctaattagcttttgtcgtatgtcacattatattcataaaaaatattagatgccaaaaaacagtatacagtcgaacccgcttattggaatagccttcgtgccaagcaaaaatattcttaaaagcgggatattctaataaccgatcattggtggctagctgaaataagtgtaccgaatatatctacgtcagaatagtatatactaagtcaatatgtagatactcgtatatgcatatggttttaggtctttttatgccaataaaaatttataatctatttacaaaaataattacgaaacgattagaaaataaattggaattgagttttagaaaagacttccgaacaaacgatcaactattcgtaataaataatcttaggtatataaaaatgtgtggcaatatgtacctatagaaatttggagaccaatgaaattattttatgaccttgtcggctaacgattgaattttctgtgggaaagtagcgcttactcataacacagtaataaagtgtttattaggtacctgacaaaccgtaatacaaaacagcaggctttcgaagctcttaccgacaaaccaggcaaaatttaaatttttaagaaattgtacgtaacaatttattcgttgacctgaaaaaaatattctattaagcggtattattttactaaaccatattccaataaacggataaatttattagaggataaatggaaacgtttcgggacctcgaatttatattccataaaccgggatattcctataactggtactctaataagcgggttcgactgtatacccaaatctagggaactcacattactgcaaagtcaactaatttcagagagcatctaacttttctgtattatggtatatacaaaatatatttcatagcataaaaatacatttcgggggctatttgttaaatattattagaatgtcacagaacgataattatatagtaaattctaaggttttgtgacaacttaaaggtgcgtattcactgttgttttaattctgtgaaatttttaaaacttccgttaaacttacaatcatatttcatcatatctgtaaaaatatgacaaagggcaattgacataacaaaatacctacctatctataaggcgcgtgtttttaaaaatatttcggttgttaacagctagtgaaggtatctatctagccctatgaaaatgtcgaaaacctattattgtgcgtgtgtctcgaccttgttttctgaactgcttattggtaaattgttattttcagttctcgataatttttcttcgctatcgtcgtcagagaagtcttcgtcgtgggtatgcgtgaccgactgaggcgtggctggacgtacgtgcgggatttgactctgggcccgctccaagggcttcttctctctggattcaattgaagattgtggagtaaccgtattatgctccctgttcagctccatgacgaaatgttgctcatgagctactgtagattcgtgaggtaacaacattgctggcgccctgaacatgtacgagaagggatagtacaacagattaaggtgagtagctgcatacagatctgcataccttacaacctgagaagagaaaaacgtctgccttgatccagatctaaacaaactgcccatcataccatacgacatatccattttgtgtgtcacgtctcttatagatgtcctaagttttgaaatatctggtttttctttcgcactactgtctaagtttttgtacatttcacccaatttaatatccaatccctgtaattcctcaaacagctgacacttatcagtccacacgtgcaactctctaaccaattcgggcacgatcaagaaggttcgccagcctctgatcttcttactcttcaaaatatcaccgaaaatgtgatccccaacatagagcacgtcttttcctttagccccgatgaatttcgtgaagacatcacaagaacctccggaatagacatggtcggatagcaggggacctgtatggacgcccactcgaagacctccggtggaagtgtccacttgacggagaatagttccttcgccgaagaagagtggtttgcgagcgtcgcagacgactatgtcaaagtaggttttccagtttcgatgaggatcttcgggcctaggtccatgggagaagtcgaaaagatagttcataattttatcggtatacgtataatcgctgttcgttaataagaaagtcttggctccactctctcttagcctactcaaaaacattggaagacgttcatcttttttgacatatttttctaaattttcgattgtcctatttttgaggtccccatgtaaatggacatagtctactgcgtttctaacatcctgaaaaatagatttgtacgacatcagaagttctccacattttactcccgtgtcggttttggagtattccttacaattggtgaaaaagtctactaaacaagctaacaaataagtctcaggtaaattaaatagtgtattcagtacgtacactcgagattcgtccagcgttaaaaatttattgggatatagttcataaacacgggaatgctttataaattcgaatccatgcacacatactaaaatatttccatatgcgtctacttttaaaagatttccatacaatgagtcgaaccacaatcctcttactgcaaatgttggatcatactcaaattgtaaaatttcttgtgggtatcctatcgataccatatgctccttaactaaatcgaaacctaatttttcatattcgggagatttgtactctgctaaggtataatccatatcaaaaccatagaacttgatgttttcgagatgaagacttctgttgacgaatattctttgtttggcgtttctgtaccactttcttccaattttatcggcatgttgttgaagttctgcataatccatgtttatttttacagatgtattaaattacccactactttataaatcactattaaacgttttcgatcaaatgtgtaatataataaatcgttagcgaaaagttctgtatcctggtttgaaatatttcaaaataaatcacgattcacgatccaaataatttt

SEQ ID NO: 4390 - DNA, 3834 bp, Diabrotica virgifera
  SmartBlast Evalue=0; Info=Probable ATP-dependent RNA helicase DDX17 n=1 Tax=Camponotus floridanus RepID=E2A8Y5_9HYME
attgcttgaaaaaaagttattgttgctgtttttataagcgtttgagataagggccctttacgtcatggtttgaacgtcaattgtatctgtcaatatattgcaatgggcgtaagttctgttgttgcggcgatagaagatggtcatggtcgcttgagatgacagttttgacgtttctagtgctttgagaagccatatggtcacggcagtttcccttcgaaatcatctgtaataagtaagatttcatacttcatactgctggttatatatacatcttctcaaactagagtaactggaccacaatgattgtacaaacaatttaaaaacattaaaggtaaaatgtgtaactaatttaggaaaaacttacgttgagacagcagcgatgaaccaacgaagatgtgatacaggtgtgtacacacttgaagtttaattttcacaattcataattttcatgagacgcataattaatgcatctcacttttctttcgatcaggacaattaacgtgatgatgctgtaagcatggttcttctatgaaatgggtcgcacttggaccaatttaatgtctgcattaaattcttgcactttaccagatgcatattaaatacctttcttcgtattagatgagcactgttgtaagggcattgtatttgttcttcagggtcgagataattctccattgttatgcgataacttgtcgatcttgagaaaccagcaaacgaacgaagtgtacacacgagttggtgtcttcacgccttaacttttcaaaagggtctctccgatgcaggaagaattttacggcttcgcccttgtcgtcctatcattgctccccgttcgtcccgcaaaataccatggttatcgataatgggagcgtgggttaagagaaagacgggaacacatgtttcgaactatttttacaaccacacatttacgtgaattcaaacacagtcagttcaatatactttgaaggatagaaacgttggtttcatttcgttaagcaattcgttagcaacttacgctataacataactgaaaatagttaaaaaagaataataacttccaaattaaattcaaattaccgagtaacccgaattttagcatagcaatgtatacattgagtttaaaagtgacattcttcttacaaatagttatggataaagatatgatgaaactttcgtagtgtggtaagtactagttaaatcgtgaaaaatgtgaaaatatataaatacgattgtatagacttcccacacgttagagaaatattggagccaaagataagaactttctgattgttccgacatgatcgtattaggacagttcgtactcaaacatgcataaatttatatctacataaattcgttgtgtatcaacatagaactgcacttaaaagccatttgtcatttatctactattctcaaaattaattacatcgtcaaaaaaatttattcacgtttgtgacttgtatatatcagatctctcctcacactagccaattatgaatcgatagaagttataaaaatttaaacaacaaaaaagaaaaacgaatgattaggtgtttggggtggcaagttactgctgtactgcggcagtggggggttgggtgtactggtagtaaggcaccccagctgggaactgattgtaggcgggcgtgggctgaccctggcccatcgactggtaggcgcatgggttggtggcgccgggtagtcctcgactctggaagaatttgtggttcatgatggactgcatgccgtcggcgggctgtgactgcaccatgtactgggctgggatcgtgtggtacatgttggcttggggagcttggtacgattggcgatcgctgtaccgttggttgttgtactgacgaggattattgcaatggtactccttgggagactcgtaatgtctgtcagaatcaaataaaacggaggcaccataatagtccttaccatagtttctgggagttccgttagaaatcgactgttgctgagtttgctgttgcgcttggtacatgctgttggggctgtaagactgttggtagacctgtccgttctggtaatgagagaaattgttgtaattgttcctctggtttctctgcatcgcgtcgtttctcatgttattggtaatcctaggcccactgttgggcttgaactcaccgaagctctttgagttcgtccaagtcttcaccttgttggaattttgactgctaggcgaagaattgtccttatttctgttttgccaacggtgttgcttaggattggtgctcttggcttgctgggctaggtcgagcagttgtgggttcactacttggcctgcttcttccaatacagctatcaagtctttggcttggcgttggttgtttggagtaaagaaagcataggcagtacctgcttgttggcaacgtcctgttctaccaatacgatgaacgtagtcttcactggaattggggtaatcatagtttattacatatttgacatcttccacgtccaatcctctagctgcaacatcggtagctactaaaatggacgatttaccagaacggaactcattcaatacgtaatcacgttcgggctgtgatttgtctccatgcattgaaattgcggaaaatccttctctcttgacgacttttgtaatatcatcgaccttcttcttggtttctacgaagatgattattttgttttgtctgtctgagccaaattccttcaaatacctaatcagtttttcttccttctctagttcgtcgcatacttctactatttgttttatgttgtggtttgcagatagagagagacctccaacattgacctgaatataattttctaaaaactcttcagctaactgttgtacttgtttgggccatgtagcagaccacatcagaacctgcctgtccggcctaatttgttggataatcttcctaatctgaggctcaaaacccatatctaacatcctatctgcttcatccaaaaccaagtaagtacacttcgccaagttcgtagtacccttttccaagaaatctatcaatcttcctggagttgctatcacaatttctacacctctttccagatccctggcttggggtcctttgggagagccaccgaatatgcatgtgttcctaatcatcgtagtagtgccaaattcgtgggctactttttgtatttgttgagccaactctctagttggagcaagaattagtgcgataggtccttctcctctttgtggtctttgttggtggtttatatgcactgcagctggtatcatataagctagagttttaccagaaccagtttgagcaattcctaccaaatctcttccagataaaacgacgggccaaccttgtgattggatagcagtgggttcattgaatccctgtttcaacagaacctgcatgatgtattctggaaatttgccttcttcgaaacaaaagtttggttgtggtatatcagttcctctaacgatgatatccattctggttctgtaattttcaacgtctgaaggtgtcctggccaaactctgatggtgtggttcatagaaatttttcctgaatggtttaaggtcttgttcttgccaaagaggtactcccaactgcatgttgttttcaggtttctgtttctttttgtactgttgttttggaccaccgaagtcttgaatgggggccatggcgtgaggaggtccgcaccaatagttggactgctgttgcttactgtacatgtcaccagctcgatcgggtctagatattgtgttattgtgataaacgttattatactgcattattgcagtgtgtattttgacagcgagtctggtttttaatggcttccaatagaaaaatcttgctccaaccaggccgg

SEQ ID NO: 4391 - DNA, 3762 bp, Diabrotica virgifera
  SmartBlast Evalue=0; Info=Probable ATP-dependent RNA helicase DDX17 n=1 Tax=Camponotus floridanus RepID=E2A8Y5_9HYME
attgcttgaaaaaaagttattgttgctgtttttataagcgtttgagataagggccctttacgtcatggtttgaacgtcaattgtatctgtcaatatattgcaatgggcgtaagttctgttgttgcggcgatagaagatggtcatggtcgcttgagatgacagttttgacgtttctagtgctttgagaagccatatggtcacggcagtttcccttcgaaatcatctgtaataagtaagatttcatacttcatactgctggttatatatacatcttctcaaactagagtaactggaccacaatgattgtacaaacaatttaaaaacattaaaggtaaaatgtgtaactaatttaggaaaaacttacgttgagacagcagcgatgaaccaacgaagatgtgatacaggtgtgtacacacttgaagtttaattttcacaattcataattttcatgagacgcataattaatgcatctcacttttctttcgatcaggacaattaacgtgatgatgctgtaagcatggttcttctatgaaatgggtcgcacttggaccaatttaatgtctgcattaaattcttgcactttaccagatgcatattaaatacctttcttcgtattagatgagcactgttgtaagggcattgtatttgttcttcagggtcgagataattctccattgttatgcgataacttgtcgatcttgagaaaccagcaaacgaacgaagtgtacacacgagttggtgtcttcacgccttaacttttcaaaagggtctctccgatgcaggaagaattttacggcttcgcccttgtcgtcctatcattgctccccgttcgtcccgcaaaataccatggttatcgataatgggagcgtgggttaagagaaagacgggaacacatgtttcgaactatttttacaaccacacatttacgtgaattcaaacacagtcagttcaatatactttgaaggatagaaacgttggtttcatttcgttaagcaattcgttagcaacttacgctataacataactgaaaatagttaaaaaagaataataacttccaaattaaattcaaattaccgagtaacccgaattttagcatagcaatgtatacattgagtttaaaagtgacattcttcttacaaatagttatggataaagatatgatgaaactttcgtagtgtggtaagtactagttaaatcgtgaaaaatgtgaaaatatataaatacgattgtatagacttcccacacgttagagaaatattggagccaaagataagaactttctgattgttccgacatgatcgtattaggacagttcgtactcaaacatgcataaatttatatctacataaattcgttgtgtatcaacatagaactgcacttaaaagccatttgtcatttatctactattctcaaaattaattacatcgtcaaaaaaatttattcacgtttgtgacttgtatatatcagatctctcctcacactagccaattatgaatcgatagaagttataaaaatttaaacaacaaaaaagaaaaacgaatgattaggtgtttggggtggcaagttactgctgtactgcggcagtggggggttgggtgtactggtagtaaggcaccccagctgggaactgattgtaggcgggcgtgggctgaccctggcccatcgactggtaggcgcatgggttggtggcgccgggtagtcctcgactctggaagaatttgtggttcatgatggactgcatgccgtcggcgggctgtgactgcaccatgtactgggctgggatcgtgtggtacatgttggcttggggagcttggtacgattggcgatcgctgtaccgttggttgttgtactgacgaggattattgccatagtttctgggagttccgttagaaatcgactgttgctgagtttgctgttgcgcttggtacatgctgttggggctgtaagactgttggtagacctgtccgttctggtaatgagagaaattgttgtaattgttcctctggtttctctgcatcgcgtcgtttctcatgttattggtaatcctaggcccactgttgggcttgaactcaccgaagctctttgagttcgtccaagtcttcaccttgttggaattttgactgctaggcgaagaattgtccttatttctgttttgccaacggtgttgcttaggattggtgctcttggcttgctgggctaggtcgagcagttgtgggttcactacttggcctgcttcttccaatacagctatcaagtctttggcttggcgttggttgtttggagtaaagaaagcataggcagtacctgcttgttggcaacgtcctgttctaccaatacgatgaacgtagtcttcactggaattggggtaatcatagtttattacatatttgacatcttccacgtccaatcctctagctgcaacatcggtagctactaaaatggacgatttaccagaacggaactcattcaatacgtaatcacgttcgggctgtgatttgtctccatgcattgaaattgcggaaaatccttctctcttgacgacttttgtaatatcatcgaccttcttcttggtttctacgaagatgattattttgttttgtctgtctgagccaaattccttcaaatacctaatcagtttttcttccttctctagttcgtcgcatacttctactatttgttttatgttgtggtttgcagatagagagagacctccaacattgacctgaatataattttctaaaaactcttcagctaactgttgtacttgtttgggccatgtagcagaccacatcagaacctgcctgtccggcctaatttgttggataatcttcctaatctgaggctcaaaacccatatctaacatcctatctgcttcatccaaaaccaagtaagtacacttcgccaagttcgtagtacccttttccaagaaatctatcaatcttcctggagttgctatcacaatttctacacctctttccagatccctggcttggggtcctttgggagagccaccgaatatgcatgtgttcctaatcatcgtagtagtgccaaattcgtgggctactttttgtatttgttgagccaactctctagttggagcaagaattagtgcgataggtccttctcctctttgtggtctttgttggtggtttatatgcactgcagctggtatcatataagctagagttttaccagaaccagtttgagcaattcctaccaaatctcttccagataaaacgacgggccaaccttgtgattggatagcagtgggttcattgaatccctgtttcaacagaacctgcatgatgtattctggaaatttgccttcttcgaaacaaaagtttggttgtggtatatcagttcctctaacgatgatatccattctggttctgtaattttcaacgtctgaaggtgtcctggccaaactctgatggtgtggttcatagaaatttttcctgaatggtttaaggtcttgttcttgccaaagaggtactcccaactgcatgttgttttcaggtttctgtttctttttgtactgttgttttggaccaccgaagtcttgaatgggggccatggcgtgaggaggtccgcaccaatagttggactgctgttgcttactgtacatgtcaccagctcgatcgggtctagatattgtgttattgtgataaacgttattatactgcattattgcagtgtgtattttgacagcgagtctggtttttaatggcttccaatagaaaaatcttgctccaaccaggccgg

SEQ ID NO: 4392 - DNA, 5818 bp, Diabrotica virgifera
  SmartBlast Evalue=1E-11; Info=Leucine-rich repeat-containing protein n=1 Tax=Culex quinquefasciatus RepID=B0WEF1_CULQU
gttagctgttgtccacggcggtagtgagcgcgcacaagtcacttttgaacttcaagcggagtagtaatgtcaaatactctctgagtagtacctaccggttacagaaggaaatgtcatttcaaaaatggaattcgatcaattggggtgaagtgtaacttgattgaagaacaatcttttcgaaaaagtgcttttcgtattttaaaactttgtgacaggtaatacagtgctgtgaagtgataagtctgttttttttggaaaagttgcccttgtgaattattaatcgacattttgcgacaaaataattactcaaaatgttgaaagaagttttcttaatggcgcttatgctgggcagcagttttggtgctactctggaaccatgccctgaaggttctacgtgccactcaaccccagagacgctgaaaactacttcgttcgagtttttaagcaaattgtcccagaaggacttccgatcaataggcagcctaacaatatctaactcctcagttaataaaatagatcctaagctgaaatatctgaaaaatctggcgtacctagatctgtcttacaacagtgtgcaaatctcatcgattccctcgttgaatagtttaaaaactctgatactgaaagctaatgatttaaaagatataagtatttcacaactgccacaaaatatagaaaatttggatttatccgataatctgttaagcgcaataccaagagactggagactgttaaaaaatttaaaaactttggatttatataaaaatccaatagactgtgattgcaacaacgtgctaaattatgaactactaaacaaaagagtcatcattcctagacctctcacttgccattcccctccagaatacgctggaaaaaaagtaagttccgtcaattgttctcctatcgacatgatgcagtatgacgctcctgtggagggctcaggagaaacagatatttttgatgattctttcgcagaaaagacatccgatataaaggttatcaatgaagaagaggatgatgatgagaaaaccaacacaattgtagatgatagagatgaaaatgtagctgaaactactaccattgatcctttaaatgcaggtgttcacgatgaaggcagtggagaagaaggcagtggagagtttggacgtattcctgaatctggagtactaggttgtatcgaaaactgcgaaacacctaaaccactgactcaagatccaacggcatcgcctcttcctggtttctttgaccagtttaaaatgattattgacgatgtaaacatattcaaagaacctacaactgaagcaccgagtacaacaagtaccaccactgagtctgttgctactccagctgtggtcaaagaaccaaaaatattgaaagacaacgttggtagtgttggtactggtaatgatagaaaatcggaagtcgaacaagttgataacgcaaatggtactgctacaggagaattagaaagggcatctatgtctcccaaaaattctacggctgtatatgcagtagtaggagtaggattagttattgcagtgcttttcattctagcatttattaaaaaacgtcgatcaaagagactaaaagaaaagagacgggagataccacttactggtgaagaattgaaaccactgagcaaatatcctatcacagctgttaatgataaaccagtcaaaaacacatcgaatctacctgagcaaattcctcttattaatggccagaatggcaaaccaagggatgatactcccaaattgacttcctttgttccattagcgcacccagagttaccaaacgatgatgatgataactcagtagaacttaaccttccaaatggcagcccagcagactccgacgaagtagagattcgacccaagatccaatccgaactgctgacaccacagagggagagagtaactatccgggaggctgaacttccagagtcagttcccagaacaccgctcttggtccatcgtcagaagaacagtgaaggtgaaattgtcaccacacttgtttcttgaattgacaagtgcagtgatacctcagtatttattacctattgaatacctttgtgataaaattaacttattgcgtcgttcctatagggggccgatattaaaggtcacagcaaataattttgatctgaaacgattatttttttaattacttttattaattttctattgattataataataagaagcattttatattgctataagaataagatgctatgagttgtgctacaaacgtataaaattttttgcttgatttttaatagaatttttgtagctgcccctaaagggagagctgtcttgcgaattgacgctctacttcgaaattttgataggtttgtcgactgttacagactttacatacttacttatatgtattgattttgttgccaaagtaatttccactgttgaaacaatgaccggaccagaaacgtaagagggatggaattagaacaaattcaccctttgaaagaatttcaaattcaaatacagctcccggaacgaaccatggctgatgagaaacgctgtggacggtcgtacgcctacttaaactctactgtctctacacagacatgatttatctcactggccatggttcactccgggagctgtagtttgagcaacatactatatttatcaatgttgattgaagtcatcacaatagcaatcatccaacataggatttgttgctatttcgtaatcagtttttaaaatgaaatgtctaattattccacttaaagtttctgctacttaaagttacttaaaatcctttatttattcaatccaagttccagtgacctttttgaagtaactttatttacactgagtgattaaattattagaaaacctggtgatattgaatttattagtcaaaaaggtgcaaaatgcgcagtaattttggtttaagaattcttaacctgcttaagcatgtttgtccatagtactgtcaaatactggtactgtggcattgttccttcgacaatatacagtttaccagttttctttatgcacgatatatcatgttacctgatatatctatcctatggttggttctacagcccaattcaaaccctgacctctctcagcaaacctttcattcattatggtctgtagccattctcatctacgatcgactgccaaggagacttctggtgttctcatccaaccatcgctttcttggtcttccaataggtttcttcccctggattcttgcacccaacagttttttttttggaagccttttttctttcatcctattacatggcgtgtccactgaagacgctgtaggtgaatgattattggtctctgttctcatttatagggttcagtatccttctcagtatcccaatagtagattaacatcagccttccatctttttctggggcagtctactgaagtaccgtctagtctctcaaagaataatgacttttacactctgtcttcctctgatcttaacacatgccctgcccatattatccggttagctatgtctgatgatgtgttcattaccatacatagtcaccaattcagcttatgtcaatacctttgagggccttcaatcatcatcatgatcattctgagaaccttccttttaaataccagcagcttatttatttttcgctaatgtagagtccatgtttcacttccatatgtaacaactgtgttaaatctttgtgttatttgaaatggatctgtcatctcacgttgtgtgtgtacttgagctattgcgtccgtcatctccattcggatgatcctaactagtttggacggtataggctttgctaaaaacttgcttaaccatgactacttggtcgctggttgatcttctccgtaaggggttgtagtctttggttaaatatactggtaaatattttatatccataacacagcaaggagaatcctctatggttttgacaggggagtttgtcgacctttgtatggattggacagactatattataaatgtggcagctccgtggttaggtgtattaaccgaattatgtgaattggttagtagtaacagtaaccaggtggttttttaaatttgatcatctcatcttaacttcattgctataaaaatttcaaatatccttacttaaatatcaaacattctttacatttcacattaattgttaatttgtacagacttcaaaaaacaaaaatttataatctttggagatagtttcgtttaaaaattcatccttctttgtagtcacttcggtccaacatttgtttctgcgatcggtatggcagtctaaacccatttggcatctcatgaacacagcaattttggaactgttctgctgaattcatgagccaaatgaagttttttagctgtatgttgtataaatgactgataaaccaatcatagaacctgcttagtagtctagaattcgtagactgttcatacatcactgtaaatgagctcaaaaagattagatacggaattattgattatctagtgcgaaatagggtgtatcagcataaatatatttatatatttatgatttttatggatttatttttaaatttgttaccaaatattttatttactaaactaaagtgcacagaaatcggcccactttgaatttttgacttgaattatattttttttttcagaaactattactcggatcaaaaaaggtttagggtgacattacggtgacgatttcttaacacgtttaccgcccaattgaaaatttttgttttggccttcaggctccatatttagaatgtcaatgttattgtgaattatatgtaacttacataacgtctgagccaaacagagtgtaagttaaatacaactcacgtggcgtttaatgtgttaataatgttgaaatgttgatacattgaaagagatcatcacgagcagttgtaaatctctttctacctgttccaggtcgtctacatcctaggattcgtacaataataacgaaatttgacaaactttttttatcgttataaaaatcaaataaacatatatcggttgctacgcatataagtgataagcaatccatgacaaatttatactcatattaaagcatattaaattatctttcaaacaatgtatcccttttttgatgcaagtatgtaattagtttcagaaataaatatggttcaagtcaaaagtttaaacttagcctatttctatgcacgcaagttaagaggaacaattaattgaaaattgtggttcattccaattaaatacagtttattaaaattgttcaaatgtgtttgagaaaacatatttgatcgatttcctgaaagaattaccttagtgtatcttagaatctacttatgtagattatctagatctagatgtagatctatgtataatttaaggacagtaaaacatacaatgtatcttaacaaataaaaaaattattttgtttaagtagcgactgaaaaacaacaatgcatacctacttttataaagtacttatgttcgatgtgttatatcggccgtttggcggtttaatctcttggccttgattgttttttaattgaggattgcacttttcaatgaatcatagttggcacaaacatgaactacctgcatttgctgaactggaaaaaatagtgtacatgtcgatatggatagtgccaaaggaggtcgcatttcctttatctaattgtgtgctggtgttttgtaattgtcctcaggagggaatgctctcataaatttagataataagagaagcgtttttaagtaattcagagaaaaaaaatgaatggtaaggcggcctccaacggagtgtggcgtgggactttttaccacatttaccaatttatacgtcgaaaa

SEQ ID NO: 4393 - DNA, 1690 bp, Diabrotica virgifera
  SmartBlast Evalue=1E-20; Info=Mitochondrial phosphate carrier protein n=2 Tax=Glossina morsitans morsitans RepID=D3TS16_GLOMM
ttcgcctttagtgcagtcagcacgtggtttaggtactacatatttgtagagaagttcaactgtacgctcaaagcatgcgaatttcatcatggtgtatggtatttgtctcatccacaaaggaacaagtgatttgtagaaaccattaaacccatttggcatctcatgaacacagcaattttggaactgttctgctgaattcatgagccaaatgaagttttttagctgtatgttgtataaatgactgataaaccaatcatagaacctgcttagtagtctagaattcgtagactgttcatacatcactgtaaatgagctcaaaaagattagatacggaattattgattatctagtgcgaaatagggtgtatcagcataaatatatttatatatttatgatttttatggatttatttttaaatttgttaccaaatattttatttactaaactaaagtgcacagaaatcggcccactttgaatttttgacttgaattatattttttttttcagaaactattactcggatcaaaaaaggtttagggtgacattacggtgacgatttcttaacacgtttaccgcccaattgaaaatttttgttttggccttcaggctccatatttagaatgtcaatgttattgtgaattatatgtaacttacataacgtctgagccaaacagagtgtaagttaaatacaactcacgtggcgtttaatgtgttaataatgttgaaatgttgatacattgaaagagatcatcacgagcagttgtaaatctctttctacctgttccaggtcgtctacatcctaggattcgtacaataataacgaaatttgacaaactttttttatcgttataaaaatcaaataaacatatatcggttgctacgcatataagtgataagcaatccatgacaaatttatactcatattaaagcatattaaattatctttcaaacaatgtatcccttttttgatgcaagtatgtaattagtttcagaaataaatatggttcaagtcaaaagtttaaacttagcctatttctatgcacgcaagttaagaggaacaattaattgaaaattgtggttcattccaattaaatacagtttattaaaattgttcaaatgtgtttgagaaaacatatttgatcgatttcctgaaagaattaccttagtgtatcttagaatctacttatgtagattatctagatctagatgtagatctatgtataatttaaggacagtaaaacatacaatgtatcttaacaaataaaaaaattattttgtttaagtagcgactgaaaaacaacaatgcatacctacttttataaagtacttatgttcgatgtgttatatcggccgtttggcggtttaatctcttggccttgattgttttttaattgaggattgcacttttcaatgaatcatagttggcacaaacatgaactacctgcatttgctgaactggaaaaaatagtgtacatgtcgatatggatagtgccaaaggaggtcgcatttcctttatctaattgtgtgctggtgttttgtaattgtcctcaggagggaatgctctcataaatttagataataagagaagcgtttttaagtaattcagagaaaaaaaatgaatggtaaggcggcctccaacggagtgtggcgtgggactttttaccacatttaccaatttatacgtcgaaaa

SEQ ID NO: 4394 - DNA, 4277 bp, Diabrotica virgifera
  SmartBlast Evalue=1E-16; Info=Endonuclease-reverse transcriptase n=1 Tax=Bombyx mori RepID=D7F170_BOMMO
gccatttaatctacttgactattaataatgaatgtacacaataacaaaaaaatatgaatgatgacaggtggaagcgacggaaagaaacaaagcctactaggatacgaacttacttcttgtgaagatgctatagtgaattatttggtgccttctgttagtgcttgcgttttgtatattttactgatagctgtcgacgtcggtgttatctttagccattttaaaaacgacgatcccatttgggcttctcttacgttgttcattttatatgtgcctgctttgatcagttttgttttagtggtgtctaattgggcactttggccagagtttgagtcatgtggacgagagaatatgatatggttttggacaaaagtaggcgaacatgttttctttccagtttggagcatttggaggtttgcagaaagaattttttggtcgatagaggctgtacgagctaaggatgaaaaaagttttaaagaagcagtatcaattattacatctcccagatcaattgaactatacgtatttttacagtcttatacacatgctttacctcaagccttattacagctatatatactgacaagaaacaacactgaaataaatcgtccaacagaaaccgtacaaacgctatgtttagttttaaatctactgaagttatcagtgaccactgcctattatcaacgattcaagtcccaaaaactaacaggaaaacagtatccctggtataaacagtacaaggatctaagttcagctcctgcgtccccaaatgaagttgttttaagaaatccaatggtagcagtaagtagaaatattatagaacgcagttcagcgctggaccgttttgttgatgaatacaacgtagagcctccaagatattccgagttaagtagaagaagacgaagcagtgatctttatttagaacctaccagttctggattgtccaatcgacagactctgttggaaacagattttgatgaagatatacagaccaaagtaaaggtgttagatgaaggtgtggatgaagtggatagttatgcttctccaacttatcctacattaagaaaaacctcattagctgatggtacgaagcatcctctgtaccgcggcaccgagatttcagattactctgaaccagatttcaacatttctagaattataaatgtgaaaggtttagaagacgacgatttggcagggaaattagtagccactgtctggtggttcgcatttttgttagctcgcatattaactgtaacagtttttgcttatttttatttaaaggaaaccatatatatccttaccatccatgttattttgattatcacgattctggtgtatgacgtaaagtcagacgacgttaaaagagctaaagcagttttcttcctttttataggacttatatttattttctgcattatagaattcaaaattaagtttaaaaaagccacaaaaatcttttacggatttttcgcgttgattttctttgagaatatgggcatgtgtttggcgtggtatgtgggacaggtcgagtctttggaaaatgatttttggtttagatatgtattttacattattattgcttgctcggttttaagtttttctacaatggttttctattttgctctcaacaaacctccgagtgtggtagtggctacaacaatgaaaccatagcaatttttgttaaatctgaccttccgttgagtgacatcatcatcattaatagcgttacaactcttcgtgagtctttgccgcgtttactattgccttccatgtttgtcggtatgtgccactagttcccattgtcgcactctcattttctccatatcttctttgactgcatctttccacctttttctagtccgtcctacagaccttgttccatctggcctttcccagaacacattatttataaggttacgattgtcgttactgcgtatcacatgccctgcccatccgagtccattggcctttatatatcagactagattttcctttccgaatagagactataactcgttgtctacctattgtatctgcgcctccattcgtttttcacgctcgcgctgtctctgcaagggccatatatcattcgaagaattttaggttcccacactagcaatttatttacttctctttttgttagcatccatgtttcgcttccatacgcgactgctggtcgtattatagtcttatccctaatagcacacgacgtcctctggacgtccaaaataggtccatttttggtcctaacgtccatggactaaaaacggacgtccgacgttggacgtccttcggtggactaaatatgtacgtccttcggacgtccgacgttggacgtccttcggtggactaaatatgtacgtccttcggacgtccgatgttggacgtccttcgggtggaataaatatgaacgtcttttggacgtccgtactggacgaaatacggacgttttctgatcgtccatattggacatatatgaattacgggatcaaatagcaaaataatttaataaaatattaacttaattatgttaataaaatggtttaaatcgaaaagataatcatatttaattcaaaattgtacagtttaatatccaaaacatgtttttgtttttttgtaaagtgtgaaaatcttatttgtaaattatttgttacaatgttttattattctagttaccaagataacataagtttgctaattatgtaattctaataagcaaaaatataatttttatcaatgtatccgtactacagatgaatcttgagagcatctttttgaagttgaagatacgtgcccaaaataggtccagttttagtcctaatgtctatggactataaatggaattccttcggtggactaaatatgtacgttttcgtacatatcgttttaaatacggacgttttctggacgtctgaaaatcgcctccactacctggtttctttgttcaaaaaactaaaacgataggcgatagattttcgattcaccgatatcagttcgaagttcgagagctgatctctcagtcgttgtcgtcgttagggctcccgcctagtgttttcttcatcaaccacttattttcataatttaagaaattatattatacctatttatacgaattgtataatattataaatatactacatattattatgtaaagaaatgaagacgctgtttcacagcataacacagcgtccggtcgtctcatcgggccatttagagcatcaatgcataggtccatccaatggattataatgtgcccctatgacataggcgcataacattttaatcaactacgctgaggattcctattcctggagtttttctgaagtgccgaagcagtccatgttcctgattcctcgaccggatgaggagttttggaagtaatcaaccccatacagctcatggagttttccggggtagccagtcactttctggtaactgaacgccgaagaagaagcattcagctaccaccgtctggacatagcctatggtaaacattttaaacagtaagatttttaatttttgtgttgtgttgtcgaaaccttatttcaataaacaaaaaatttctttacaattttatcatataggtatatatttgcattttagcacattttttgattattggatacttttttatacctcatgtatattttctatccaattttatatatatttttttgataatttacgatctacgcagtttcgttgaatttttaatttagttcgatattattatacatctcacaatatgtttttcctgttttctgtatacaatacccatcggtattaactgttatttatgtaggtatagaaatttgcgagagggtcgtcttatttctgtacttaactcggaggtatagtaaattaggtaccattgtttaaacaatactattttaaacaatgtaagtacaaaagtacattatgtcgacatggtgttgttttgaatacgttttaatccaattattttcttagttggattattcaaattttttatatatttattatcatttaaatatggacacattgtctttcaaacaataattgaaatatatcagatttttatagcattcaaactactctattgcacagttactcgaaatattcgaatttttacatagttttcagtaaatcactgttcatttggtcattagatataaatacagggcggttacttcagatgatttgttacagtagcaatatcaatagctttaggtactatttgaagcattaaatgcaaaacgttacattgtttaaacaaatgtgtactttattgtattaattta

SEQ ID NO: 4395 - DNA, 3091 bp, Diabrotica virgifera
  SmartBlast Evalue=1E-16; Info=Endonuclease-reverse transcriptase n=1 Tax=Bombyx mori RepID=D7F170_BOMMO
gccatttaatctacttgactattaataatgaatgtacacaataacaaaaaaatatgaatgatgacaggtggaagcgacggaaagaaacaaagcctactaggatacgaacttacttcttgtgaagatgctatagtgaattatttggtgccttctgttagtgcttgcgttttgtatattttactgatagctgtcgacgtcggtgttatctttagccattttaaaaacgacgatcccatttgggcttctcttacgttgttcattttatatgtgcctgctttgatcagttttgttttagtggtgtctaattgggcactttggccagagtttgagtcatgtggacgagagaatatgatatggttttggacaaaagtaggcgaacatgttttctttccagtttggagcatttggaggtttgcagaaagaattttttggtcgatagaggctgtacgagctaaggatgaaaaaagttttaaagaagcagtatcaattattacatctcccagatcaattgaactatacgtatttttacagtcttatacacatgctttacctcaagccttattacagctatatatactgacaagaaacaacactgaaataaatcgtccaacagaaaccgtacaaacgctatgtttagttttaaatctactgaagttatcagtgaccactgcctattatcaacgattcaagtcccaaaaactaacaggaaaacagtatccctggtataaacagtacaaggatctaagttcagctcctgcgtccccaaatgaagttgttttaagaaatccaatggtagcagtaagtagaaatattatagaacgcagttcagcgctggaccgttttgttgatgaatacaacgtagagcctccaagatattccgagttaagtagaagaagacgaagcagtgatctttatttagaacctaccagttctggattgtccaatcgacagactctgttggaaacagattttgatgaagatatacagaccaaagtaaaggtgttagatgaaggtgtggatgaagtggatagttatgcttctccaacttatcctacattaagaaaaacctcattagctgatggtacgaagcatcctctgtaccgcggcaccgagatttcagattactctgaaccagatttcaacatttctagaattataaatgtgaaaggtttagaagacgacgatttggcagggaaattagtagccactgtctggtggttcgcatttttgttagctcgcatattaactgtaacagtttttgcttatttttatttaaaggaaaccatatatatccttaccatccatgttattttgattatcacgattctggtgtatgacgtaaagtcagacgacgttaaaagagctaaagcagttttcttcctttttataggacttatatttattttctgcattatagaattcaaaattaagtttaaaaaagccacaaaaatcttttacggatttttcgcgttgattttctttgagaatatgggcatgtgtttggcgtggtatgtgggacaggtcgagtctttggaaaatgatttttggtttagatatgtattttacattattattgcttgctcggttttaagtttttctacaatggttttctattttgctctcaacaaacctccgagtgtggtagtggctacaacaatgaaaccatagcaatttttgttaaatctgaccttccgttgagtgacatcatcatcattaatagcgttacaactcttcgtgagtctttgccgcgtttactattgccttccatgtttgtcggtatgtgccactagttcccattgtcgcactctcattttctccatatcttctttgactgcatctttccacctttttctagtccgtcctacagaccttgttccatctggcctttcccagaacacattatttataaggttacgattgtcgttactgcgtatcacatgccctgcccatccgagtccattggcctttatatatcagactagattttcctttccgaatagagactataactcgttgtctacctattgtatctgcgcctccattcgtttttcacgctcgcgctgtctctgcaagggccatatatcattcgaagaattttaggttcccacactagcaatttatttacttctctttttgttagcatccatgtttcgcttccatacgcgactgctggtcgtattatagtcttatccctaatagcacacgacgtcctctggacgtccaaaataggtccatttttggtcctaacgtccatggactaaaaacggacgtccgacgttggacgtccttcggtggactaaatatgtacgtccttcggacgtccgacgttggacgtccttcggtggactaaatatgtacgtccttcggacgtccgatgttggacgtccttcgggtggaataaatatgaacgtcttttggacgtccgtactggacgaaatacggacgttttctgatcgtccatattggacatatatgaattacgggatcaaatagcaaaataatttaataaaatattaacttaattatgttaataaaatggtttaaatcgaaaagataatcatatttaattcaaaattgtacagtttaatatccaaaacatgtttttgtttttttgtaaagtgtgaaaatcttatttgtaaattatttgttacaatgttttattattctagttaccaagataacataagtttgctaattatgtaattctaataagcaaaaatataatttttatcaatgtatccgtactacagatgaatcttgagagcatctttttgaagttgaagatacgtgcccaaaataggtccagttttagtcctaatgtctatggactataaatgaacgtccttcggacgtccgacgttggacgtacttacgtgttgaataaatatgaacgtcctttggacgtccattggacgtccgtgctcggacgtccgttggacattgacatcgatccgtgagcgtcatctgcaaagaagaaaatcacaagccaggacaaccaatccaaatagtgagtgtttcaaacttttgtgttgtgttgtcaaaagtttatttaattatttatgttttccttacatacttacatatttttcaa

SEQ ID NO: 4396 - DNA, 3746 bp, Diabrotica virgifera
  SmartBlast Evalue=0.000000007; Info=LIM domain only protein 7 n= 1 Tax=Harpegnathos saltator RepID=E2B944_9HYME
aaagtttctccagccgtggcgtgtcagtttgtttcgtttcattcgtctcgtaagtaggaattgtatactgttggcaacacggcatagaattcgtttcgtaggtacgttcaccttttagaaaataggtattaaactagaattacctaaataattaaatgtggaaataattgacatcatcctaagtgctaaacagtgctaaagggattacctaacctcggtttaaatgacagaaagctgcagtgattgtttctgtcgcctacaaaagaggatatccgtatcttccaacagcatgacattttaaatggacagtaatggagaataacgaatatccaacagatcaaaataaagagagacgaaattcaaatacggagtatatgtctacaaaatgtcgaataacgaagccagaaccaccaaaacctgccacgaatccattgcaatttataaaagtagcgccttgtcctcttttccaaaaagcccacgaacaaataaaaaaagtagaggaaataaaaagagaagaaaaagaaatgagaacagaaattgaagattggcaaacgaatcttgacaactggaagagcagtagaagaaaaagacaagaacacatcatagaacgggtagtagaagtaaaaaaacttacagaacaagaagaaaatgagaaaagcagaagaaaaagtaaaacctttaatgaaatgatggaagaaaggagtaggggcagacataaatttaatattcctttatacgaagacgattcaaatgatttaagcgattatggaattggtagcagcagctcgaaaacgaatagcattaaagatgttgatacagacgatagtagcagtatactggacgaaaaagacaatcacacattcgatttatctagtactaaaggcaattccagtacctcaaaccaaagtcaaagtgaagatgaaaccaacaccaccaaaaatgaacccatatctgtaaataaaaacaatacgtttacaaaaacatacacgagtaccttctccactagcctaagttccaataaaagtaaacctgtgtccttaagtaaaccctccatatttgaaacgaattcatatcaagaacctaaagaaaagcaatatacctacgaaggggctatccaagactaccggtcgagaatccaaacgattaattcagaagattctagcagatttaagcctaaagaacaaactgaagtatttcttcctaaaggagaaatatttaagagaaagggattgtttgagagcaatatagaaattagtcaattagagactccttcttctagaaggttatcagaagactttgttaatactagaagcattaaggatagattgaagagctttgaacaaataaacgaccaatatccaaaaactgtagataaaagtgaaatacaagtctctgtgagacaaaggcttcaatcattgaacaaatccaatgagactgattctacaaacaacaacctcaccagaacaaatattaataaaatatatttattaaataaatcaaatagctccaattccttcgagtccaagaaatcttggaacagtgacgacagatgcttcagccctgaaactgaactgtatgttaacaaactgaatatgttcaacagggatttagataatcttatgattaacaaatctctagacgaaagttatgcgccctctatatcttccaccgaattaacctgcatttcttctgacagagaagacagtggtattcacacaggtgatgtatcctgctctgtcagtcaagcagatgaatcggtagatgtagagatagctactaacataaatgagagactgaacgaagatactcaatttgagaaagatctcgctcaatttcaagctgatatggaaaaacttaaacctgtagataaaaatgaaaatatttttaatcaaaacaagaaaattacacaaggtggtgatatcattgttatgcctattactaaagaaattattgatactacaatcgaatttctagaaacgtgtagacaagattcctcagagaatttaacacctcaagaaccaattaacaaaaatatagtaatgcccttaccagtaaccaaaccaaagcctgtaatatacgaaaatgttgatgttaaaaagttaggtcctgcattggatttcattacgagtgatttcgttttagatgcttccttctccgatttcaaccctcctcatatagaacctcccaaagtcaaacctcctccccctccaccactagacaaacctgtacatgattcggttaaacgcgcaaattcaacaaaaagaatcaagaaagaacttgatattaaaagatcaagttttctcggactagatgaaccgagtaacgatgaagatatttctttggagaaaccaccagacttaagcaagtattttccaaatatgcagaagcttgacaaaagtactgagaaaaaatttccagggggtgtactaagtaaagtcgaaagtcaggattctggtttggatttggataagggaagattatctagtgatacgtggtgtagcagtgttggtgattctggtacacctagtcacgaaaggcaagttagtgagcaaacaaacagtattacctcagaagaagacgaaataaccaaaaaggaaagagaaataatagagctggtagaaaaagaagaacaatatcgagatattgtagattacttaaataaagaacctgtaaataaaggctttaattcagaaaaagattctgcttatgaaccatcccttggtagtgaacagttcgatagtccttgttttaatacacaacactcagatttcttagaccaagactcagaagtactgaaagttgaacaagaacttcgccagctggaactggaagaactggaaagacaacgcgaaaacatgttatttcgagagagcagagcaaaagcacatcttcataacagacactctttagaaaatctagcggacaaaatgtatccatgttacttatatgagaaccatatggactgtcgaaaatcgatgcctgaattagctattcaaaacgcttctcttgattatggacgatccttaccgacaaatcaaagctgtgcatacgaaaatattagagatttagaaatgagaggatacgtccaacctggagcgctcgttgatggtaacttaggtataccagtcgacagcaggaaatcaatgccagaccttcagcaagtgtataagaaatccagtcctgaacaccagcgtcccctagtcaagcaaagcacacggattcctcttgaacatagaaaatctatgcctgaattgcagctagatatgaatcctttggcttttaaaactccaaaagcttcagcaattccgcccaagcctttgagagctaaagaatgggcaatatatgaccaacaaagttctcaaccagtttccaaacaattaggtgttctacacagacgtgacaaatggcaccattctaaatcaaatagtgagggtaggaactacaaccaacattggcttattcaggaagctgaactgagaaggatatctgaccaacagaaaaatttagtaactgctcgacatccaacaagaccacgtaacccagctagaataactaacgaaatgatacagccgtccgtacaaaggtctgaaccaatttacaaggatgattatatacagaacacctttagaaaccaccctcaatcagtaaatcacgccttaccaacagtggcctattcaccaccatctatgcctaaggagtcccaggatcggattttgagtgttagtggaaaaaagaagtgttcatat

SEQ ID NO: 4397 - DNA, 3619 bp, Diabrotica virgifera
  SmartBlast Evalue=0.000000007; Info=LIM domain only protein 7 n= 1 Tax=Harpegnathos saltator RepID=E2B944_9HYME
tgacatgtttatatgaaaatcaaactaaaagtgttctgtatgttttggattttttattgcagctggaacttcataaacacttaaggtgtattgtttaatttgaaatctacatattgtgtcaactgtgctaatattgataatatatccgtatcttccaacagcatgacattttaaatggacagtaatggagaataacgaatatccaacagatcaaaataaagagagacgaaattcaaatacggagtatatgtctacaaaatgtcgaataacgaagccagaaccaccaaaacctgccacgaatccattgcaatttataaaagtagcgccttgtcctcttttccaaaaagcccacgaacaaataaaaaaagtagaggaaataaaaagagaagaaaaagaaatgagaacagaaattgaagattggcaaacgaatcttgacaactggaagagcagtagaagaaaaagacaagaacacatcatagaacgggtagtagaagtaaaaaaacttacagaacaagaagaaaatgagaaaagcagaagaaaaagtaaaacctttaatgaaatgatggaagaaaggagtaggggcagacataaatttaatattcctttatacgaagacgattcaaatgatttaagcgattatggaattggtagcagcagctcgaaaacgaatagcattaaagatgttgatacagacgatagtagcagtatactggacgaaaaagacaatcacacattcgatttatctagtactaaaggcaattccagtacctcaaaccaaagtcaaagtgaagatgaaaccaacaccaccaaaaatgaacccatatctgtaaataaaaacaatacgtttacaaaaacatacacgagtaccttctccactagcctaagttccaataaaagtaaacctgtgtccttaagtaaaccctccatatttgaaacgaattcatatcaagaacctaaagaaaagcaatatacctacgaaggggctatccaagactaccggtcgagaatccaaacgattaattcagaagattctagcagatttaagcctaaagaacaaactgaagtatttcttcctaaaggagaaatatttaagagaaagggattgtttgagagcaatatagaaattagtcaattagagactccttcttctagaaggttatcagaagactttgttaatactagaagcattaaggatagattgaagagctttgaacaaataaacgaccaatatccaaaaactgtagataaaagtgaaatacaagtctctgtgagacaaaggcttcaatcattgaacaaatccaatgagactgattctacaaacaacaacctcaccagaacaaatattaataaaatatatttattaaataaatcaaatagctccaattccttcgagtccaagaaatcttggaacagtgacgacagatgcttcagccctgaaactgaactgtatgttaacaaactgaatatgttcaacagggatttagataatcttatgattaacaaatctctagacgaaagttatgcgccctctatatcttccaccgaattaacctgcatttcttctgacagagaagacagtggtattcacacaggtgatgtatcctgctctgtcagtcaagcagatgaatcggtagatgtagagatagctactaacataaatgagagactgaacgaagatactcaatttgagaaagatctcgctcaatttcaagctgatatggaaaaacttaaacctgtagataaaaatgaaaatatttttaatcaaaacaagaaaattacacaaggtggtgatatcattgttatgcctattactaaagaaattattgatactacaatcgaatttctagaaacgtgtagacaagattcctcagagaatttaacacctcaagaaccaattaacaaaaatatagtaatgcccttaccagtaaccaaaccaaagcctgtaatatacgaaaatgttgatgttaaaaagttaggtcctgcattggatttcattacgagtgatttcgttttagatgcttccttctccgatttcaaccctcctcatatagaacctcccaaagtcaaacctcctccccctccaccactagacaaacctgtacatgattcggttaaacgcgcaaattcaacaaaaagaatcaagaaagaacttgatattaaaagatcaagttttctcggactagatgaaccgagtaacgatgaagatatttctttggagaaaccaccagacttaagcaagtattttccaaatatgcagaagcttgacaaaagtactgagaaaaaatttccagggggtgtactaagtaaagtcgaaagtcaggattctggtttggatttggataagggaagattatctagtgatacgtggtgtagcagtgttggtgattctggtacacctagtcacgaaaggcaagttagtgagcaaacaaacagtattacctcagaagaagacgaaataaccaaaaaggaaagagaaataatagagctggtagaaaaagaagaacaatatcgagatattgtagattacttaaataaagaacctgtaaataaaggctttaattcagaaaaagattctgcttatgaaccatcccttggtagtgaacagttcgatagtccttgttttaatacacaacactcagatttcttagaccaagactcagaagtactgaaagttgaacaagaacttcgccagctggaactggaagaactggaaagacaacgcgaaaacatgttatttcgagagagcagagcaaaagcacatcttcataacagacactctttagaaaatctagcggacaaaatgtatccatgttacttatatgagaaccatatggactgtcgaaaatcgatgcctgaattagctattcaaaacgcttctcttgattatggacgatccttaccgacaaatcaaagctgtgcatacgaaaatattagagatttagaaatgagaggatacgtccaacctggagcgctcgttgatggtaacttaggtataccagtcgacagcaggaaatcaatgccagaccttcagcaagtgtataagaaatccagtcctgaacaccagcgtcccctagtcaagcaaagcacacggattcctcttgaacatagaaaatctatgcctgaattgcagctagatatgaatcctttggcttttaaaactccaaaagcttcagcaattccgcccaagcctttgagagctaaagaatgggcaatatatgaccaacaaagttctcaaccagtttccaaacaattaggtgttctacacagacgtgacaaatggcaccattctaaatcaaatagtgagggtaggaactacaaccaacattggcttattcaggaagctgaactgagaaggatatctgaccaacagaaaaatttagtaactgctcgacatccaacaagaccacgtaacccagctagaataactaacgaaatgatacagccgtccgtacaaaggtctgaaccaatttacaaggatgattatatacagaacacctttagaaaccaccctcaatcagtaaatcacgccttaccaacagtggcctattcaccaccatctatgcctaaggagtcccaggatcggattttgagtgttagtggaaaaaagaagtgttcatat

SEQ ID NO: 4398 - DNA, 3631 bp, Diabrotica virgifera
  SmartBlast Evalue=0; Info=ATPase type 13A1 n=1 Tax=Helicoverpa zea RepID=E2JE29_HELZE
ggctgtcacatacacatatgtgtggaccataaataaatatatttaaaattaaattgctacaatgagtgtaacaccaaagttagatgatttggtccagtatgtttctttatatactcgtttaccaactttactacatctatatttgttaccgtttatcttaatttattcagcatggctatatctatggttgggaatttatggtttttatgaacattatgagggtggttttgttggtcttgcagttattgggtgtttacaagtgctttcatgtctggcgtgttactggtcagttcatgttaactgcttttttagctgtagaaaggtaaaagatccacacaaggctaccttagcaaaagttattccaacacctaacaatggaagttccgaacttgtatggctacgtcataacaggctggaaacaggcccatccatctggtttatgtttcaaaaaaccaaatatatatggaattctgataagaagacattcaggggcctagaatttccgatacataaaagcttttctgagtacatgggatccaagggactccaagaagatgctgatttactggaagctgaacagttgtacggaaaaaatttcttagacatgggtgttcctgaattcaaaacacttttcaccgaacgtgccacagctcccttcttcgtgttccaagtgttttgtgtgggactttggtgccttgatgacttctggtattattctttgttcacgcttgtgatgttagtactttttgaatgcaccctagtgcagcaacagcttagaaatatggatgaaatccgcaaaatgggcaataagccctacaatatactagcatatagaagcaggaagtggagaatgttgaccacaacagagctaataccaggagatataatctccataaccagatctcaaaaggacaatttaataccctgtgatgtattgttattgagaggaacgtgtattgtagatgaaagtatgttaacaggagaatctgtgcctcaaatgaaagaagccatagaaaatttcgatcaaaaaactgtgctggatccagaaggggaaggaaaactacatgttttatttggaggtaccaaagttgttcaacatactcccccaacaaaggcaaccacagggttacgaccacaagatggtggttgtgttgcttatgttttacgtacagggtttaatacttctcaagggaagctactacgaacgattctctttggagttaaacgtgtcacagcaaataacatggaaacatttggttttatcgtgttccttctagttttcgccattgcagctgcttggtacgtatggacaaagggtattgaagatcccaaaaggaacaggtaccaattattcttggaatgtacattaatattaacatcagttattcctccggaattacctattgaattgtccttggctgttaatacgtcattgttagccctatctaagttagccgttttttgcacggagcctttccgcatcccgttcgccggcaaagtagacatctgctgtttcgacaaaacgggcacgctcacgagcgacaatctggtagtggaaggagtggccttagccgaaaaagattccactcctacggctgttgccgatttgccggcgcagacgctgcaagtgttggccacttgtcactctttggtgcaattagatgatggtttagtgggcgatccgttggagaaggctacgttgacagctatagactggaacgtcacaaaagctgatgcggtggttcccaagaagggaaaattacccgggttgaagatatttcataggtatcatttttcatctgcactcaaacgaatgtcagtaattgctggatacaatgctgtaggatcgacggatacaatctacatcgctacagtaaaaggggcgccagaaactcttaagtccatgttttccgaaactccaaaattatacgatgatgtctatttggaactatccaggagaggtgccagggttttagctttaggttttaaagaaatgggtagactgtcatcccaggagattcgtgatttgagtagagaggacgtggaaaaagatttgaaattcgccgggttcgctataatttcttgtcccctgaaaaccgattcaaaatctgtgataaaagaactacagtacgcctcgcacaaagccgttatgataacgggagacaaccctttgacagcttgccacgttgcgaaagaattaaagtttacaacgaagacaaccgttatcttgacgcaggctgacgacatttatatttggaggagcatagacgaaagcaaagaactgcccttggagtacgactacaagaaactcatcaaagaatacgacctttgcatcactggagatggtttaaaccacttaagagatagatacaacgcgttccttcggttaataatgccttacatcactgtatatgcgagatttgctcccaaacagaaggaattcgttgtgacacagttaaaacatttaggatacgtcacattgatgtgtggagatggtacgaatgatgttggggctttgaagcacgcggatgttggcgtggctattctggctaatgctccggaaaagcttccggatccaaaggttcaaaaagagaagttagaaaaggaaagagaaaagaaacagaaagaactaaaggaagctatgtcagctcaaagacctaaccatgtacgaaatatgataaaccaaagagataagctacaatccaaagttgataaaatgatgaaggaaatagaagaggaccaaacaccgatcgttaaattaggagatgccagcattgcttcaccgtttaccagcaaactgtcttcgatcatgtgcatttgccacataatcaagcagggaagatgtactctagtcacaacattgcagatgttcaagattttagcgttgaacgcccttatattggcatatacgcaatcggtgttatatctggacggaattaaattaagagatgctcaagccacgttgcagggtctacttgtggccgcttgctttttgtttatatccagatcaaagcctttaaaagtgttgtcgaagcaaagaccattgccgaatattttcaacctatacaccattctgactgtgattacacaatttgctgtacatttttgctgcctaatttatctggtacaggaagctaagttgaggtccctgcctgaggacgatcctttaaaaatcgaagcattagacattagtgatgaagaaaaagagaaactgttcaaacctaacattgtaaatagcaccgtatacatcatttccatggcgctccaaatagctacatttgctattaactataggggaagaccttacatggagaatctgatagaaaataagccactactttatagcgttctaggaactggatctgttgttttgcttttaactttaggtttagttcctgaattatcagcatcgtttgaaatcatcgattttccaccagatttccgaattatcctactacaaatcctattcgcagatttcttcttttcctttttgttggatagactgtgtctatggttgtgcggagaaggaagcatgagattatcttaggacattattcgaaataaagactaataacctgaacatagtatttatttattgtaagtcattccatttgaaatatgttatcagatc

SEQ ID NO: 4399 - DNA, 3614 bp, Diabrotica virgifera
  SmartBlast Evalue=0; Info=ATPase type 13A1 n=1 Tax=Helicoverpa zea RepID=E2JE29_HELZE
ggctgtcacatacacatatgtgtggaccataaataaatatatttaaaattaaattgctacaatgagtgtaacaccaaagttagatgatttggtccagtatgtttctttatatactcgtttaccaactttactacatctatatttgttaccgtttatcttaatttattcagcatggctatatctatggttgggaatttatggtttttatgaacattatgagggtggttttgttggtcttgcagttattgggtgtttacaagtgctttcatgtctggcgtgttactggtcagttcatgttaactgcttttttagctgtagaaaggtaaaagatccacacaaggctaccttagcaaaagttattccaacacctaacaatggaagttccgaacttgtatggctacgtcataacaggctggaaacaggcccatccatctggtttatgtttcaaaaaaccaaatatatatggaattctgataagaagacattcaggggcctagaatttccgatacataaaagcttttctgagtacatgggatccaagggactccaagaagatgctgatttactggaagctgaacagttgtacggaaaaaatttcttagacatgggtgttcctgaattcaaaacacttttcaccgaacgtgccacagctcccttcttcgtgttccaagtgttttgtgtgggactttggtgccttgatgacttctggtattattctttgttcacgcttgtgatgttagtactttttgaatgcaccctagtgcagcaacagcttagaaatatggatgaaatccgcaaaatgggcaataagccctacaatatactagcatatagaagcaggaagtggagaatgttgaccacaacagagctaataccaggagatataatctccataaccagatctcaaaaggacaatttaataccctgtgatgtattgttattgagaggaacgtgtattgtagatgaaagtatgttaacaggagaatctgtgcctcaaatgaaagaagccatagaaaatttcgatcaaaaaactgtgctggatccagaaggggaaggaaaactacatgttttatttggaggtaccaaagttgttcaacatactcccccaacaaaggcaaccacagggttacgaccacaagatggtggttgtgttgcttatgttttacgtacagggtttaatacttctcaagggaagctactacgaacgattctctttggagttaaacgtgtcacagcaaataacatggaaacatttggttttatcgtgttccttctagttttcgccattgcagctgcttggtacgtatggacaaagggtattgaagatcccaaaaggaacaggtaccaattattcttggaatgtacattaatattaacatcagttattcctccggaattacctattgaattgtccttggctgttaatacgtcattgttagccctatctaagttagccgttttttgcacggagcctttccgcatcccgttcgccggcaaagtagacatctgctgtttcgacaaaacgggcacgctcacgagcgacaatctggtagtggaaggagtggccttagccgaaaaagattccactcctacggctgttgccgatttgccggcgcagacgctgcaagtgttggccacttgtcactctttggtgcaattagatgatggtttagtgggcgatccgttggagaaggctacgttgacagctatagactggaacgtcacaaaagctgatgcggtggttcccaagaagggaaaattacccgggttgaagatatttcataggtatcatttttcatctgcactcaaacgaatgtcagtaattgctggatacaatgctgtaggatcgacggatacaatctacatcgctacagtaaaaggggcgccagaaactcttaagtccatgttttccgaaactccaaaattatacgatgatgtctatttggaactatccaggagaggtgccagggttttagctttaggttttaaagaaatgggtagactgtcatcccaggagattcgtgatttgagtagagaggacgtggaaaaagatttgaaattcgccgggttcgctataatttcttgtcccctgaaaaccgattcaaaatctgtgataaaagaactacagtacgcctcgcacaaagccgttatgataacgggagacaaccctttgacagcttgccacgttgcgaaagaattaaagtttacaacgaagacaaccgttatcttgacgcaggctgacgacatttatatttggaggagcatagacgaaagcaaagaactgcccttggagtacgactacaagaaactcatcaaagaatacgacctttgcatcactggagatggtttaaaccacttaagagatagatacaacgcgttccttcggttaataatgccttacatcactgtatatgcgagatttgctcccaaacagaaggaattcgttgtgacacagttaaaacatttaggatacgtcacattgatgtgtggagatggtacgaatgatgttggggctttgaagcacgcggatgttggcgtggctattctggctaatgctccggaaaagcttccggatccaaaggttcaaaaagagaagttagaaaaggaaagagaaaagaaacagaaagaactaaaggaagctatgtcagctcaaagacctaaccatgtacgaaatatgataaaccaaagagataagctacaatccaaagttgataaaatgatgaaggaaatagaagaggaccaaacaccgatcgttaaattaggagatgccagcattgcttcaccgtttaccagcaaactgtcttcgatcatgtgcatttgccacataatcaagcagggaagatgtactctagtcacaacattgcagatgttcaagattttagcgttgaacgcccttatattggcatatacgcaatcggtgttatatctggacggaattaaattaagagatgctcaagccacgttgcagggtctacttgtggccgcttgctttttgtttatatccagatcaaagcctttaaaagtgttgtcgaagcaaagaccattgccgaatattttcaacctatacaccattctgactgtgattacacaatttgctgtacatttttgctgcctaatttatctggtacaggaagctaagttgaggtccctgcctgaggacgatcctttaaaaatcgaagcattagacattagtgatgaagaaaaagagaaactgttcaaacctaacattgtaaatagcaccgtatacatcatttccatggcgctccaaatagctacatttgctattaactataggggaagaccttacatggagaatctgatagaaaataagccactactttatagcgttctaggaactggatctgttgttttgcttttaactttaggtttagttcctgaattatcagcatcgtttgaaatcatcgattttccaccagatgtaagtaatagttgtagtaataattgttaaatttaaaaaattaaaatatttaataacattcacaagagaaataactcaaataattcaagaaaacaaaagtttaaaaattttaaggcgaaatacgaataacattggcaacaaaaatatgtacagaataagaaacaaggatggcaac

SEQ ID NO: 4400 - DNA, 3601 bp, Diabrotica virgifera
  SmartBlast Evalue=1E-60; Info=Ctl transporter n=1 Tax=Aedes aegypti RepID=Q17E88_AEDAE
ttatagtttattatacaaaatatttaagacaaggtttacatatatattaggtaacaaaaaacattgttaaaaatattcatacctaatgtaaatacagtattagaaatttgaaacatcaagcaaagatatattattataacaaaaaatgcattttatcaaaagtgaaaggcataaatttttgttaggtacagaaaaagtttgttgtttttgtagtttgtgcaaacattttaatatacattactgtattccgaagacagtatggaagtgatataagttaaggcttttttggcaaatatgtctataatgttctagtattctagtctattcttaagtaggtatagaaaaaaacaagtttttaaataaaacgaaaactcactttccaatgtaggtgcaaattaaaaataaacgcaaagattcttaaaaaaaaaataaattgaaaaattatttaaaaaattattatgttctataaattctcttctcccagacaaaaataatacgtttttttccaattataccataccctaaaatttaaacgaacaaaaatttatgcgctttttacataagaacaatatgaaagaagttaaatattttatattatttaattttaaaggacggtttaaaaacggttccatgacatctcgtaaggcgacagtccgtgaccccacacatggtaacggacaattcgtaacagcgacatttcgtcacggcgacagttcgtaactatacatattcttaacggtataattcatatcgacaacatttaattttttttagtaaacttagtatgactgaatttatacaaaaatgcattttgcatacaatcctacacttaaagtaaaatgttacattttttaagctcacttctttttaaaaatatttaacacatatttttgcatatagttttgttaatgacaactaaagaattaaaaaaatatatttttatcactttaaagtagtaaaactaaatcataaaaataataaaacaaataaaaacagtttaataataatgtattcactataataatctatacaatttgcataactagattgtattcattttaagacgaaatttaaaaaaatatatttctccacgaaatatgaagtatgttaaaaatgtttatcctgatgctggcttgacaaattaataaacgtaatatcaataattgtaactctaataaaagttagattccacgttaacaaaaatcaacagaataattcaattttgagtaacgaattgtcgccgttacgaatttgtggggttacgaactgtggcgttacgggatgtcttgtcacgtcaaaaacatatccattcatattttatgtgcttataaaacgtctaatgaatgtaatatgtatttcgaaaaatgtttcaaataagatcagcatttcaatagttttaaaaagacaaacaaaactaacataccttactgcctacaatatcgagtgttgtataaaacagcaatttacacatttatattatataattataataacgtagtatggctgactacatagtgtgtatttgctacgaacagcttggtatatctttttataaatgacttgtgcgtcacgagtttgtttaaaagtttagttttagtctttcttctcgccgtacagcttcttggaattctccacgaactccattaggtcacgagacatggcgtatggacgggccatgccgtcattcaagaggctgtcttcacagaagcagaggaagatcgtgtcgatcgtcgtctcaaatattgagaagcaagtaatcgcaacgcagagcgatacgaagaatacaatcaagtaaacaacgtactcccattcgctcttaacaccacgcataagtccaacgctaatcagtaaagaaattagcacaatcaacagttgtgccattcccaatacgaaatctccaacaaagttaatagaaacaatgttaacagcattctggaagataattttagcggctcttttaccagatttgtagaaaggtttaccatgcatagcgattaatatgtaagcatttttcgacaggaacttgagaaaatcttcaagtgctccaatgcaagcatcgactattgcttttactgccttgtttttggtcaaagaagtaagaagagctctgatgatagcaattagtgttattataaaagatccgaatgcaatactgccaagatggtacttgaagacaactccagtactggtgcaaattggactgtccaagttgttcttgtttttcgaccagtaccattttgcaacagctccagcaataaccatgtattgtaccccaatgataaactgtgtactccagaaagcaatgataacgttaaaacccattgcgatttgcatcacaatattttgtttgtagtacaaatagtctggtatcaattcggttaaaacacctgaattgaccatgaagactgtagtgaaaactaatagtgccagtataatcagctccacaaggaacgtaattattggaaccaacagcaattgtggcatagcaaaagcggccttggtagcttccttcagtaactgaatgaccaattggatttttctgaacatgaatacacccaccaacaaaaagatcaatataagaatggtaaagaagatagcaagaaatagaacgccctctttgctgcccttcacttgaacatccttgtcgttgttagctagtttttcaaaattgaagtaggcgtaccatgccagccctacaaggatgcctccaaaaactagaactcctcctagaataccccatacaactgcagctgtagcggttttaaacaggaacaacattatcattccaacacctagtgacagaaaacaggccaatacaattctccaggcatgtttgtttaagaaagcagatagacctgcttcaatctcttccacagattcgtaggtatctctcttgaaacgagaattaaaactgttgtaccgagaattaaaacttgaactcgagccgtccttgtaacagtagagacctactttaacatgtccgctttcgcactgtgcaacacattttctactggttaacaataaaacatccgatgttaaatgtctatcgctggtctcgtattgtaaatacggaaagtttgtgtaatctgctccagtacaagaccactggtcgtacttcttattttgctttccacagacattaccacattggtcatagcccttaaaacggctaaaatcagagtacaccatggtgtatataaggaacggaaacagaattattatcgcgactgcaaagacaataataaattttcgatcggtgggtgtccgattttcaggcctttctggaatttcgatgttgtccaagagagtattcgtcggcagtttcttgaacacagccaactcttctggttggacagctctactaaagctctctcccatggcgccggtattaatagactacaaccaattcaggcacaacaaaaatcacaaatttgtttttacaaacacacgaaaatcgagctactaacgctacaaatcaactgtcggcttcgttataaaataccgcccttcggaatcggaactctacgaaaaagaaaagacaaacttgattggtaaacctgtccacttgttatttcgactgaaggaacgcaaaactgaactg

SEQ ID NO: 4401 - DNA, 3475 bp, Diabrotica virgifera
  SmartBlast Evalue=1E-60; Info=Ctl transporter n=1 Tax=Aedes aegypti RepID=Q17E88_AEDAE
ttatagtttattatacaaaatatttaagacaaggtttacatatatattaggtaacaaaaaacattgttaaaaatattcatacctaatgtaaatacagtattagaaatttgaaacatcaagcaaagatatattattataacaaaaaatgcattttatcaaaagtgaaaggcataaatttttgttaggtacagaaaaagtttgttgtttttgtagtttgtgcaaacattttaatatacattactgtattccgaagacagtatggaagtgatataagttaaggcttttttggcaaatatgtctataatgttctagtattctagtctattcttaagtaggtatagaaaaaaacaagtttttaaataaaacgaaaactcactttccaatgtaggtgcaaattaaaaataaacgcaaagattcttaaaaaaaaaataaattgaaaaattatttaaaaaattattatgttctataaattctcttctcccagacaaaaataatacgtttttttccaattataccataccctaaaatttaaacgaacaaaaatttatgcgctttttacataagaacaatatgaaagaagttaaatattttatattatttaattttaaaggacggtttaaaaacggttccatgacatctcgtaaggcgacagtccgtgaccccacacatggtaacggacaattcgtaacagcgacatttcgtcacggcgacagttcgtaactatacatattcttaacggtataattcatatcgacaacatttaattttttttagtaaacttagtatgactgaatttatacaaaaatgcattttgcatacaatcctacacttaaagtaaaatgttacattttttaagctcacttctttttaaaaatatttaacacatatttttgcatatagttttgttaatgacaactaaagaattaaaaaaatatatttttatcactttaaagtagtaaaactaaatcataaaaataataaaacaaataaaaacagtttaataataatgtattcactataataatctatacaatttgcataactagattgtattcattttaagacgaaatttaaaaaaatatatttctccacgaaatatgaagtatgttaaaaatgtttatcctgatgctggcttgacaaattaataaacgtaatatcaataattgtaactctaataaaagttagattccacgttaacaaaaatcaacagaataattcaattttgagtaacgaattgtcgccgttacgaatttgtggggttacgaactgtggcgttacgggatgtcttgtcacgtcaaaaacatatccattcatattttatgtgcttataaaacgtctaatgaatgtaatatgtatttcgaaaaatgtttcaaataagatcagcatttcaatagttttaaaaagacaaacaaaactaacataccttactgcctacaatatcgagtgttgtataaaacagcaatttacacatttatattatataattataataacgtagtatggctgactacatagtgtgtatttgctacgaacagcttggtatatctttttataaatgacttgtgcgtcacgagtttgtttaaaagtttagttttagtctttcttctcgccgtacagcttcttggaattctccacgaactccattaggtcacgagacatggcgtatggacgggccatgccgtcattcaagaggctgtcttcacagaagcagaggaagatcgtgtcgatcgtcgtctcaaatattgagaagcaagtaatcgcaacgcagagcgatacgaagaatacaatcaagtaaacaacgtactcccattcgctcttaacaccacgcataagtccaacgctaatcagtaaagaaattagcacaatcaacagttgtgccattcccaatacgaaatctccaacaaagttaatagaaacaatgttaacagcattctggaagataattttagcggctcttttaccagatttgtagaaaggtttaccatgcatagcgattaatatgtaagcatttttcgacaggaacttgagaaaatcttcaagtgctccaatgcaagcatcgactattgcttttactgccttgtttttggtcaaagaagtaagaagagctctgatgatagcaattagtgttattataaaagatccgaatgcaatactgccaagatggtacttgaagacaactccagtactggtgcaaattggactgtccaagttgttcttgtttttcgaccagtaccattttgcaacagctccagcaataaccatgtattgtaccccaatgataaactgtgtactccagaaagcaatgataacgttaaaacccattgcgatttgcatcacaatattttgtttgtagtacaaatagtctggtatcaattcggttaaaacacctgaattgaccatgaagactgtagtgaaaactaatagtgccagtataatcagctccacaaggaacgtaattattggaaccaacagcaattgtggcatagcaaaagcggccttggtagcttccttcagtaactgaatgaccaattggatttttctgaacatgaatacacccaccaacaaaaagatcaatataagaatggtaaagaagatagcaagaaatagaacgccctctttgctgcccttcacttgaacatccttgtcgttgttagctagtttttcaaaattgaagtaggcgtaccatgccagccctacaaggatgcctccaaaaactagaactcctcctagaataccccatacaactgcagctgtagcggttttaaacaggaacaacattatcattccaacacctagtgacagaaaacaggccaatacaattctccaggcatgtttgtttaagaaagcagatagacctgcttcaatctcttccacagattcgtaggtatctctcttgaaacgagaattaaaactgttgtaccgagaattaaaacttgaactcgagccgtccttgtaacagtagagacctactttaacatgtccgctttcgcactgtgcaacacattttctactggttaacaataaaacatccgatgttaaatgtctatcgctggtctcgtattgtaaatacggaaagtttgtgtaatctgctccagtacaagaccactggtcgtacttcttattttgctttccacagacattaccacattggtcatagcccttaaaacggctaaaatcagagtacaccatggtgtatataaggaacggaaacagaattattatcgcgactgcaaagacaataataaattttcgatcggtgggtgtccgattttcaggcctttctggaatttcgatgttgtccaagagagtattcgtcggcagtttcttgaacacagccaacggcatagtttcctcactcaaggcactcattttagttacagttgcactaaatagaaaatctgtaattcggttaaataacaactataatgaatatgtatacggttttcgtattttttatcaacccgataaattacag

SEQ ID NO: 4402 - DNA, 3464 bp, Diabrotica virgifera
  SmartBlast Evalue=0; Info=Insulin-like growth factor 2 mRNA- binding protein 1 n=1 Tax=Camponotus floridanus RepID=E1ZZ14_ 9HYME
ctatagtcatatttgtattctagaatagtgataactaacgatttcataaggataatgtatatattattatagcaacagaagtaaccaaatcgaatatttgcaggcaaaaggcgttatatcctataacaccattctatacttcccgagtttgtactataagggacaagtgatactactcgccttgacacaaggcattccgagaatcgatacatctcactctcttctatctttctctctttctcgcaacactcgtcctacacgttttggtataatacatttttttcttccacaacaaccacgtctttgtttctcaacgcgaagatcaacaaccgaagacggtcccataacaccaacaaataatatattatacaagggaccgagctatcggctgatcatttcgcgcaaaaacaacattatttcaacaaatcgcctaacaattataatataatagttaaaaaaatgtctttgcttaccaacacattcacacacggtacattgttcattttcattttgtatatctttccgctagatgtcaccttatgttgctacaggccaagaagatcgaaatcatagacctagaggtattttgttaattgcattacgttttccgaacataataaagaaaaacactagtttgaaacgcaaagataattacgaatcccaaaatataatcaaataaattattcctctagaaaaaagttttgaaatgaaagagtgaaatatctgtaaatatatacgaatatccgaaatccttagccttagtcgcaaaaatacttctaacttacaaaaattatttaaagctcttcggtttccacattcacactcaaaatacagtaaaataataatagtaacagccacattttaactccgaaggaactgtacgccttttcgtatatttttttgtttattttttatgtagtgcagattctttcagatttttgtttcaattgtgactggctgatcgtcgaacatcgggatgtgaggttttagaatgcgactcatctgtcttaggtcgcattccttgcgatttttctttggtaaaaatccacaattaatattaaggggaaccggaacggacataaacattcttaaaaacggattcttacgacttacagtgtaaccaaaacaaaaaaagcgattattttaaggttaataaacatgatactagtgtcaatttatgtgactggattgaaaaatcaaaagatggaagtattttaggaatgttgatgttcattttcggttcaaaaatgtatacgatatatatactgtgtgttcggtaattgtgtgtaaataacggaaatttcagtggctataaaatctaatatattttgattatttgaggtagattaaagttcaataggcacgtagttcgacgcataccttattcctggagagttctcaaaactttccactatcaatacctatagatatatataatatggtcaactgaattataaactattcaaactaactattcaagaaaaataaaaacttgagaaaacaaaaaataattgacatgaaaaagaagttatcgcgaaaaactcaacgctttgcgcaactagggggcttcaccgacgcctcggtttctttgtcgtaaccaagtggagcagccaggtcgacgctcgaacgctgcttttaaataatcttcaacatggtacaagtggaaggcatcgagagaggtttcttataaaaaatagggtatgcagaaacaaacccatgcgcacaggcagtgtgtatgaatgttgctctagttagtactactgttgtggctcggatgaggtagcttccgattgactggtatctttctgctttgattggcgctgtctgccctgtggaggagctactgattggaggaccatcgctcggatacgtctttgtgcagactggacactgaagaatggacctatgatatgaactgttgtttcgtcttcttgtggcgacgccccttgttcgggtagcttgataacgctgccggtaacacgttgcagttcccttacattctgaccacctttaccaataattcgcccaacttgagaacttggtaccataatttcaaccgttaatcgtacatcgtcggatccagcgacgaaaccttcttccctcatcttttcaaaaatcaaatattgagctttccactgtgcttctggtgatccgacaatggtcaccctcctctcgttctgtgtttcttgtggtttggtttcatcaataggtgctattttgacggacgctccggaaaaccgaatgatatttctaatgtgtgatcccttagtaccaatgatagcgcctacagcgttgttagggatatacaagtaggttgtttcttgggtatcgccaccagattgggaccctgcggggtacataccggggtaaggagcttgacctgaataaagtcctcttgaaccataaccaattcctaggttgtttttacctgctgtggccatcatcgccatcggatgcaaccccgggaacatcatggtctggggtgccatggcctgcagatcgttttcgtagctttgtcttaatttagaactaatctgggattcagcgcgactcatattttcgatggatcctttgacagtaattatacgttctaggttgaaagaattgatatcatttatactagatacggtaatcttggtatcggtctcctgcattatcctcttgatggtattacctccttttcctattatccttccgatcagattattatgagctaagatctttaaagaaatttcccctttattcgtgttgttagcctcctgttgcataacttctaggattcttttacatgcattcgtacaattctctggattaccgtaaatagtaatagctttttctaaggaacctacattgtcttttctatgaacatcaactcttgccctagtctgttgtgttatctgtcttattgttgaaccttgtctaccaataatagctcctaccatatcactttgtaccaatatccttaaggggaagtcagtttgtctgttttgtccgggtagacctccaaaagcagcacctggtcctctaggattacgtttcccccgtttttccacagccaattctactttgaatgctttaccttctacttcaacaccatttaactgatttacagctatctgagcctgctcaggggtgtcgtacgtgacggcgacggtctgtgtattctgatctttcgatgtcaacttgtcacacgatacaacacgtccatgttcgttgaggaggtgttcgatgtcctcgaaccttacatgtagacccaaatttgatattatgatttttgacgtttggatccaaccgttgccgacctgcattgcagtatctgaatttccagaaagagatttctttttgccagacgccactgaaggctccacaaccaaagctgcaccattaaaagtaaaaccatttagattgtcgatggctttatctgccgatgattgatcaggacaatcaacaaaagcatatcctcc

SEQ ID NO: 4403 - DNA, 3428 bp, Diabrotica virgifera
  SmartBlast Evalue=0; Info=Insulin-like growth factor 2 mRNA- binding protein 1 n=1 Tax=Camponotus floridanus RepID=E1ZZ14_ 9HYME
ctatagtcatatttgtattctagaatagtgataactaacgatttcataaggataatgtatatattattatagcaacagaagtaaccaaatcgaatatttgcaggcaaaaggcgttatatcctataacaccattctatacttcccgagtttgtactataagggacaagtgatactactcgccttgacacaaggcattccgagaatcgatacatctcactctcttctatctttctctctttctcgcaacactcgtcctacacgttttggtataatacatttttttcttccacaacaaccacgtctttgtttctcaacgcgaagatcaacaaccgaagacggtcccataacaccaacaaataatatattatacaagggaccgagctatcggctgatcatttcgcgcaaaaacaacattatttcaacaaatcgcctaacaattataatataatagttaaaaaaatgtctttgcttaccaacacattcacacacggtacattgttcattttcattttgtatatctttccgctagatgtcaccttatgttgctacaggccaagaagatcgaaatcatagacctagaggtattttgttaattgcattacgttttccgaacataataaagaaaaacactagtttgaaacgcaaagataattacgaatcccaaaatataatcaaataaattattcctctagaaaaaagttttgaaatgaaagagtgaaatatctgtaaatatatacgaatatccgaaatccttagccttagtcgcaaaaatacttctaacttacaaaaattatttaaagctcttcggtttccacattcacactcaaaatacagtaaaataataatagtaacagccacattttaactccgaaggaactgtacgccttttcgtatatttttttgtttattttttatgtagtgcagattctttcagatttttgtttcaattgtgactggctgatcgtcgaacatcgggatgtgaggttttagaatgcgactcatctgtcttaggtcgcattccttgcgatttttctttggtaaaaatccacaattaatattaaggggaaccggaacggacataaacattcttaaaaacggattcttacgacttacagtgtaaccaaaacaaaaaaagcgattattttaaggttaataaacatgatactagtgtcaatttatgtgactggattgaaaaatcaaaagatggaagtattttaggaatgttgatgttcattttcggttcaaaaatgtatacgatatatatactgtgtgttcggtaattgtgtgtaaataacggaaatttcagtggctataaaatctaatatattttgattatttgaggtagattaaagttcaataggcacgtagttcgacgcataccttattcctggagagttctcaaaactttccactatcaatacctatagatatatataatatggtcaactgaattataaactattcaaactaactattcaagaaaaataaaaacttgagaaaacaaaaaataattgacatgaaaaagaagttatcgcgaaaaactcaacgctttgcgcaactagggggcttcaccgacgcctcggtttctttgtcgtaaccaagtggagcagccaggtcgacgctcgaacgctgcttttaaataatcttcaacatggtacaagtggaaggcatcgagagaggtttcttataaaaaatagggtatgcagaaacaaacccatgcgcacaggcagtgtgtatgaatgttgctctagttagtactactgttgtggctcggatgaggtagcttccgattgactggtatctttctgctttgattggcgctgtctgccctgtggaggagctactgattggaggaccatcgctcggatacgtctttgtgcagactggacactgaagaatggacctatgatatgaactgttgtttcgtcttcttgtggcgacgccccttgttcgggtagcttgataacgctgccggtaacacgttgcagttcccttacattctgaccacctttaccaataattcgcccaacttgagaacttggtaccataatttcaaccgttaatcgtacatcgtcggatccagcgacgaaaccttcttccctcatcttttcaaaaatcaaatattgagctttccactgtgcttctggtgatccgacaatggtcaccctcctctcgttctgtgtttcttgtggtttggtttcatcaataggtgctattttgacggacgctccggaaaaccgaatgatatttctaatgtgtgatcccttagtaccaatgatagcgcctacagcgttgttagggatatacaagtaggttgtttcttgggtatcgccaccagattgggaccctgcggggtacataccggggtaaggagcttgacctgaataaagtcctcttgaaccataaccaattcctaggttgtttttacctgctgtggccatcatcgccatcggatgcaaccccgggaacatcatggtctggggtgccatggcctgcagatcgttttcgtagctttgtcttaatttagaactaatctgggattcagcgcgactcatattttcgatggatcctttgacagtaattatacgttctaggttgaaagaattgatatcatttatactagatacggtaatcttggtatcggtctcctgcattatcctcttgatggtattacctccttttcctattatccttccgatcagattattatgagctaagatctttaaagaaatttcccctttattcgtgttgttagcctcctgttgcataacttctaggattcttttacatgcattcgtacaattctctggattaccgtaaatagtaatagctttttctaaggaacctacattgtcttttctatgaacatcaactcttgccctagtctgttgtgttatctgtcttattgttgaaccttgtctaccaataatagctcctaccatatcactttgtaccaatatccttaaggggaagtcagtttgtctgttttgtccgggtagacctccaaaagcagcacctggtcctctaggattacgtttcccccgtttttccacagccaattctactttgaatgctttaccttctacttcaacaccatttaactgatttacagctatctgagcctgctcaggggtgtcgtacgtgacggcgacggtctgtgtattctgatctttcgatgtcaacttgtcacacgatacaacacgtccatgttcgttgaggaggtgttcgatgtcctcgaaccttacatgtagacccaaatttgatattatgatttttgacgtttggttcggattcctcgacatttgagcgttcttaaaattaaccgaaaaccaaaaaacaatcaacaaaaactcaaataatttgagaaattttcgtccaaaaacataaaagtatcaatggaactaacacgcgcggcacggcactatagt

SEQ ID NO: 4404 - DNA, 3687 bp, Diabrotica virgifera
  SmartBlast Evalue=1E-104; Info=Painless n=1 Tax=Tribolium castaneum RepID=D2A388_TRICA
atcagatgaaaatgaagatgctaaaattgacgaactacctaccgtttttttactagcattgtagcttgtgtagtttaatattctttttgataaacttcaaataaggattatatttcacaattatggataatcctagtactagtattgatagatactatccaggttatgatccaggccgtaaaaaaatagatgctgtaagagatattgtaagcggaatcatctccaaaaagaatgagatctattgccccactcccgaggagttaattctggattacgttctaaaaaataaaacaaaatatttggagaagttattcaacgcaaatcttttaaaatgcagatattctcatccagtatatacatattatgtcgacatactgtcaatagcatgtgtgatggaagaagtaaaagcatggacggtggagtgtttaataaaaatgggagccgatataagatgccgagatgtagatagctgggagccccttcattatgccgccctaagatccgactaccccgtactaaaacatattacagacgaactaaaaaacaagagatttcatttaaatgaagtcttggtagacaacaacaatgctttagatatactttttaggtatggaaataaagattccgtagactttgtcgattgtgctaaacttttaatatacgaaggaataaatgtaaatttggcagataataataagataacatttcctagtgattgggcaaatacaaaaaagcttaaagatatcagaaaagatattcaagattactatgaccaaattactagaggtactgaagaaacagtagatcatgaaccagatcaaactgacccaaatgattgcctgtttgagcttataaagaaaaaagacgaagatgggtttctgaattatgacagtgccattattgtcaacttggctgatagtgataatggaaagatgactcttttacaatttgcatgtgaaaatcgtactaaacggatagtggagcgtctgctcaaggttggtgcagataaaaccaaaaccacgactattaaaaaagagacacctatagaaattgcagctgaccgtgactaccatgaaatatttgaaattctcattgatcaatataaggaaaacgaagaaattccaaaatatgtaatttcagaattcctaccaagattattacaagcatacgacagtccactatctaaatataagtcgagctgtgatctattgttaaagaaactaaaagctaacacaaacatttatgatttaaatgaaaaaacaaaaaatactggatatactccactccattatgcagcgcggtatgctgacacagctactgtcataaaacttgtagaaatgggtgcttctttagactgtagaaatgaatctggatttatgcctgtgcaatacttggatactgaacaattagaagcagttttggataactgtgttcaaggtgatttatccgacaggaagaggaagattaaagaattcaaagtatctattaatttcagtccattacttccaaaaaaagtggagactaagaacaataatactgatccttcatcagcatcgatggagactaacaacgatatagagatacaaaacttagataataataacgacacaactccagagtctatcaatttactcaacagtaataacgttaacaagagtgataatatttatgaaacagatcttgtattctacatgagtggagtaccagagttcaagcatttgcttaaacaccctgtggtagcaagtttcttgtatctgaaatggcatagcacgagatggttattttgggcgaatcttgccttttatttaactttttgtgcatttttagtcatcaatgtatttcttaattcatcagtttttcagtataccctactgtggtttatattatcaattacacttttggttttagcgtttagagaagtctttcaaatgtgtttgcgatgtaagaagtatttcaaaaatgtcgaaaattatatggaacttctactgattgggttagtcgctttaattctgttgaattgtttcagcactagcacccaaaaagcaatttcgtctttgtcaatgcttttagcaggcctcgagttaattctgatgataggtcagcatccaaatttatctacaaaccttgtaatactacgaacagtgtcctacaattttttcaagtttctcctttgctatgtattattgattcttgcatttcctcttagtttttatatcattttcgccaaagatccccaagaactatctgcaaacaatacaaaagaagacgatgctgacccttttgagaatccaggattgtcgctgtttcaaactatcgtgatgttaactggagagcttaatgctaacgatttaagacagaattttgaaaaatttccaataattggcagattaatatttgttatatttatattcatgattgtcattatattgcttaatctcctcaatgggcttgctgtaagcgatacacagatgattagaaatgatgccgaattagtaagctatattgaacgggttcggtatcttcgagatatcgaaatgatttttaaggataaaaaacattgctgcttaaaactactcgggatattaaaaaggatagctgagaagagctcattaactcgttctaagattactgtgcttcccaatcaagatggtcaaattaaagaaattaataacttatgcttagatcaagaaattgttcaaagaattaaaaatataattaggactaaagtataacggaagaacagcagtacatacatgttctaatagccgataaaataatttggttaactctttaaaacaagtttaaactagattttgtcaaataaatagattaccgaggaccgaaagtcccttataataaccaaaaagtttcttttgaatgagttatttgaaattaaaaagcacactaaattttctctttttttcgcccctgtaacttattaaaataaacagaagttttcagggactttcggccctcggtaataatgcaatctttcattctgcttttaaattttttcaaaaatacttattagttttctcaggattcgaaaaaaatgagtgcatttaaaaaaaaattagccagaaattttgtgcctacgccattaataccttttttatattctaaaatctgacaaattattatcacaactgtaaaaagagctaatattttgcattttacaaacaattatggaaatctaaaacatttttatcttcttgttagtttataattattcatcaaattggaaaaggaagttcagatatacttattttaaaatatagctacatctttatgtcacaatatatctatattttatagtaacttaaacatttatttatatatttagatccaatttatgtatatgtatcttcctggggttttctttaggtagttttctccagcaaacacagtacgctgtgtacagtgttgccccatgcatcttgtctgtatgtttgtacagttgttgcatgctgtgctcaacatataagggacagcatccattatttagtatttaaagcatacagacacaatgtatggtataatgctgtactcagcatacagtgtttattggaaaccagggcctaacagtgtagttggtgaaatataacattattaggttttttatttacaggaaacattttatacatggttcaaatttttataatactttttaattaagtaacagtgcat

SEQ ID NO: 4405 - DNA, 3068 bp, Diabrotica virgifera
  SmartBlast Evalue=0; Info=AP-1 complex subunit mu-1 n=26 Tax= Eukaryota RepID=AP1M1_HUMAN
aatgacagcaatcttacgtgtagattttataaaagttagtaaataataatgattataatatggtttgcaaatagttaaatgcagtatgtgattttctgaagaagtgaagaggttatatcacattccagttgtttagagcacttagtagagatatacacctttaaacatgtcgtgttcagcgatatatattttagatgtaaaaggaaaagtcttaatctctaggaactatagaggcgatatagacctaggtgtaatagagaagtttatgcctttattaatggaaaaagaagaagaagggcttctaactccaattttgcaaatccctgaatgcaccttctcatatattaaaaccaacaatctatatatagtaagcactacgaagaaaaatggtaatatcgctcttgtatttgtatttttacataaaatcgttcaagtaatgactgaatattttaaagaattagaagaagaaagtatcagagataattttgtcgttatttatgagttgttggacgaacttttagactttggctatcctcaaacaactgatagcaaaattcttcaagaatacatcactcaagaaggtcataaactagagatacaaccaagaattcctgtagctgtgacaaatgcagtttcatggcgttctgagggaatcaaatacaggaaaaatgaagtattcttagatgtaatcgagtcagtaaatcttttagcaagtgcaaatggcaatgtactaagaagcgaaatagtgggagcaataaaaatgagagtgtatctttctggtatgcctgaactgagattaggtctcaatgataaagtattattcgagagtacaggacgtggtaaatctaaatcggtagagttagatgatgttaagttccatcaatgtgtaagattatcaagattcgagatagatagaacaatctcttttattccaccagatggtgaatttgaattaatgtcttatcgtttaaatacccatgtgaaaccattaatatggattgaatctgttatagaaagacatgcgcatagtagagtggagtacatgattaaagctaaatcgcaattcaagagacgttctactgctaacaatgttgaaataatcattccagtgccacatgatgcagactctccgaagtttaaaaccaccatcggcagtgtcaagtatgcccctgaacaaaatgccataacttggagtatcaaatcattcccagggggtaaagagtatttgatgagagcccactttggtttacctagtgttgaatgtgaagatactgagggtaaaccacctattcaggtcaaatttgaaattccatattttacaacttctggaatacaagtcagatacttgaagattatagagaaaagtgggtatcaagctctaccatgggtgagatatattacacagaatggtgactaccagttgcgtactaattaagcgttgttattgtacttttctgctttttaagttagaatataatatatttttacttatactttatttgtagggtcttataaaactttgtactatgtagcactatattcagttaatatattttaaaataaacattactttttcatgtactgttctcacaattcattataacttgtttcagcattatctatttcaaaatatttaaagtatgtacttaaacatttgacattgaataaatttacctattttattcttaaattttgggtgctttgagacaagctcagcggttggacaactgagtaagcggtagcgtttagacaacacaatgacaagccactgttaaatttactaagcgtattttctttctgctgtgtaactcagtggttgcttgggtacagtacgcaataatgagtttaaatttttttaaacttttcataaaatattcaattgacccaaaaaatggatttacagtggaataagagaagtacattttggtactgtacgagaatatttatttctagaagtattatgtaaatattatgcaaatatgtttattactactggatctaagccgtttttgtagttaatgtcagccactgaggtcgtctgaacgtacccattggttatcctgtcttttatcaagttgccatgccttcaagcgtcggaaaagttttgattttaagagagtaggcgcaaaatttaactggattcatttttttcgaatcctgagaaaactaaatgggtgtttttgataaatttggacacagaataaagattacgtaattactgagggccgaaagtcacttagaataaacaaaaagttcttttgaatgagatattaacattataaatcactcaatttctcttcttttcacccctgtaacttattaaaataaacagaagttttcagggactttcggccctcggtaataatgcaatctttcattctgcttttaaattttttcaaaaatacttattagttttctcaggattcgaaaaaaatgagtgcatttaaaaaaaaattagccagaaattttgtgcctacgccattaataccttttttatattctaaaatctgacaaattattatcacaactgtaaaaagagctaatattttgcattttacaaacaattatggaaatctaaaacatttttatcttcttgttagtttataattattcatcaaattggaaaaggaagttcagatatacttattttaaaatatagctacatctttatgtcacaatatatctatattttatagtaacttaaacatttatttatatatttagatccaatttatgtatatgtatcttcctggggttttctttaggtagttttctccagcaaacacagtacgctgtgtacagtgttgccccatgcatcttgtctgtatgtttgtacagttgttgcatgctgtgctcaacatataagggacagcatccattatttagtatttaaagcatacagacacaatgtatggtataatgctgtactcagcatacagtgtttattggaaaccagggcctaacagtgtagttggtgaaatataacattattaggttttttatttacaggaaacattttatacatggttcaaatttttataatactttttaattaagtaacagtgcat

SEQ ID NO: 4406 - DNA, 4818 bp, Diabrotica virgifera
  SmartBlast Evalue=1E-131; Info=Alpha-amylase n=1 Tax=Aedes aegypti RepID=Q17NL5_AEDAE
ctgtcacagtaaaaaatgtgctagtttttagaaggtatatgaaattgagaacatgtggaaattaacaattttcttctacctttggatttgctgtttacaatctagtaaggcatatcatttatcgaccgacgatgaatggtggaagacagctacattttatcaaatctatccaaaatcctttaaagattctgatggtaatgggataggtgatctacaaggtgtgatcgaaaagttggattatattaaagatctaggagtcactggcgtttggttgtctcctattttcaaatctccacaagctgataatggatatgatataagtgactacagagatattgatccgcagtttgggactctggaaatatttttggagctattgaaagaagcacataaacgagggataaaagttgttttggactatgttcccaatcatacgagtgaccagcatgaatggtttaaaaaatctgaaaatggagagaagccttatgatgaatactatatttggaaagatggaaaaaatggatcaaaaactgaacccccaaataattggcttagtgtttttggacattctgggtggacttggagcgaaaaaagacaacaattttattaccacgcatttcttaaagaacaacctgatttggattatcgcaatccattggtcagacaggaaatgaaagacgttttatcattctggttagacactcataacgttgatggtgtcaggatggatgcaatcagtaaactagttgaagatgctgcatttcgtgatgaacctaagtccaatgcacctggtgtacctgactttctgtacgagtatctaactcacacttatacagaaaatcaaccagaaggttacgacgtgatttatgaatggagaagtcacttagagagcatttctaagaaaaaagaaagttcaagaatatgcatggctgaagatggggcaaatttcacactaacattgccttattatggtactctcaacggatctgtactaggagcccacttccccttcaatttcttctttctcccactgaacaccacttctaacggagggcaaatagcaaatataataaacgaatggttaattagacttcctaaaatatatactttgaactgggtgctaggtaaccacgaccagcacagaatagcttcaagagtaggcaaagaaaaagttgacgccttaaatatgctcacagcaattttaccaggagtccaaataacttacaacggcgaggaaattggtatggaagatggagaagtgacttgcgagcaaggcgatgacctgaaaagtaattgtaccctctatccttctgtaagtcgagattttgaaagaactccttttcaatgggacagcagcgagtttgccggatttaccaacggcacatctacttggttgcctgtcagtagcaaaaaagataactgcaatgttgccgatcaacttaaagacgatagaagccatttgagtatttataaaagtttgcaaaaattgagaaagacattaaatagtagatcagaaattgaggtggatgcccaaggaaacgataagaatgtattggaagtagcaaggtttaacaaagttaacggatcgaactatgatttggttgaatttgtttgcaatttcggaaactctgcggctgatgtttctttggttgaaaataacaatgttggatataaagtgcttataagcagtaaaaattcaaaacgaaagcctggtgacattgttgacaacaaaagtctggtgctggatccatacgaagcgcttattctcggagaagcttagtttgttattagcatagctataatatattagtttttaactgtaaattgtataaatcgacacctgatatgaaaaacattgtatctccacttacaatgtttttcaactagggcttaaatagcatctataaacgataaccttcaatttggtctaagtaacttttatcctatcttatgtaattataaagttatttaacaaaataacgtcattgtaagtgcaaatttttgatcactgggtggaaaaaacattgtaaccaatgttacaatattaaatttttttattattgatgaaaattttttaataaaacattgtaacatgggatacaatgtttttctcgaaacatttattgagtaagtttttatataactgcattgtaagttgtgatacaagaaagcaatatagtggaatattacgatgaacaacattgtaagtcaatatagtcaggaggtaaattatatattattaactgctgagcatagtaagcatgcctcaaatcgtaaaaactcacataaaaatactagtttagaatttcaaacaaaaataataacacctatatcattcactgctgaactaacttctactgatgaaactcagataatcaatggtcacagtggattgcacgctcaacatacatcgacagtggaaaattctacatgcaccgaatattcaagttcaccattagatacgtctgctaagaaaaaacaatacctcaagaagagaaatcttggaaagaagagacaaagggatcctagtgtttggaaaatgaatgtcttgaagaaactgaggaactctggatgtaacgataaatgtatcagaaaatgtaaatcgaaattatctgaaaataatatgactcaatttatttaataatttttgggcaatggctgatcatgaccaacaaagcgaatatttatgtagatatgttctcagacaagagaggaaagttgcaaagctaaaagagtccagaagacactttacatatgaatataatttgcagttggaagaacaccgacttcaagtttgtaagaaaacatttttggacacttttaacataacagatatgtggttaactacactattcaaaacagttgatagtcatgaatgcggaggccgtatacctggagatatgcatggtcgccacaagaacagggcaaatgctgtagacgaaagtattaaaaattcgattcgtgcgcatattaactctgttccagcaaaagaatcccattacgtaaggcaaagaacaagtaagatgtattttgatgagtctttaacttttccccaattgtattcactatgttagatgttagagaatcatccatgcgataaaccaaccaccaaaagtcagtacagaaacatattcaatactgagtttaatatcggttttttttcaccgaaaaaagatatgtgtcttacttgcaatctacataacactaaagcagagaaagaccaaatagaaaaagaatatgctttatatattgcaaataaatgtgttgcacgtgaagccaaaaatcgcgataaagaggtttctaagaaccggttgtaactccctgctttgatttgcaaaaaatattaactacgctccaatcagaggtatcattgttttattataaaaggaagttttaaagtgtataactttactatctttgatcttgaatctgcggaaggctattgttatgcgtgggatgaaaccacaggtaaaaaggggcctaatgaaataagtagtgcgctatttgattttattaagagaaaagttgctggtggagcattagagtttacgagtttattcagattgttgtgggggacaaaatcgaaatcgaataatattttaatgtatatttatgcagctaagatcataaatattaatattacacacacgttttttgaggtgggccactctcaatctgagggtaattcaatgcacacccttattaagcaaagaaaaaagaaccaagttgtttatgtacgacaacagtggtatacactgataaggtgtgctaaagtcacaggaaaaccatacgatttgaaagaactaagtcaaaatgacatcttggactttaaatcaatgttaaagaaaatgccgaattgggatttagatgtagataaacgccaagttttctggtcgaaaatacaatacgtaaaaatatataaagaacaaccacatattattagtttgcagtacgatcttatttctgatcaattatcgtttataaacttagaatgcaaaccaaaatcgagcaaaaggctaacaaatccaggaataaaaatatacacgatttatgggaagtacaaattcctttagcatataatgggttacttcccataaccacttcaaaatagaaagatcttgttgctttgtgctctggtaatgctataccagagcaatattgcagtttttatttaaatcttccccactctcaacaaacggaatattcggatgatgaatctgaataaaagtttgcaaggggttaattttgtttattttttaatagaatatgaactgttctataatttgtaaatgttcattttgtaataaataaatctaaaagatattattttatttacctacttcttgttagtatgtatgacgtaaattcttaaatattacttgtctgggcaaaaaaatcacgtttcaagtaaaaccaataaaataaattaattataatctctttatttggatatttactgattagttacaatttatatccacctaaccaaagaaacatactctgttgaaatatcattgtatgaaccacttacaatgattttcacctaaaattctgaaaaaatttgctattgtaactcgacctaaatcaggaccagtaatgttgacaacaatgtgatatgtaaaagtgaaaagctgagaaaaagttataaaatatggattaagaacatcacaaaaaatgtaaaagctgacccagtaaaaaataaaatgttttggaaatttctttaaatcgctctcctgtaaactaagcaaaagtgagttacaatgtttttcatatcaggtgtcgaaataatatttaaataaattatatttattaattgac

SEQ ID NO: 4407 - DNA, 1863 bp, Diabrotica virgifera
  SmartBlast Evalue=1E-130; Info=Alpha-amylase n=1 Tax=Aedes aegypti RepID=Q17NL5_AEDAE
ctgtcacagtaaaaaatgtgctagtttttagaaggtatatgaaattgagaacatgtggaaattaacaattttcttctacctttggatttgctgtttacaatctagtaaggcatatcatttatcgaccgacgatgaatggtggaagacagctacattttatcaaatctatccaaaatcctttaaagattctgatggtaatgggataggtgatctacaaggtgtgatcgaaaagttggattatattaaagatctaggagtcactggcgtttggttgtctcctattttcaaatctccacaagctgataatggatatgatataagtgactacagagatattgatccgcagtttgggactctggaaatatttttggagctattgaaagaagcacataaacgagggataaaagttgttttggactatgttcccaatcatacgagtgaccagcatgaatggtttaaaaaatctgaaaatggagagaagccttatgatgaatactatatttggaaagatggaaaaaatggatcaaaaactgaacccccaaataattggcttagtgtttttggacattctgggtggacttggagcgaaaaaagacaacaattttattaccacgcatttcttaaagaacaacctgatttggattatcgcaatccattggtcagacaggaaatgaaagacgttttatcattctggttagatactcataacgtcgatggtgtcaggatggatgcagtcagtaaactagttgaagatgctgcatttcttgatgaacctaagtctaatgcacctggtgtagctgactttatgtacgactatctaactcacacttatacagaaaatcaaccagaaggttacgacgtggtttatgaatggagaagtcatttagaaagtatttctaagaaaaaggaaagttcaagaatatgcatggctgaagatggggcaaatttcacactaacattgccttattatggtactcttaacggatctgtattaggagcccacttccccttcaatttcttctttctgccactaaacaccacttctaacggagggcaaatagcgaatataataaacgaatggttaattagacttccaaagatatatactttgaactgggtgctaggtaaccacgatctgcacagaatagcttcaagagtaggcaaagaaaaggttgacgccttaaatatgctcacagcagttttaccaggcatccaaataacttacaacggtgaggaaattggtatggaagatggagaagtgacttgtgaacaaggcgatgacctgaaaagtaattgtactctctatccttctgtaagtagagattttgaaagaactcccttccaatgggacagcagcgagtttgccggatttaccaacggaacatctacttggttgcctgtcagtagcaaaaaagataactgcaatgttgccgatcaacttaaagacgatagaagccatttgagtatttataaaagtttacaaaaattgaggaagacattaaacagtagatcagaaatcgaagtaaatgcccaaggaaacgataaaaatgtattggaagtagcaaggtttaacaaagttaacggttcaaatactgatttggttgaatttatttgtaatttaggaaacactgcggctgatgtttctttgcttgaaaataacaatgttggatataaagtgcttataagcagtaaaaattcaaaacgaaagccaggtgacattgttgacaacaaaagtctggtgctggatccatacgaagcgcttattctcggagaagcttagtttgttgttagcatagctttaatatattagtttttaactgtaaattgtataaataatatctaaattaaattatatttattaat

SEQ ID NO: 4408 - DNA, 3354 bp, Diabrotica virgifera
  SmartBlast Evalue=1E-59; Info="Heterogeneous nuclear ribonucleoprotein k, putative n=1 Tax=Pediculus humanus corporis RepID=E0W2H8_PEDHC"
ctccagaacagggtaaaacatttctgatcagcttctttctgacgccattgtgattttttatagttcagcaaaatttatttctgtaattctgcattttaagtgccgagttaacttctacaggtttttgggacttcgttgagcgacagtcgctttttctattttgggcagattagccatgaagcgtggagctgacggtgacatggggtccccgcaaaaaagatcacgtagaggcgatgaggaagttcgtttacttattcccagtatggttgccggttcaattattggcaagggaggatcaaacatcaccaaactgagaagccagtacaaagcatccattactgtccctgattgcccaggccccgaacggattttaaccctatcttcagacatggactccgtctgcaacatcgtccaagacgtaatacccaaacttgaagcgcatggcgcaactaccaacggaaatgaactggatttgcgaatgatgattcatcagagccaggcgggatgcgttattggcaaaggcggatcgaaaatcaaagaaatccgagagaaaactggtgcccgcgtacaaatttacgctaatgttgcccctcaaagtaccgacagagtaattcaaatcactggagagcctccaaaatgcatcgaaacaatcagggacatcttaacactcatcaaacagagtccaatcagaggagcagtcaacccatacgacccccataactacgacgaagtatacgccgcgcaatatggtggatggggcggtgacaaccaaggtggtggtttcaatagaggcagaggaaacgacggacccagaggtggcggcaacagagatggtggtgcccgattcggtggcggcaacagacctgcgggaggttccttaaacagaggaggaggaggaggaggaggaaatcgtgatggatttggaggcggcggtttgggtggtaaccgcgacagcttgggcggtggacgattcggtggaagagacagtggttttggtggaggaaaccgagacagtggttttggaggcggaagagacagtggttttggtggatctggatttggttcaagaggaggttctggcggaggagccttcgatcgtaacggttggagcggtggtggtcaattcagcccgccatctggcctcaacacttctcctagtccattcggcagcacaggtggttcttccaataaaaatagcacccaagttaccattcctaaagatcttgccggtgctataattggtaaaggcggtgtcagaatcaggaaaatccgcgtggagtccggcgccaatattacaattgatgaacctcttccaggttccaatgatcgcatcatcaccatcagtggaatgcccaaccagatacagatggcacagtatctgctccaacaaagtgtccataacaactctgaacgcaactactgaggggaagcctaatatatcaaacggaatgccatttccaatgatgaatatcatttgtgtaacacattccatttcgatctatgggcattatggttcattagctcattacataacctttaatatgaatccattatacattatatttttgtccattatagcaaagacttatattttcgttttaaattttttttatatatggttttcgttttctttatgtagagggtatttaccttttttatgtaagggtacacctatattggaaccgtatttctcccgaaccgatacggtgtactatcattgtttcatcatgagtttgttttcaatccgtcggatagggagaaatacggatccaatgtaggtgcagtctaacagaagtgtcatacatacaaagaatctctatttacaggagttttgtctataaaagtattggactactgattaaatgtaagtctttgcatacaattgatgtaatcactgatttatttcataagattggtttactttataagtaataaggttcaggatcctagcacttcatactccaaatttagaaaaacaccgattgagcagtcatccaacttattattatatattattattctgaatattcaagattattcagaaatattagcatttcattgtcatttactttttttctccttaaagctcacctttcgatagtgttttggatcataacggtcttgatcaaaacgcagattttgtgcctggatcgctgagctctgatacacgtttattttatataatatatatccttttctttgtttttgaagaatgattttacttattttggaatgggacgtgtttatcgtctcttaaatgtaagtgttttgtgtattaaggtagaaattctcacagtttcgctagtttttaaagcatttaactctatttaactagaagtatgtaattgtctatttcaaatcaaaacggtaaacggtttaaatacgagtatattgtaatttccgcagatgtttttttattttattattcattttacacttataagtcttccgatttatacaaaaaaaatatgtatctgtaggtcagctcctatgtataggggtgagtaatgtcttgttctttttccaggtataaatcttctgatttgccaaaatttcttaactgagtagttttatagcttaaactctttgtttttagttttttgacttcacagtatagtgatttgactttgtcgaaacttcttaactaaccagttgtgcattgctgtcaattattttacttgtccatggcatatccttttgcaacagcttcgagcattatttgtgcaacacaactacatgcgcatgggatgtagccacgttaccaacacttcagtattatcaatacttctttaggttttgtgtcggtgttcagatgctggctgtcatcattttacatttttctgaaactgatctgtatcggctgctgcgcgaaataattctaataccaaccatcaaaatttttttcgaccaatccatctctttccctcctcttttccttataaggcgaagtaaatagtagttaggtcctcgaaatctatgaccgaagtattctgcttttttcctctttttgatgtttcgagtcacccccttagttgctgtcttactgttttgtggaaataataattatgttatactaagtatttcattcgtaagtttttgtattgtgagaaataatttttttagaatagtaacatatatgtatagtactaaatttaaaagtaagaacgcgtatttttgaatactacaagaagaaactgctagttctttgctgtagtatcacacagaacagttcagtacaaatatttcatattttgttctgtgttccgaaatgccgcactttaaacatcaaccaaattgtagctaagttgtagggtctatagtagtgtttattcatctgcctctatcgacatacat

SEQ ID NO: 4409 - DNA, 3324 bp, Diabrotica virgifera
  SmartBlast Evalue=1E-59; Info="Heterogeneous nuclear ribonucleoprotein k, putative n=1 Tax=Pediculus humanus corporis RepID=E0W2H8_PEDHC"
ctccagaacagggtaaaacatttctgatcagcttctttctgacgccattgtgattttttatagttcagcaaaatttatttctgtaattctgcattttaagtgccgagttaacttctacaggtttttgggacttcgttgagcgacagtcgctttttctattttgggcagattagccatgaagcgtggagctgacggtgacatggggtccccgcaaaaaagatcacgtagaggcgatgaggaagttcgtttacttattcccagtatggttgccggttcaattattggcaagggaggatcaaacatcaccaaactgagaagccagtacaaagcatccattactgtccctgattgcccaggccccgaacggattttaaccctatcttcagacatggactccgtctgcaacatcgtccaagacgtaatacccaaacttgaagcgcatggcgcaactaccaacggaaatgaactggatttgcgaatgatgattcatcagagccaggcgggatgcgttattggcaaaggcggatcgaaaatcaaagaaatccgagagaaaactggtgcccgcgtacaaatttacgctaatgttgcccctcaaagtaccgacagagtaattcaaatcactggagagcctccaaaatgcatcgaaacaatcagggacatcttaacactcatcaaacagagtccaatcagaggagcagtcaacccatacgacccccataactacgacgaagtatacgccgcgcaatatggtggatggggcggtgacaaccaaggtggtggtttcaatagaggcagaggaaacgacggacccagaggtggcggcaacagagatggtggtgcccgattcggtggcggcaacagacctgcgggaggttccttaaacagaggaggaggaggaggaggaggaaatcgtgatggatttggaggcggcggtttgggtggtaaccgcgacagcttgggcggtggacgattcggtggaagagacagtggttttggtggaggaaaccgagacagtggttttggaggcggaagagacagtggttttggtggatctggatttggttcaagaggaggttctggcggaggagccttcgatcgtaacggttggagcggtggtggtcaattcagcccgccatctggcctcaacacttctcctagtccattcggcagcacaggtggttcttccaataaaaatagcacccaagttaccattcctaaagatcttgccggtgctataattggtaaaggcggtgtcagaatcaggaaaatccgcgtggagtccggcgccaatattacaattgatgaacctcttccaggttccaatgatcgcatcatcaccatcagtggaatgcccaaccagatacagatggcacagtatctgctccaacaaagtgtccataacaactctgaacgcaactactgaggggaagcctaatatatcaaacggaatgccatttccaatgatgaatatcatttgtgtaacacattccatttcgatctatgggcattatggttcattagctcattacataacctttaatatgaatccattatacattatatttttgtccattatagcaaagacttatattttcgttttaaattttttttatatatggttttcgttttctttatgtagagggtatttaccttttttatgtaagggtacacctatattggaaccgtatttctcccgaaccgatacggtgtactatcattgtttcatcatgagtttgttttcaatccgtcggatagggagaaatacggatccaatgtaggtgcagtctaacagaagtgtcatacatacaaagaatctctatttacaggagttttgtctataaaagtattggactactgattaaatgtaagtctttgcatacaattgatgtaatcactgatttatttcataagattggtttactttataagtaataaggttcaggatcctagcacttcatactccaaatttagaaaaacaccgattgagcagtcatccaacttattattatatattattattctgaatattcaagattattcagaaatattagcatttcattgtcatttactttttttctccttaaagctcacctttcgatagtgttttggatcataacggtcttgatcaaaacgcagattttgtgcctggatcgctgagctctgatacacgtttattttatataatatatatccttttctttgtttttgaagaatgattttacttattttggaatgggacgtgtttatcgtctcttaaatgtaagtgttttgtgtattaaggtagaaattctcacagtttcgctagtttttaaagcatttaactctatttaactagaagtatgtaattgtctatttcaaatcaaaacggtaaacggtttaaatacgagtatattgtaatttccgcagatgtttttttattttattattcattttacacttataagtcttccgatttatacaaaaaaaatatgtatctgtaggtcagctcctatgtataggggtgagtaatgtcttgttctttttccaggtataaatcttctgatttgccaaaatttcttaactgagtagttttatagcttaaactctttgtttttagttttttgacttcacagtatagtgatttgactttgtcgaaacttcttaactaaccagttgtgcattgctgtcaattattttacttgtccatggcatatccttttgcaacagcttcgagcattatttgtgcaacacaactacatgcgcatgggatgtagccacgttaccaacacttcagtattatcaatacttctttaggttttgtgtcggtgttcagatgctggctgtcatcattttacatttttctgaaactgatctgtatcggctgctgcgcgaaataattctaataccaaccatcaaaatttttttcgaccaatccatctctttccctcctcttttccttataaggcaaagtaaatagtagttaggtcctcgaattgtatgaccgaagtattttgtttttttcctctttttgatgtttcgagtcgccccctcagttgctgtcttactgttttgtggaaataataattatgttatactaagtatttcattcgtaactttttgtattgtgagaaataatttttttagaatagtaacatatatgtatagtactaaatttaaaagtaagaacgcgtatttttgaatactacaagaaaaaactaatagttctttgctgtagtatcacacagaacggttcagtacaaatatttcatattttgttctgtgttccgaaatgccgcactttaaacatcaaccaaattgtagctaagttgtagggtctatagtagt

SEQ ID NO: 4410 - DNA, 3548 bp, Diabrotica virgifera
  SmartBlast Evalue=1E-148; Info=Adenylyl cyclase-associated protein n=1 Tax=Aedes aegypti RepID=Q16K93_AEDAE
aagcccgttaacctcaaaagtgtttaacaaacttgaaacgtcaacatctataaaaaaactaatttattagtcatcccactttgaatcatctgtcggcaaaattcggtgaattttaacaaaaatattatataaatagatcggtatcgttccagaagtttggaattgtgctttttgctactttttgtataatagtctagtttatatttctaaagatgagtgtactaggttttagtgacattgttaacggaccgttagctcaatatctgcaactttccgcccaaattggcggagatgtggcagagcattcgaatttggttaaaaatgcatttaacgcccaatacaaattcatagaattggccagtcaatcttccaaacccgcacccaacgatttaaacaactttttggttccaacaagcgatagtattcgacaaatccaagagtttagggaaaaacatcgcacttcccaatattttaaccacttatcagccatcagtgagagtattcctgcattaggatgggtcacagtaagtcctacacctggcccctttgtcaaggaaatgaatgatgctggacagttctacaccaacagagtactaaaagactggaaagaaaaggataagaagcattttgactggaccaaatcttgggtgcagaccctgtctgaccttcaagcttttgtgaaacaatatcatactactgggttggtatggtcaggcaaaggagctccaccgaaagctggtggtcccccaccacctccgccaggatgtcctccacccccacccgtcctcgacttggccagtatgggaggagcgggagatgccagtcaagatcgttcggcgctctttgcggaaataaacaaaggacaagatattacaaagagtttgaaaaaagtcacttccgatatgcagactcataaaaatccaactttgaggcaaggccctgcacctttcaaaccgacaactcaacagacaagcttgtcatctgtcaaacctgcacaggttgataaagctccggttttcaaccaagacggtaagaaatggatgatcgaataccaaaaaggcaatcacaatctgttggttgaaaatgccgagatgaataatgtcgtttacctttataagtgcgaaaattctactgtacagatcaaaggaaaaattaactccataacgttggattcttgcaaaaagacctccgtggtgtttgattcacttgtgtcttccatggaatttatcaattgccaatctgtgcaaatgcaggtattgggcaaagttcctaccatctcaatcgataagactgacgggtgccaagtatatttgagtccgcaatcattggatgttaacataattacttcaaaatcatcagaaatgaacgtactgataccaaaaggagacggagattacaccgaaattcctgtaccggaacaattcagaacaagtgtgaacaccaaaaacaacacccttacaaccgttgtaatcgaaaacaagggataaattgttcgtgtttaatatttatgaactacatttacgtctaacaaattttataatttttatttttcagtattcgtatcttcggctttgaaatatttatttttacgcttagctaaggataaaaagattagtggtattcatagtatgtaaagttataattttccagggactatggaattagattattacaaaatatttgttgatattgaaatagaaaggaacaatcaataacaacggtagcattttcttcaattcttttattactcctataaatgtgcaacattatgaaggtaatcgaagatctacttttgtcatttttaattgttactaacagcattcttaatttgagtactaaaaaccgttgtagtaatttttgcgatattattaaggctgattcctatgtacataaaatttgttagtagtaaagtatctgtttagaataaatgatatttataatattaataacttaagcaatttcatacatttataatcgattagatgagttattgtgaatatctatttagagcgaaaaatatgaatgtcaccaaaaagctgtagtactaatctcaaaaattttttggaaccttatgaatatgtacaacaaaaacgctgaaagtgtcaacagtatcatgtcatccacaccaatcgtttgttaattagtatataggctacaaaaatactttcagaagtatgtaaaaaaaaaagatttctgaaaattggtttcgttgcaattacttttccgtagaaaaaccgataccacaagtattattggtaccttttatataatttcttttcattaaaaaattttagtttacttgaaaccaacatttatgaatgtgcattacacaagatcaacaaatggtacagtttgtttaggtgcttaagctgatctagagagagtaactatatactaaaaaataaagcgttagatcccatttaaagtaggtaacttaatagaatcttcagtttctttttttttcagtgtgaaaactgtttgcttataaacgacttaaggtactagtacacttagaagaccaaaatatttttttttcaagaatttttttctcggaacctttactagaaatgaacatggaactttttacatattaatatctaactcttagagagtacaaatatatctttttttcatttgtgcacgtgcactaatattttagagggcgcaaaagtcgaggcctcgaaaaatgatggcggacagtaatctcaggattgggatatctgaaacaaaggaatcctattgcatttgaaaaaggaaggtttcttacgtgacaatttaccacaatttgaccaaaaaataaaaataaatattttttaaccatgaaaaactaaagagaaacgggcgattgtttcacaaaatttttcaaatttccgtaaaatctttttttttgcgaatttttcactaacggtggtaaattgtcacgtaagaaacctttcctttttcaaatgccgtgcgatttttttgtttcagggattccaatcttgagattaattgtccgccatcggaactacttttttcgagacctcgactttggcgccctctgcaatattggtgtacgtgcagaaatgaaagaagatatattttttctattctatagagttagatattaatatgtaaagggttttatgttcatttttaataaatgttctgagaaaaaaatcttgaaaaatgcttatttttggtcttctaacgtgtactagaatttaataaaattcagctgcagcgatggtgatggtttatgtccaaaatctgttataaatgtcatgtattgaaactttttcttgtcacatccaaaagttatacaccaacattttattaaaatttatttatacttaggtaatgttttaatgtttttttttaataattaaaagcgaattgatcaaggaaaagtttaaatttgtgtgattgactgtaatacataagtagtattttcatgggagtggattcatgtttcatatcactgtcttaatctatattttatgcatatgcttattttgcgctatatataacttatcctgccatacattgtgcttttaataaattataat

SEQ ID NO: 4411 - DNA, 3073 bp, Diabrotica virgifera
  SmartBlast Evalue=1E-148; Info=Adenylyl cyclase-associated protein n=1 Tax=Aedes aegypti RepID=Q16K93_AEDAE
aagcccgttaacctcaaaagtgtttaacaaacttgaaacgtcaacatctataaaaaaactaatttattagtcatcccactttgaatcatctgtcggcaaaattcggtgaattttaacaaaaatattatataaatagatcggtatcgttccagaagtttggaattgtgctttttgctactttttgtataatagtctagtttatatttctaaagatgagtgtactaggttttagtgacattgttaacggaccgttagctcaatatctgcaactttccgcccaaattggcggagatgtggcagagcattcgaatttggttaaaaatgcatttaacgcccaatacaaattcatagaattggccagtcaatcttccaaacccgcacccaacgatttaaacaactttttggttccaacaagcgatagtattcgacaaatccaagagtttagggaaaaacatcgcacttcccaatattttaaccacttatcagccatcagtgagagtattcctgcattaggatgggtcacagtaagtcctacacctggcccctttgtcaaggaaatgaatgatgctggacagttctacaccaacagagtactaaaagactggaaagaaaaggataagaagcattttgactggaccaaatcttgggtgcagaccctgtctgaccttcaagcttttgtgaaacaatatcatactactgggttggtatggtcaggcaaaggagctccaccgaaagctggtggtcccccaccacctccgccaggatgtcctccacccccacccgtcctcgacttggccagtatgggaggagcgggagatgccagtcaagatcgttcggcgctctttgcggaaataaacaaaggacaagatattacaaagagtttgaaaaaagtcacttccgatatgcagactcataaaaatccaactttgaggcaaggccctgcacctttcaaaccgacaactcaacagacaagcttgtcatctgtcaaacctgcacaggttgataaagctccggttttcaaccaagacggtaagaaatggatgatcgaataccaaaaaggcaatcacaatctgttggttgaaaatgccgagatgaataatgtcgtttacctttataagtgcgaaaattctactgtacagatcaaaggaaaaattaactccataacgttggattcttgcaaaaagacctccgtggtgtttgattcacttgtgtcttccatggaatttatcaattgccaatctgtgcaaatgcaggtattgggcaaagttcctaccatctcaatcgataagactgacgggtgccaagtatatttgagtccgcaatcattggatgttaacataattacttcaaaatcatcagaaatgaacgtactgataccaaaaggagacggagattacaccgaaattcctgtaccggaacaattcagaacaagtgtgaacaccaaaaacaacacccttacaaccgttgtaatcgaaaacaagggataaattgttcgtgtttaatatttatgaactacatttacgtctaacaaattttataatttttatttttcagtattcgtatcttcggctttgaaatatttatttttacgcttagctaaggataaaaagattagtggtattcatagtatgtaaagttataattttccagggactatggaattagattattacaaaatatttgttgatattgaaatagaaaggaacaatcaataacaacggtagcattttcttcaattcttttattactcctataaatgtgcaacattatgaaggtaatcgaagatctacttttgtcatttttaattgttactaacagcattcttaatttgagtactaaaaaccgttgtagtaatttttgcgatattattaaggctgattcctatgtacataaaatttgttagtagtaaagtatctgtttagaataaatgatatttataatattaataacttaagcaatttcatacatttataatcgattagatgagttattgtgaatatctatttagagcgaaaaatatgaatgtcaccaaaaagctgtagtactaatctcaaaaattttttggaaccttatgaatatgtacaacaaaaacgctgaaagtgtcaacagtatcatgtcatccacaccaatcgtttgttaattagtatataggctacaaaaatactttcagaagtatgtaaaaaaaaaagatttctgaaaattggtttcgttgcaattacttttccgtagaaaaaccgataccacaagtattattggtaccttttatataatttcttttcattaaaaaattttagtttacttgaaaccaacatttatgaatgtgcattacacaagatcaacaaatggtacagtttgtttaggtgcttaagctgatctagagagagtaactatatactaaaaaataaagcgttagatcccatttaaagtaggtaacttaatagaatcttcagtttctttttttttcagtgtgaaaactgtttgcttataaacgacttaaggtactagtacacttagaagaccaaaatatttttttttcaagaatttttttctcggaacctttactagaaatgaacatggaactttttacatattaatatctaactcttagagagtacaaatatatctttttttcatttgtgcacgtgcactaatattttagagggcgcaaaagtcgaggcctcgaaaaatgatggcggacagtaatctcaggattgggatatctgaaacaaaggaatcctattgcatttgaaaaaggaaggtttcttacgtgacaatttaccacaatttgaccaaaaaataaaaataaatattttttaaccatgaaaaactaaagagaaacgggcgattgtttcacaaaatttttcaaatttccgtaaaatctttttttttgcgaatttttcactaacggtggtaaattgtcacgtaagaaacctttcctttttcaaatgccgtgcgatttttttgtttcagagatcccaatcctgagattaactgtccgccatcgaaactactttttgtcgaggcctcgactttggcgccctctacaacattggtgtgcatgtataaatgaaaa

SEQ ID NO: 4412 - DNA, 3337 bp, Diabrotica virgifera
  SmartBlast Evalue=0; Info=Polyadenylate-binding protein 1 n=3 Tax=Apocrita RepID=E2B282_9HYME
gttgtaatttagtgtgtgagcgagagtggtgttgtgtaccttcacaacccacttaaaattgtgaaataatttatttaaaaatacaaaaaaatataaaaaaaactaataaaaaataaacaaaaaaatcgcaaaatagtgtaaaaaagtaaaataacaaacgtaatgaatccaggcgccccaaattaccccatggcgtctttgtacgttggggatttacactctgatattactgaggccatgctttttgagaaattttcaactgcgggccctgttctttcgattcgcgtttgcagagacttgattacacgtagatccttgggttatgcgtacgtaaatttccagcaacctgctgatgctgagcgtgcgctggatacaatgaactttgacttgattaaaggacgtcccatcagaataatgtggtctcaacgagatccatcattgagaaaatctggtgttggtaatgtttttattaagaatttggatcgttccattgacaacaaggctatgtatgatactttctcagctttcggtaatattcttagttgtaaggtagctcaagatgaaaacggctctagtaaaggatatggatttgttcattttgaaactgaagaagctgcaaataaatccattgaaaaggtaaatggtatgttgttgaatggaaaaaaagtatatgttggtcgctttattccacgtaaagaaagagaaaaggaactgggagaaaaggccaagcttttcacaaatgtatatgttaaaaattttggtgaagatttatctgaagaagagttacggaatatgtttgaaaagtatggtaaaattaccagctacaaaataatgagtaaagatgatggtaaatctaaaggctttggctttgttgcctttgaaaatccagaggcagccgaaacagcggtggaagctttgaatggaaaagaattgatggaaggaaaacctttgtatgtaggaagagcccaaaagaaagctgagcgccagcaagaactaaaacgtcgatttgaagcccttaaaatggaaagacttaatcgttatcagggtgtaaatctctatgttaaaaacttggatgatacaatagacgacgaacgtctccgtaaagaattctctccgttcggaaccataacttctgccaaagtaatgatggaagaaggtagaagcaagggttttggtttcgtctgcttttcctccccggaagaagctacaaaagcagtaacagagatgaacggcagaattgtcggtacgaagcctttatatgttgccttagctcagcgtaaagaagatcgcaaagcacatttaacatctcagtacatgcagcgcatggccaatatgcgcatgcaccagatgggtcagttcattcaaccaggtgcgtctagcggctatttcgttccaaccattcctaccgcacagagattctatggaccagcccagatggctcagattcgtaccagtcccagatggcctgcccaaacacctgtaagaccaggtgctcaaggaggagctactgcctacactggcatgccaaacacttacagagcggctactcgtccaccaaaccagtcaacaacaatgcgtagcaacatcagtgtacctagaccaattactggacaacaacctcaaagtatgcaaggtcgtccacttgctggacaaggtggagttgtaccttccgctggccgcacagcaaacttcaaatatacttcgaacatgagaaatccacctcaatccttgggaggtataccaggaactgcggctcctgtacagcaagctgtacacatccagggtcaagagccacttacagcaacaatgttggctgctgctcccccacaggaacaaaaacagatgttgggtgaaagattgtttccacttatccaacgcatgtatgcagatatggcaggtaaaatcactggtatgttgttggaaattgacaatactgagttgttgcacatgttggaacaccaggagtcgcttaagaataaagtggaagaagcagttgctgtactacaagcccatcaagccaaacaggctgctactcagattaaaaaagattagtagttggtcgtaggcgactgtagaagggatataatcgtttaagaatataatatgtatcctgtaattatgtattgttgattttcatattttactttatatctcaacgtctgaaaaggcataagttattgagaagttaaagctatgagtaggcccttatgtgttcttacgcctatgaacacgttgttacatgtaaaacaaattgtgtatgaaaaatttcttcttcagatgtcattttaatgggaaactgctagcattcgtttatatattaaatatattgtatataataattattattataaatataataataattgttgcaaatttagcaattaatattttgtgaattttcaatgcaacttagcagaacttccatgtgtattttagttttttcatattattatttattttatattttcatgttataaattacccgttgtctgaaaagacgagggattgagatcattgttattgattattgattgtgcttgattattgattgattattaatattacccttccttacatcgcctatgaacaggatactatcaaataaataaaataaatataaaaattgcaaatagtcctatgacaaaaaagtaaaaaaatctatacttaacaatcccataataaagatttcttttcaattggaaactgtaacattcgtttgtattttcgcattgtttgcaattgttattttgatcattttcaatacaatttagtataagtttagtaatctaattttatatttttactgttttcatattgtgacaaattaatttctaaaagggcataaaaattttccaatatgacccttcttcgttcttacgttgcctttgaaaagaatactatcaaattaaacaaaaataattataaaaattgcaaagagtcctatgaccaaaaacgtaaaaaagattatctctatttaataatcaattcgtttgtatttttgcttatttacaatttttattttgatctattcaatggaattgtaagtctgacaatgctttatggaccattttgatggaagaaagcgttaatatattatttcagatatttttcgacaatttccttcattgtttatatccttcaatacatgaattttatggtttgtggactatcatgaatttttttatcgtttgtctcttagttttttaatttgatacgattatgactcacgtgtgttgcaaactagagatacggaatgagtataagtaaaactattttgtattcacatgccataaaattgatatataaatatattcgaattcaataaatcagttaaatc

SEQ ID NO: 4413 - DNA, 3307 bp, Diabrotica virgifera
  SmartBlast Evalue=0; Info=Polyadenylate-binding protein 1 n=3 Tax=Apocrita RepID=E2B282_9HYME
gttgtaatttagtgtgtgagcgagagtggtgttgtgtaccttcacaacccacttaaaattgtgaaataatttatttaaaaatacaaaaaaatataaaaaaaactaataaaaaataaacaaaaaaatcgcaaaatagtgtaaaaaagtaaaataacaaacgtaatgaatccaggcgccccaaattaccccatggcgtctttgtacgttggggatttacactctgatattactgaggccatgctttttgagaaattttcaactgcgggccctgttctttcgattcgcgtttgcagagacttgattacacgtagatccttgggttatgcgtacgtaaatttccagcaacctgctgatgctgagcgtgcgctggatacaatgaactttgacttgattaaaggacgtcccatcagaataatgtggtctcaacgagatccatcattgagaaaatctggtgttggtaatgtttttattaagaatttggatcgttccattgacaacaaggctatgtatgatactttctcagctttcggtaatattcttagttgtaaggtagctcaagatgaaaacggctctagtaaaggatatggatttgttcattttgaaactgaagaagctgcaaataaatccattgaaaaggtaaatggtatgttgttgaatggaaaaaaagtatatgttggtcgctttattccacgtaaagaaagagaaaaggaactgggagaaaaggccaagcttttcacaaatgtatatgttaaaaattttggtgaagatttatctgaagaagagttacggaatatgtttgaaaagtatggtaaaattaccagctacaaaataatgagtaaagatgatggtaaatctaaaggctttggctttgttgcctttgaaaatccagaggcagccgaaacagcggtggaagctttgaatggaaaagaattgatggaaggaaaacctttgtatgtaggaagagcccaaaagaaagctgagcgccagcaagaactaaaacgtcgatttgaagcccttaaaatggaaagacttaatcgttatcagggtgtaaatctctatgttaaaaacttggatgatacaatagacgacgaacgtctccgtaaagaattctctccgttcggaaccataacttctgccaaagtaatgatggaagaaggtagaagcaagggttttggtttcgtctgcttttcctccccggaagaagctacaaaagcagtaacagagatgaacggcagaattgtcggtacgaagcctttatatgttgccttagctcagcgtaaagaagatcgcaaagcacatttaacatctcagtacatgcagcgcatggccaatatgcgcatgcaccagatgggtcagttcattcaaccaggtgcgtctagcggctatttcgttccaaccattcctaccgcacagagattctatggaccagcccagatggctcagattcgtaccagtcccagatggcctgcccaaacacctgtaagaccaggtgctcaaggaggagctactgcctacactggcatgccaaacacttacagagcggctactcgtccaccaaaccagtcaacaacaatgcgtagcaacatcagtgtacctagaccaattactggacaacaacctcaaagtggagttgtaccttccgctggccgcacagcaaacttcaaatatacttcgaacatgagaaatccacctcaatccttgggaggtataccaggaactgcggctcctgtacagcaagctgtacacatccagggtcaagagccacttacagcaacaatgttggctgctgctcccccacaggaacaaaaacagatgttgggtgaaagattgtttccacttatccaacgcatgtatgcagatatggcaggtaaaatcactggtatgttgttggaaattgacaatactgagttgttgcacatgttggaacaccaggagtcgcttaagaataaagtggaagaagcagttgctgtactacaagcccatcaagccaaacaggctgctactcagattaaaaaagattagtagttggtcgtaggcgactgtagaagggatataatcgtttaagaatataatatgtatcctgtaattatgtattgttgattttcatattttactttatatctcaacgtctgaaaaggcataagttattgagaagttaaagctatgagtaggcccttatgtgttcttacgcctatgaacacgttgttacatgtaaaacaaattgtgtatgaaaaatttcttcttcagatgtcattttaatgggaaactgctagcattcgtttatatattaaatatattgtatataataattattattataaatataataataattgttgcaaatttagcaattaatattttgtgaattttcaatgcaacttagcagaacttccatgtgtattttagttttttcatattattatttattttatattttcatgttataaattacccgttgtctgaaaagacgagggattgagatcattgttattgattattgattgtgcttgattattgattgattattaatattacccttccttacatcgcctatgaacaggatactatcaaataaataaaataaatataaaaattgcaaatagtcctatgacaaaaaagtaaaaaaatctatacttaacaatcccataataaagatttcttttcaattggaaactgtaacattcgtttgtattttcgcattgtttgcaattgttattttgatcattttcaatacaatttagtataagtttagtaatctaattttatatttttactgttttcatattgtgacaaattaatttctaaaagggcataaaaattttccaatatgacccttcttcgttcttacgttgcctttgaaaagaatactatcaaattaaacaaaaataattataaaaattgcaaagagtcctatgaccaaaaacgtaaaaaagattatctctatttaataatcaattcgtttgtatttttgcttatttacaatttttattttgatctattcaatggaattgtaagtctgacaatgctttatggaccattttgatggaagaaagcgttaatatattatttcagatatttttcgacaatttccttcattgtttatatccttcaatacatgaattttatggtttgtggactatcatgaatttttttatcgtttgtctcttagttttttaatttgatacgattatgactcacgtgtgttgcaaactagagatacggaatgagtataagtaaaactattttgtattcacatgccataaaattgatatataaatatattcgaattcaataaatcagttaaatc

SEQ ID NO: 4414 - DNA, 3492 bp, Diabrotica virgifera
acatttagaacttttattcttctacttacactatacaatgtacaaaacctataatgttcataaaaatattagcctagattaatgtaattgatcttagaattttgttacattttctaccaaaaatgataaaagtactgttactacctactcatacataactgaaatcataactataaatcacatacttccttaagtaataccaaatctgactactagataagctattatataaaaattagcccgataaacattgttcacttcatttacataaaataaatacaactttcgtgtcaacttgtatgtcgatcatttccagcatgtcggttgaacgtatcaaaaccataggtttattcgcagagccatctcagtgtagtaattggactaggcaatctcctgttagtgaaaagtttgccacgtctacagtaaacttatataatacgtagctgttccagccccgttaaataatttggttagcgaacaaactttagatactaggggcattcgtaaaaaaaggttcccaatgacgctgagaaagagtgcgaagggctgggagaaatctgacaacactgccttacatatcaactctccctttctcttatcccaccactggccccctccgagaatttaaaaaatataaatttaaatatttgcagttcacatgcttttagttccaaacacatgtatatatacaaaataggagataaatatattgtctggactagaattgaacaaaagcagtaacgaaagcttcaagaatgacataggatgttttgcaaatcaaaatgttgataattttacaaagtgccaatttttagaacgaccttggcagccatcaaaatcgtatcaatttccatattctgtatacacatagaaaagaaattaagcattacttgggtcatcagcacttagaacaaaggagtttattggtactttcacacagtcaaaagagattgtttatcaagattgcgttttatttttctaacgaaaaacatggtcacactaaagggatgacagctcaaagtcttgtcacgaaacctttaacatgtttagccaaactcatcgtcaaagagggagccatacaaacccatgaaaaaacatcataccacaaggagtgcgttcaggttgggctggattttctataaagttatcgcaacctgcaaaagtcagtcattaaacagatatactctcagaggtcgaaataggtacaagaaaatagagaaagactacgactaatagtagagtctatagtgttcttaagtcgacaaaatactcctctaagaggctatcgtgatgatagccttctgcttctggacgaagatgctagacctaacaatgaggggaattgttaaggtttaaaatcgcatcaggagataagattcaaacaacacctatccaccgcatcttcccgagcaacatacattagtagcaccagtcaaaatcaatgataacatataacatgttgtggtgaagaaataattgaacaaataatgaatcaggttcaaagtgcaaattattactgtcatgtttgacaaaatgaccgacggatcccacgtggaacagttttctctaaatgtgagatacatacacaataacaacattcgtgaagactttgtcaagttcattgacgcttatgagaacataaaaataattagtgaaaatcagaaagaggggaagaacaaggcctgacaggtgaagcactggaaaaatagtattaaacttgttgaaagaacttagatccgaagaaatgtgtcctgactttaataatactttaataactataagtttggaatgtctttatggcactcaaaagtctgtgaaaagtgccttaaaactcactattacaaccctcatttttaaaaattttccccagaccctccggtacccctctcaaaaaaaagttcatggcccctcccgaaaatctgtcctggatccgcccttgcatgcaaataccttttttacatgcaaaatagatttcacctatttgcattcatcgtcagtcaatcaaagtttatgggtatgactgcatatctgttcaacatatccgcaaatgttgtagagaattcagtgaaggccttcatcactgagttctctacaccatttgcgaacatgttgaacagatataaactgacgatgaatgtcaataggtgaaatccatttaaaaaacagcatttaaaaaacgtatcacagcatgaatttcacattggaggtaacacccaccgggacctccatcttcgaagactgctaagtcgacactgagaaaagcagtgagtcgaaactggtgaggtaagagagaaggagagttgatgtatgacactttctcagcggcacaggtaactcttttttacggatgaccctcatatagtattattaatgcatgtaaacgaattaaaccatgttttaacactttttaaaatctgttaaaattatgaaagcggagccacgaactcttttaaattacatgatatcaatattcatcaggccaaataataacaataataagctattttccaacaccagtcagacaaaatttagttatttcacttctatcctaagtaatatgtacattaaaatgttaagacaaggcatattcatcacctgatcatataaaaaatatatatcggattatttttttttaaagtggattacaattttatttcttattacaaaaccataaaagttaaatatttccacaattatttaaagtaagttctacagttagttgtacactaaaaattaactatattgctgatgacaagataaacatagtttagcgaaagaaatagaatagcaaccagatcgtatcgaaaaatgttgagcctgaagatcaaactaataatttatctggtataagtcttcttcgtgtgctctcccactttgtttttaaagcttatgtttacggcaattagtggctcacaactagtaactttgttacaccagataagttgaaaatagaaataatgaaaccaaaagagcgataaagaaaaatagctgtaattatagagcaatatcaacttttaacacaactaataaaatccactgtagtcggctgtataccattaatcacaaaaaattagttaaaatcctttataaaatgtatatttaattaaaaagtctcttaaagggctacatcacaaaacgttttcgaaatagagttcatcatcagtgctgtcagttgctctttacagtccataatgtgcggttctgccctctagacttgcaacccgcgtattgtgagccagttctgtgttgcctgatataaaatctaggattattttaaacatcacaattaattttatataaacatctaaattttctacaactgcacaatatttaaagaaaaaatatcacaaggaaaaattcctgtactggctgtatcccataaatcacaaaaaataaaaaccttatcttgtaaaaggatatttaaaatccctaaaaagggctgcatcacaacaaaacgccctcggaatcaacattccaccatcagtgccatca

SEQ ID NO: 4415 - DNA, 3101 bp, Diabrotica virgifera
acatttagaacttttattcttctacttacactatacaatgtacaaaacctataatgttcataaaaatattagcctagattaatgtaattgatcttagaattttgttacattttctaccaaaaatgataaaagtactgttactacctactcatacataactgaaatcataactataaatcacatacttccttaagtaataccaaatctgactactagataagctattatataaaaattagcccgataaacattgttcacttcatttacataaaataaatacaactttcgtgtcaacttgtatgtcgatcatttccagcatgtcggttgaacgtatcaaaaccataggtttattcgcagagccatctcagtgtagtaattggactaggcaatctcctgttagtgaaaagtttgccacgtctacagtaaacttatataatacgtagctgttccagccccgttaaataatttggttagcgaacaaactttagatactaggggcattcgtaaaaaaaggttcccaatgacgctgagaaagagtgcgaagggctgggagaaatctgacaacactgccttacatatcaactctccctttctcttatcccaccactggccccctccgagaatttaaaaaatataaatttaaatatttgcagttcacatgcttttagttccaaacacatgtatatatacaaaataggagataaatatattgtctggactagaattgaacaaaagcagtaacgaaagcttcaagaatgacataggatgttttgcaaatcaaaatgttgataattttacaaagtgccaatttttagaacgaccttggcagccatcaaaatcgtatcaatttccatattctgtatacacatagaaaagaaattaagcattacttgggtcatcagcacttagaacaaaggagtttattggtactttcacacagtcaaaagagattgtttatcaagattgcgttttatttttctaacgaaaaacatggtcacactaaagggatgacagctcaaagtcttgtcacgaaacctttaacatgtttagccaaactcatcgtcaaagagggagccatacaaacccatgaaaaaacatcataccacaaggagtgcgttcaggttgggctggattttctataaagttatcgcaacctgcaaaagtcagtcattaaacagatatactctcagaggtcgaaataggtacaagaaaatagagaaagactacgactaatagtagagtctatagtgttcttaagtcgacaaaatactcctctaagaggctatcgtgatgatagccttctgcttctggacgaagatgctagacctaacaatgaggggaattgttaaggtttaaaatcgcatcaggagataagattcaaacaacacctatccaccgcatcttcccgagcaacatacattagtagcaccagtcaaaatcaatgataacatataacatgttgtggtgaagaaataattgaacaaataatgaatcaggttcaaagtgcaaattattactgtcatgtttgacaaaatgaccgacggatcccacgtggaacagttttctctaaatgtgagatacatacacaataacaacattcgtgaagactttgtcaagttcattgacgcttatgagaacataaaaataattagtgaaaatcagaaagaggggaagaacaaggcctgacaggtgaagcactggaaaaatagtattaaacttgttgaaagaacttagatccgaagaaatgtgtcctgactttaataatactttaataactataagtttggaatgtctttatggcactcaaaagtctgtgaaaagtgccttaaaactcactattacaaccctcatttttaaaaattttccccagaccctccggtacccctctcaaaaaaaagttcatggcccctcccgaaaatctgtcctggatccgcccttgcatgcaaataccttttttacatgcaaaatagatttcacctatttgcattcatcgtcagtcaatcaaagtttatgggtatgactgcatatctgttcaacatatccgcaaatgttgtagagaattcagtgaaggccttcatcactgagttctctacaccatttgcgaacatgttgaacagatataaactgacgatgaatgtcaataggtgaaatccatttaaaaaacagcatttaaaaaacgtatcacagcatgaatttcacattggaggtaacacccaccgggacctccatcttcgaagactgctaagtcgacactgagaaaagcagtgagtcgaaactggtgaggtaagagagaaggagagttgatgtatgacactttctcagcggcacaggtaactcttttttacggatgaccctcatatagtattattaatgcatgtaaacgaattaaaccatgttttaacactttttaaaatctgttaaaattatgaaagcggagccacgaactcttttaaattacatgatatcaatattcatcaggccaaataataacaataataagctattttccaacaccagtcagacaaaatttagttatttcacttctatcctaagtaatatgtacattaaaatgttaagacaaggcatattcatcacctgatcatataaaaaatatatatcggattatttttttttaaagtggattacaattttatttcttattacaaaaccataaaagttaaatatttccacaattatttaaagtaagttctacagttagttgtacactaaaaattaactatattgctgatgacaagataaacatagtttagcgaaagaaatagaatagcaaccagatcgtatcgaaaaatgttgagcctgaagatcaaactaataatttatctggtataagtcttcttcgtgtgctctcccactttgtttttaaagcttatgtttacggcaattagtggctcacaactagtaactttgttacaccagataagttgaaaatagaaataatgaaaccaaaagagcgataaagaaaaatgctgtaattatagagcaatatcaacttttaacacaactaataaaatccactgtagtcggctgtataccattaatcacaaaaaattagttaaaatcctttataaaatgtatatcca

SEQ ID NO: 4416 - DNA, 2972 bp, Diabrotica virgifera
  SmartBlast Evalue=3E-68; Info=Serine/threonine-protein phosphatase 2A 65 kDa regulatory subunit A alpha isoform n=4 Tax=Apocrita RepID=E1ZYP9_9HYME
ctcctctgtgtttaggagccactatatgtaggggtacatctgcacggtaccatgtttctgcccatatgataatctgacgcgctcgagtaactgcaaaaatccccgcttgggctcccctaccataagtatttataatgatatagcaaataacagtagaccaaatactttcaaaatgttctgtatttccgtaggtctataattttcgagattatttctacacctttttatataatcgtccgtcattttcaatctagagatacaaaataattatttttcctcaactttaacaactgcatcacttttcacaacagcttcatctgggacttgactatcttctgcaggtgctacagttgtatctaacgtttctttttcttcgacaacttcgaccacctccggtgttatatcagttgctgcaacatccgacactgccacatcagttgctgtatcattagctgctacaacctctgttatttcaacgtcaggtgccacaacatcaactaccataggttcaggtttttcactagaagtattttctgtctctttagtttcaatcacactatctgcacttataacagtttcgaatttttctgtttgtacattatcaacattttcaggccacttctccactacgtctattgccatttccctgataccatctttattatattcatctaaattattttctcccatttgtaaagaagttcggctagttgtgatgatgctatctatcaattccgtattaatgttctcttcatctaattcctctgatttttcgactagttcagcattaagttcttcttcaattcgatccagctcctcttgcttcaaaacctgcaatgtttcttctacccaaggctcttttatttctgcgagaagcttatccacaaacactttaattttgtttatagtaaagattgatctgatttgtacgtttactattctatcgtcgaaaagagtcaatagtaatcctaaacattctctgtatatgaaaaaaaggactcctgtgaggtaccaatcgttagagttttcagctttggttccgtcataactaaatatgttttcgctgtagtgcgatcttaaagaatttaaggtttcccctgcatacaaagaaatattatctgtcttaaaatcatctatgcttttattcaatgacaagatatcttggaaagtcttttcctccaagagactttcaagcttcttcagtatacactttaacatccacaacatgttagctgctttattcttatcttcaactttctttagacttgcgagatactctttttcttctccaggaagcactgaaggttcaatcaactcgtttatgccaaaaatcggtacgtaccgatacaaatatctggtgtctcgttgaaacatcttaaagtaggggattatttgtgctgatgtccatgtcattccaaagtgtttgactatgagaggtagaattatagcagctgttcttctaacagcaaagacgtgatctcctagaaggcttccatagaagtgtttgatgttttctgcgaagtactcttttggagcaaacttaattatatgcataaatgtcaccaacaggccctttcttgttctccaatgtgattgagagtaaacgattaatgttcttataaccctcttgatagaagggagagattgatcaaagtctacatctgctggaaggtcatttaggttctctaaaatattagccttgactgaaactgattgttctagatctaaaatatccaacactagtggcataatatgctccacaaacgtttctttactaataagtgtgctcaaacttaaaatgtttttagccagttctagcttaacatcagtacaagtatcgactactagcattgttatctgaggtactaggctttgtataaaaactgactcaaaattgttttcaacttggtcggttctctcgtatgactcttttagacagcgacaatacggtactaggtttctaacagcgacaatcctgacttcgtcttcgacatttttgatcagtttttggaacattgctagtattcttccacgtagtttggggtagtagatcaccttctgtatttctgctatatctactgctagaacgtgacgagttttccaagattcactttcggcaaaactctcgagcgttttaaaaatggattcttcaatttcattctcactcaatattttacaaattgctaaagctacctttacagttgtcgcttttacggaatccatgttatcattggatatgttatcgaaaacagatatgaattcatttttaatgctttctttgtccaacaaggcaatgaaatcaatgagacccaacgctgcttcttttctcacaataggcgactcgtcttgagatagtaagcggaagttatgcctcaattcagccttcctttcctcttgtacttttggatatattgatgaaaaaagagccactgcagaacatttactcgtaaaccactgctcatttgccaacgattctaaaatcggaaccagcaactcttctacaagctcattactcaattcttctgctattccttttaaagtctccaaagttttctctctaactaaaaattcgtcaatattgcagatcttcttgagaagctccaacacaggttgggagttttcgtatcccccaaccaacggtattaattttttcagttgttccggtagatttaacagtatttcatcgtgaaagttcatgttttcttctaggaatggtagtagctcttgtcttgtgatgttttctcccaagtgttcagcaagaataccgagtcttttggtcatatcaatttgctccgtaatattttcatctttgatggcttggctgaaactctccttgaaggtcttcagatcctccatcaggacactttcgtcactcatttcgaacaactttttgattttcaacgcgaaaatcttaggtagaacacctttaacccaaatacaaatatcgtgtcttatcacacatcaagtgcttt

SEQ ID NO: 4417 - DNA, 3825 bp, Diabrotica virgifera
  SmartBlast Evalue=8E-46; Info="Steroid membrane receptor Hpr6.6/25-Dx, putative n=1 Tax=Ixodes scapularis RepID=B7PN29_ IXOSC"
ctgctgctgttgacaagctgtcccagctgaaatcctcaaaattttaaagttctaaactttatcaaattgctgtcactcctttcatcaatctgtgattctgctttatcagcgcagtaatttgtaatttgctagtaccatggattattctactcctacacccggtctgttaacgaacatatttttgcaaataatgcaaagtcctttaaacattgccctcgtgtgtattatcggatttctagtgtataaaattttcaagagtcgaaataacgatgtacccgtgcgaactacggtcgtggaattaccgaaaatgaagaaaagagactttacattggaagaattaaggaaatacgatggtacccaaccagatggaagagttcttgtagctgttaatggaaacgtttttgatgttaccaaaggaaaacgcttctacggtccaggtggtccatattcaccttttggaggcagagatgcttctagaggtttggctacttttgaggttaatgctgttagtgagaactacgatgacctgagcgatttaagcaccatggaaatggattcgataaaggaatgggagtcacaatttcatgaaaaatacgacttcgtgggaagactgttgaagccaggtgagcagccgaccaactattcagatgaagaagacgcagacgaatcagcagccggcggagataaagcagacaaggagaaaaaagaagattaaataatccgcaagagaagaaaaaaaataaaaaaggctgacgcggttataaacaccgatctaaactaaaagtaaaatatttcaaaaaaaaacaaaaacttaatttcgaacttttttgtaaagcattaaatagtacactttgtccttatatttatattatagttcaccgttctctgtttgtttgagagtaagctgagtttttaaataatttatttgtaattataattgatgtgatttaaaataaatggttaagcattgtgtaaaaataaaaataccaaatcagtgtcctttcatcaaaggaatgcagcaagagagacctggttacggatgtggtgcccttgtagtaagtacacataaaaaatgtctaagaaacaaagttttttcctaatatatacatcaattttgattgaatttttaaaagtgacataccgttataatttaacaataaagcaccgaaaacgtttgttttctgtacttccacaaaatttattacaactatgtgactacagctgtttcggcagagtgcctttctcaagtgatttagattactctgggttggccttcttaaattctttaactgaagaggttgaggagtggggagctgtttgtctcgagttggtcattcagaattatatctgtatttttcaatttattaatttccatagattctaaaaagatagcttaaggcctttattttgaatatgcagaatttgaaactgttcattaaaagaatgattatgatctagaaggtgaagtgcgtatgtagagtgtatgtttttctattgttgaaagcccttttgtgttctgctatccgtttgccaaaggttctgccatccgtttgccaaaggttctgccagtttgaccgatgtaagttttcggacagtcaccacaagttagtttgtaaacaccactctgtagttgttttctctttcggctcttattgttcttaatatatttgcttaagttgttgttagttctgaacgctggtgttattccttccttttttatgtatctggctattattgttgttatcttgccagtatatgtgatagagcagaaggtactgggttctttctgtggtggtggaataatggttctggttctttctgtggtaataaattttgtggaagtgtggaaggcaggcgttttcggtgttttattgttagataaagtgaacttccatcaagtaacggtcgaatccatcaattaccgttataatgcctgactagtcagtaatgaattcatcttatttcaatgtaatatacttatgatttgtctatcatgaaataatcaaacaaaagttaaaaagtgcactaatctaatggaaattcttaacataaaagtcatataaaacataaaaatctaacaaatgtgtttaactcgttcagtgcccacgccgacagtgtgtcggcacgagggtttcatcaagggtgccgacgacgcacgaggggcggcggtagtactgccttactaaataaaccctttaagtgcgtggtaccagccatgtggcgtttgttcaagctgggcaccgaatgtctgtgttttctccagcagcaataattacagtttgatatcgccttgtcacgtttaagacacgttaacacgtatccagtaactggcgccagtctcactggcatgccagtgctggacaggtacgtttacacgtatccagtagctggcgccagtgtcactggcactcttattaaaaatccaagtactgccactgaacctcttctcatatttgaaggctttttttgtcgtcactccaattgtttaaaattccattgctttattcatactatgtttattcattaatcactagtaatgacgacagtgcataattttgtctattataattattgttatctaggcatgaaccacataatccacacgattcagagatttcactttaagtgaccaggtggtacttccttaaggggaatggtcttccaggtcttacttccagcataagatttcaggattctattggtttttgctatgttgatgttaaactcgcagccctttcactccatttatgatgataaactgcactaaaaatcttgcagttcctctatattgtctgaaatatttttctacataaattttgaacagtagtggggagggaatacaaccttgtgtgacatccataacataccacttttcagatcttaatcatcgattgttagtggacgtttttggagcagaatgtcagtcatcgagaaataggctttgttgcacgtcattgttcttttttgaatctgaagtttttactgcttccacatcatcctttggtgcctatttccccgtgttccggtttgtgtttatggttttgcctttgtatgtgtatttctagtcaaatctccctgacttttgtaatctttaaaatgtactatagagttgattacaatctagacatcacagactaatcatattgaatacaaacaaagtttctccatatttatcggccgtagttcagcgaccttctaagacagagcgcacgagaccgaatctcggcactaacgacattttcatttctataaatgatacgagccgttcaccgtgcctgggagggcacgtaaaaccgtcggtccccctcggctactgtgcatcgatacaacaatccgaaaggatctctccccggcaaaaatgccatatcagattattattatcattctgataatcttataacttgagggactaatatggcaagttctcttttagccaacctttgtttttgaggacattttcacattttgaggaacaggggtgtttaatcaatacatctgaggatgtattgagtaaacacccctgttcaatatttttcacaaatggcaaagaacctagtattttaaagaatgataatggattttaaaactggaaacatttgtaaccaagtcaacttattcatattattgaggacactgaattggtataacgaatagtgagatttttacaatttaaatgcttacatgaaccagtaatgtaattccagaaatttgcatttgttattatgtatgtataaagtttggtttgaaatatgaattaaagatgtctgaatatcgcctgtacagggcgtgttaaattatatttatattgtggtattgtgatctttt

SEQ ID NO: 4418 - DNA, 2669 bp, Diabrotica virgifera
gtaaaacactgaaaacgtttgttttctatacttccacaaaatttattacaactatgtgactacagctgcttcggcagagtgcctttctcaagtgatttagtttactatgtgtttgtctttttaaagtctttaactgaagaggttgaggagtggggagctgtttgtctcgagttggtcattcagaattatatctgtatttttcaatttattaatttccatagattctaaaaagatagcttaaggcctttattttgaatatgcagaatttgaaactgttcattaaaagaatgattatgatctagaaggtgaagtgcgtatgtagagtgtatgtttttctattgttgaaagcccttttgtgttctgctatccgtttgccaaaggttctgccatccgtttgccaaaggttctgccagtttgaccgatgtaagttttcggacagtcaccacaagttagtttgtaaacaccactctgtagttgttttctctttcggctcttattgttcttaatatatttgcttaagttgttgttagttctgaacgctggtgttattccttccttttttatgtatctggctattattgttgttatcttgccagtatatgtgatagagcagaaggtactgggttctttctgtggtggtggaataatggttctggttctttctgtggtaataaattttgtggaagtgtggaaggcaggcgttttcggtgttttattgttagataaagtgaacttccatcaagtaacggtcgaatccatcaattaccgttataatgcctgactagtcagtaatgaattcatcttatttcaatgtaatatacttatgatttgtctatcatgaaataatcaaacaaaagttaaaaagtgcactaatctaatggaaattcttaacataaaagtcatataaaacataaaaatctaacaaatgtgtttaactcgttcagtgcccacgccgacagtgtgtcggcacgagggtttcatcaagggtgccgacgacgcacgaggggcggcggtagtactgccttactaaataaaccctttaagtgcgtggtaccagccatgtggcgtttgttcaagctgggcaccgaatgtctgtgttttctccagcagcaataattacagtttgatatcgccttgtcacgtttaagacacgttaacacgtatccagtaactggcgccagtctcactggcatgccagtgctggacaggtacgtttacacgtatccagtagctggcgccagtgtcactggcactcttattaaaaatccaagtactgccactgaacctcttctcatatttgaaggctttttttgtcgtcactccaattgtttaaaattccattgctttattcatactatgtttattcattaatcactagtaatgacgacagtgcataattttgtctattataattattgttatctaggcatgaaccacataatccacacgattcagagatttcactttaagtgaccaggtggtacttccttaaggggaatggtcttccaggtcttacttccagcataagatttcaggattctattggtttttgctatgttgatgttaaactcgcagccctttcactccatttatgatgataaactgcactaaaaatcttgcagttcctctatattgtctgaaatatttttctacataaattttgaacagtagtggggagggaatacaaccttgtgtgacatccataacataccacttttcagatcttaatcatcgattgttagtggacgtttttggagcagaatgtcagtcatcgagaaataggctttgttgcacgtcattgttcttttttgaatctgaagtttttactgcttccacatcatcctttggtgcctatttccccgtgttccggtttgtgtttatggttttgcctttgtatgtgtatttctagtcaaatctccctgacttttgtaatctttaaaatgtactatagagttgattacaatctagacatcacagactaatcatattgaatacaaacaaagtttctccatatttatcggccgtagttcagcgaccttctaagacagagcgcacgagaccgaatctcggcactaacgacattttcatttctataaatgatacgagccgttcaccgtgcctgggagggcacgtaaaaccgtcggtccccctcggctactgtgcatcgatacaacaatccgaaaggatctctccccggcaaaaatgccatatcagattattattatcattctgataatcttataacttgagggactaatatggcaagttctcttttagccaacctttgtttttgaggacattttcacattttgaggaacaggggtgtttaatcaatacatctgaggatgtattgagtaaacacccctgttcaatatttttcacaaatggcaaagaacctagtattttaaagaatgataatggattttaaaactggaaacatttgtaaccaagtcaacttattcatattattgaggacactgaattggtataacgaatagtgagatttttacaatttaaatgcttacatgaaccagtaatgtaattccagaaatttgcatttgttattatgtatgtataaagtttggtttgaaatatgaattaaagatgtctgaatatcgcctgtacagggcgtgttaaattatatttatattgtggtattgtgatctttt

SEQ ID NO: 4419 - DNA, 3324 bp, Diabrotica virgifera
  SmartBlast Evalue=0; Info=Guanine nucleotide-binding protein subunit beta-1 n=35 Tax=Bilateria RepID=GBB1_DROME
gccttgtccgttgcggacgttggctatcatcatagcaattctaattttgtttgcggcgtttttaaataactcgatcgatgttagtccaaacctttggcgtaagttttgaagccatgagtgtcttcttcttccgggtccgcgtttgctttctattttaccctgtattatcagttggagtatatgacatttatcatgtatcataatatgacaaaggtattcaagtttccgtttcttgattgtgaaagagatttcttcttgttttgccatttgttgattacaacatttaatttaaagttcatagaaaccaagccatttcaatattttatcattaatgaagactcaatgtattgctgatctcgttctttaacccaataagcaaggttgtaaaggcgaacattttcaataaatttctgtttgttagaacaagttgttagggctcgtaatgcaagaaaatgtaatgaatcaagggaaaacatcaatcaggtattgatgatatgttaaagcttatcttgaccataggtggcagtcaacagaggtaatttagttgaaccagtaatgttgagtatgtaggaaatccactattcagttttctaagaccgttacaatgtcaattaaaaatttgttcagaaatgtacaaggaaaaagtatgcaacacagtgcatcaaatgaaactgcaaacaattttgagcccttaatacttggatggatgtgtatttccaattaagaattatttaataaattgccaacagtgacattgtggtatttgtgatttcgtagcttatcttaacgcgaaccctaccccaaagtctcccaacgcacacgattgtttgttctcatattcactgacgttcacactcgaataaataatttaaaattatacacttagttttaatggcaatatgccccgcgatacggtatgaaattttataaaaagacgttgaaaatatcacgggagatacaccgtattatgcttgtgcaatcaaaaatcaaaaaaataagtgaaatttagctttttaaaaaaatgttcataccacttacattcaagcagaagctatatagtcatgtgggggatgataaaaccttaaagatttctaaaaaacaagacgaaaaaacatcatcagaggaacatatatgtacagaactgcgatgtcatagaaaaaacactgaggtaaataaaaaaagtgttgataaaaaaagtattagcaaaaatggaacactgttctttccaaaatttttataggcagtatctcaaacaatttgattcgtaacctgcctgttgttcaatcaaaggaacctcgccacaatcaactctatcattggtctttttttgtttgtttgtgacgctaagttgagattatggcacactttcaacatttggttaaaatttgtaagactagttttatcatatctgctatttttttgtttgttcagaagcagatttttttcagtttgttcttcgccaaaggaagtttttacgcagctggcccttattttgttaaaagagagtgatttgagagactggctcaactggataaaaacagttcaggataaagtacggtacttgttttaactagcttggtcatatgtttgtacttggaactaaccaaaatgaaaaacggtacgctattttggcgtacgcactgaacaaccaatatcctcttatttctcacctacatcatcaaatcatcaacataaacaatactgatttattaacttaaaatgatattaaatactatacacaacatacatgggccagcgcctaaaatttgtagaattgtcacaaaaaataacgacttaaaaattaaagaaaatacatcacaaagctagacacattttatgctatttatataacagaaataagataataaaaaagcaaagaatattgaaaaaatataactatatatatagtacacttaaaataaaaaagtttcgatttgaataaatgcaatgtaaagagatattgtgatgcaggtgagaaatttaacgttttttggcatcactatcttaattccaaatgcgtaggaaactgtcccacgaacctgtccccactgccattccattatctgtaactcctaaacaactaacacgattatcgtgaccagctaatatacctgctctttctgttttcatagagtcccacacattacaattgaaatcgtcatatccagctagaagtaatctaccagatttgctaaaagcgacgctagtgatgccgcaaatgatgttatcgtggctatacatagccaattcttggtccgccctgatgtcgaacagtctgcatgtagcatcgtcgctacctgtggcaaaggcgaaaccgttggggaagaacgtaacagcgttgatgtctgactcgtgaccggggaatgtctgtttgcacaaaccttctcgaatatcccacagcttcgcagaagcatcacatgctcctgatacaaatgtacgcatgtcaggtgacaaggaaagagacattacatctcctgtgtgtcctaagaaagaggcgacttgctgcccagtctcaatatcccatagggcacaagacatatctcctgaactagtcacgatttggttgtcatcgaggaaacgacagcaagatagataaccagtatgaccgggcaattctcggctgacccgaacattgccttctctagtctttaggctatagatagagcatatattatctaaacctccacaggcgacaaaatttccagatggtgcataagcacatgtcatcacccatgatgatctgagggggattgcatgtaccttatttgtggtgtgactgtcccatacgataagttttccatcttgtgatgctgagacaagattccttgagtctgagccccagtgcatagcgtagatcttggccagatggcctctgagagtacgtctagtccgcatctgcactcgaccaatgggctccaggctggaggtagcctgtaccaaagatgtgtcacaagccgctttgcgagcatctctaatagcatttttgagggtttcagcttcttgcctaagagaatccagttcgttcatactgttcgacacaaaacaaatttactcctctttccaaagctttacagctgtcctaaaccaatcacctataaaactatccaatggtgctcggaaaatcacaaccacatcggtttgcatacatagaaaatatattgtccactcctaatattcatgtagaatttgtctgtagaggtctcatagatgtaaacgcattacccgcacaatctacacgccgattttacaatttttcactgggtttttcaccactatcgttccttgggcgcggtgaatacgaccggttaccgtcccttcccgtct

SEQ ID NO: 4420 - DNA, 3153 bp, Diabrotica virgifera
  SmartBlast Evalue=0; Info=Guanine nucleotide-binding protein subunit beta-1 n=35 Tax=Bilateria RepID=GBB1_DROME
ggagtatatgacatttatcatgtcccataatatgaccgaggtatttaagtttccgcttcttaattgtgaaagagatttccttttgttttgccatttgttgattacaacacttaattcaaagttcatagaaactaagccactttcaatattttattattaatgatagacttcaatgtattgttgatctcgttctttaacccaataagaaggttgtaaaggtgaacattttcaataaatttctgtttgttagaacaagttgttagggctcgtaatgcaagaaaatgtaatgaatcaagggaaaacatcaatcaggtattgatgatatgttaaagcttatcttgaccataggtggcagtcaacagaggacatttagttgaaccagtaatgttgagtatgtaggaaatccactattcaattttctaagaccgttacaatgtcaattaaaaatttgttcagaaatgtacaaggaaaaagtatgcaacacagtgcatcaaatgaaactgcaaacaattttgagcccttaatacttggatggatgtgtatttccaattaagaattatttaataaattgccaacagtgacattgtggtatttgtgatttcgtagcttatcttaacgcgaaccctaccccaaagtctcccaacgcacacgattgtttgttctcatattcactgacgttcacactcgaataaataatttaaaattatacacttagttttaatggcaatatgccccgcgatacggtatgaaattttataaaaagacgttgaaaatatcacgggagatacaccgtattatgcttgtgcaatcaaaaatcaaaaaaataagtgaaatttagctttttaaaaaaatgttcataccacttacattcaagcagaagctatatagtcatgtgggggatgataaaaccttaaagatttctaaaaaacaagacgaaaaaacatcatcagaggaacatatatgtacagaactgcgatgtcatagaaaaaacactgaggtaaataaaaaaagtgttgataaaaaaagtattagcaaaaatggaacactgttctttccaaaatttttataggcagtatctcaaacaatttgattcgtaacctgcctgttgttcaatcaaaggaacctcgccacaatcaactctatcattggtctttttttgtttgtttgtgacgctaagttgagattatggcacactttcaacatttggttaaaatttgtaagactagttttatcatatctgctatttttttgtttgttcagaagcagatttttttcagtttgttcttcgccaaaggaagtttttacgcagctggcccttattttgttaaaagagagtgatttgagagactggctcaactggataaaaacagttcaggataaagtacggtacttgttttaactagcttggtcatatgtttgtacttggaactaaccaaaatgaaaaacggtacgctattttggcgtacgcactgaacaaccaatatcctcttatttctcacctacatcatcaaatcatcaacataaacaatactgatttattaacttaaaatgatattaaatactatacacaacatacatgggccagcgcctaaaatttgtagaattgtcacaaaaaataacgacttaaaaattaaagaaaatacatcacaaagctagacacattttatgctatttatataacagaaataagataataaaaaagcaaagaatattgaaaaaatataactatatatatagtacacttaaaataaaaaagtttcgatttgaataaatgcaatgtaaagagatattgtgatgcaggtgagaaatttaacgttttttggcatcactatcttaattccaaatgcgtaggaaactgtcccacgaacctgtccccactgccattccattatctgtaactcctaaacaactaacacgattatcgtgaccagctaatatacctgctctttctgttttcatagagtcccacacattacaattgaaatcgtcatatccagctagaagtaatctaccagatttgctaaaagcgacgctagtgatgccgcaaatgatgttatcgtggctatacatagccaattcttggtccgccctgatgtcgaacagtctgcatgtagcatcgtcgctacctgtggcaaaggcgaaaccgttggggaagaacgtaacagcgttgatgtctgactcgtgaccggggaatgtctgtttgcacaaaccttctcgaatatcccacagcttcgcagaagcatcacatgctcctgatacaaatgtacgcatgtcaggtgacaaggaaagagacattacatctcctgtgtgtcctaagaaagaggcgacttgctgcccagtctcaatatcccatagggcacaagacatatctcctgaactagtcacgatttggttgtcatcgaggaaacgacagcaagatagataaccagtatgaccgggcaattctcggctgacccgaacattgccttctctagtctttaggctatagatagagcatatattatctaaacctccacaggcgacaaaatttccagatggtgcataagcacatgtcatcacccatgatgatctgagggggattgcatgtaccttatttgtggtgtgactgtcccatacgataagttttccatcttgtgatgctgagacaagattccttgagtctgagccccagtgcatagcgtagatcttggccagatggcctctgagagtacgtctagtccgcatctgcactcgaccaatgggctccaggctggaggtagcctgtaccaaagatgtgtcacaagccgctttgcgagcatctctaatagcatttttgagggtttcagcttcttgcctaagagaatccagttcgttcatactgttcgacacaaaacaaatttactcctctttccaaagctttacagctgtcctaaaccaatcacctataaaactatccaatggtgctcggaaaatcacaaccacatcggtttgcatacatagaaaatatattgtccactcctaatattcatgtagaatttgtctgtagaggtctcatagatgtaaacgcattacccgcacaatctacacgccgattttacaatttttcactgggtttttcaccactatcgttccttgggcgcggtgaatacgaccggttaccgtcccttcccgtct

SEQ ID NO: 4421 - DNA, 3226 bp, Diabrotica virgifera
  SmartBlast Evalue=4E-74; Info=Rer1 protein n=1 Tax=Aedes aegypti RepID=Q16T78_AEDAE
acctcgctttcggccattcatattcattcatgtccgtgtcacaataatttcgactggaaattataatatctaccacttttttggagtcgctattaatttcgatagtcgctattttatggcgtcatttcgttagttcaactaaaatccacaaggctcgcacagtcgcatttcaacgtcgccatattgattgcgacatgttttcagtcgaaatttgaattagaatcagggtccaggacaaggagagcagtgcaaaagatccgtgtggctcaaaaagcgatggagcatgaaagctatgttgggcgtttcactgcgagacaactgccatataaaataatccagccacaactgtggtgctccatgtaagataatcgagacacatattggaagtatatgaactcttcagtgttgtagcttcaggacttaaatggatagctgacttagatttaaagatgtaacttgacactaaaactcgatagcgagataacaaataaactactgaccatacttttgtacatatgtgtcgaaaaaagattatggaaactaaatttcatgcgtatataaaatcacgtgtggtatgaattcaaaaatatacataggtcagacagacagaagtttccacaaatatataagacagaacttgttttctcaaaagtaaaaaatcaattttaatttatcacatatttaattatgttattagtattcaaaattaaattgctggaaagtacttatagcattcttattacctttcacatttttttgtcaacaggagtagtgaattcatgcaataaaacaattttatttatgaaatgaatataacgtaaataaaattatataaaaggaaaatgattctccacaaaagattcaggtatgtatatagagtggtctgtgcaagtagtttctatccgtggtcagtcaacgggcctcagcaattgtcccagcaatttccgtagccccgcaaacaactagtatataggtagaaaaatacatatgtacatattttattcctatatactatttcagacactaatgtgtttttggtagttttttatttgagtatatttccatacttatcccttttaatgctgaactccgattttgtcattactttttctgtatttgttacagttttgaccgcactcattctcggacggacaattacgcagatatagcacacacaactaaaggatcatttaaaaaaatatatatttcgatcccaaatttgtttggaatggcacttcttaacacgtgaatactcttagcgggctagatcaattaattaaagatgtgacctgttaacagattgttagatggatatttattactattgcagcgaaaggaattttctaggttaggataggttagccaataattgtggcttaaacccatttaaacatattacttggatgttttaggatttgttatatctatacaccttaatgaatttaagctatcaagatataacggaatattataaaaaataaaacaagagaatgaaaacaaagtttaaaaaatatgtagatagaagtagtgtatggacggcggggttcatcgtttggaaatcttcttcatgtgtgtctatcatttagttgtatcaaaaatcagaacacgtcttctagaaacacttaatagaaaggaagaaacctaatttatgattttgttttctatacgtaaatgatgatccgatgttgtagcatcttacaaatcaatgaatgggcactaccgagtagtaaagacctattacccttcaccggctctagtcgctcgagaatttcagattcaaagacgcagatccattctgttctttatattgccacatctgaaatactttccccgctagcttatctctaaccatgatgctagtgaactactcacttcaaaatctgtattatacttcgtgagagaaaaatacgtccacgcctatgattaaattgtctttttgcgaaagagaataagttgtgaggtcatgttacacttttgcatgttcagtatagtaattcgagagaaaagtcttacaaaatttataaataaggtactataagccaaactaaatctctttcacaatgttcgtagcagctaaccttctaggttaatcagtttttaaattattgttagtcgtcgccagttttctatcagtggtttccatcatcttaaggtcgccgacaaaaattttaaaatattgcctctaatcattggtccttcgagccggatacataaataaaatgtagtggtagtgtaatcaggctactccgttttgtacgtataatttgccacgaccacaaaataaaaacaaaaattaaaaaacaaaattgtatttccttgcataaacccactttacaaccaacatacagatagttatcgaaatgttttagaggaaaattcgcaacttttgattatgtacataaagatcggttactacgtttgcctatagtaacgaatgaatctcttgacctaaatactttattttacttgtatacaaattgcaaaattgtttttataataaagttaataaattacatcctctgtcactttggggatattataaccttccccgtcgtctcctcatgaccctggtatttcggtttgccgtgcgtgaaaggcaagtacctgtattttatcatgtgccttatttgcctcttcatagtaatacagaacaaagttataaaatacatgactaaaattggccagaatacaggtatgttgaagcaatcgaagaatgtacaaattacaccaatgagtgtactcttggtcactgaataccaaaacttgaattctggtagtcttcttatgaaaggcctgaactcttcattggctctagtgggtaattcgggaccgccttcatcgccatcaaaatccattgcaggatcgatttttggtgtgagaaatgctataaacagatttaaatgatatatacctaatgcatacgtgactatataccagccctgtgccaatagcactctggctaaaaacccggctatgagaagtatggcagctacccatctaccctttcgccagggtactgtcttgtccaccactccttgatagctctgtgatatcctggtacatagttgagaaaacacatttttcttcgaattcgaagttaataattcttcttccatatttacgtaaattctattatcctatttattttccagtaaaaaattattaattgaagattgaaagaaattagagtattaatccatttttgtacacgtcgatcgtcgatccg

SEQ ID NO: 4422 - DNA, 3218 bp, Diabrotica virgifera
  SmartBlast Evalue=1E-78; Info=Rer1 protein n=1 Tax=Aedes aegypti RepID=Q16T78_AEDAE
acctcgctttcggccattcatattcattcatgtccgtgtcacaataatttcgactggaaattataatatctaccacttttttggagtcgctattaatttcgatagtcgctattttatggcgtcatttcgttagttcaactaaaatccacaaggctcgcacagtcgcatttcaacgtcgccatattgattgcgacatgttttcagtcgaaatttgaattagaatcagggtccaggacaaggagagcagtgcaaaagatccgtgtggctcaaaaagcgatggagcatgaaagctatgttgggcgtttcactgcgagacaactgccatataaaataatccagccacaactgtggtgctccatgtaagataatcgagacacatattggaagtatatgaactcttcagtgttgtagcttcaggacttaaatggatagctgacttagatttaaagatgtaacttgacactaaaactcgatagcgagataacaaataaactactgaccatacttttgtacatatgtgtcgaaaaaagattatggaaactaaatttcatgcgtatataaaatcacgtgtggtatgaattcaaaaatatacataggtcagacagacagaagtttccacaaatatataagacagaacttgttttctcaaaagtaaaaaatcaattttaatttatcacatatttaattatgttattagtattcaaaattaaattgctggaaagtacttatagcattcttattacctttcacatttttttgtcaacaggagtagtgaattcatgcaataaaacaattttatttatgaaatgaatataacgtaaataaaattatataaaaggaaaatgattctccacaaaagattcaggtatgtatatagagtggtctgtgcaagtagtttctatccgtggtcagtcaacgggcctcagcaattgtcccagcaatttccgtagccccgcaaacaactagtatataggtagaaaaatacatatgtacatattttattcctatatactatttcagacactaatgtgtttttggtagttttttatttgagtatatttccatacttatcccttttaatgctgaactccgattttgtcattactttttctgtatttgttacagttttgaccgcactcattctcggacggacaattacgcagatatagcacacacaactaaaggatcatttaaaaaaatatatatttcgatcccaaatttgtttggaatggcacttcttaacacgtgaatactcttagcgggctagatcaattaattaaagatgtgacctgttaacagattgttagatggatatttattactattgcagcgaaaggaattttctaggttaggataggttagccaataattgtggcttaaacccatttaaacatattacttggatgttttaggatttgttatatctatacaccttaatgaatttaagctatcaagatataacggaatattataaaaaataaaacaagagaatgaaaacaaagtttaaaaaatatgtagatagaagtagtgtatggacggcggggttcatcgtttggaaatcttcttcatgtgtgtctatcatttagttgtatcaaaaatcagaacacgtcttctagaaacacttaatagaaaggaagaaacctaatttatgattttgttttctatacgtaaatgatgatccgatgttgtagcatcttacaaatcaatgaatgggcactaccgagtagtaaagacctattacccttcaccggctctagtcgctcgagaatttcagattcaaagacgcagatccattctgttctttatattgccacatctgaaatactttccccgctagcttatctctaaccatgatgctagtgaactactcacttcaaaatctgtattatacttcgtgagagaaaaatacgtccacgcctatgattaaattgtctttttgcgaaagagaataagttgtgaggtcatgttacacttttgcatgttcagtatagtaattcgagagaaaagtcttacaaaatttataaataaggtactataagccaaactaaatctctttcacaatgttcgtagcagctaaccttctaggttaatcagtttttaaattattgttagtcgtcgccagttttctatcagtggtttccatcatcttaaggtcgccgacaaaaattttaaaatattgcctctaatcattggtccttcgagccggatacataaataaaatgtagtggtagtgtaatcaggctactccgttttgtacgtataatttgccacgaccacaaaataaaaacaaaaattaaaaaacaaaattgtatttccttgcataaacccactttacaaccaacatacagatagttatcgaaatgttttagaggaaaattcgcaacttttgattatgtacataaagatcggttactacgtttgcctatagtaacgaatgaatctcttgacctaaatactttattttacttgtatacaaattgcaaaattgtttttataataaagttaataaattacatcctctgtcactttggggatattataaccttccccgtcgtctcctcatgaccctggtatttcggtttgccgtgcgtgaaaggcaagtacctgtattttatcatgtgccttatttgcctcttcatagtaatacagaacaaagttataaaatacatgactaaaattggccagaatacaggtatgttgaagcaatcgaagaatgtacaaattacaccaatgagtgtactcttggtcactgaataccaaaacttgaattctggtagtcttcttatgaaaggcctgaactcttcattggctctagtgggtaattcgggaccgccttcatcgccatcaaaatccattgcaggatcgatttttggtgtgagaaatgctataaacagatttaaatgatatatacctaatgcatacgtgactatataccagccctgcttggtaactatgcgcaaaccaaatagtaagaggagaactatgctgccaccccatctagcccttgtgtgaggagtccatgaatccaataagctctggtgaatctgtgatatcctggtacatagttgagaaaacacatttttcttcgaattcgaagttaataattcttcttccatatttacgtaaattctattatcctatttattttccagtaaaaaattattaattgaagattgaaagaaattagagtattaatccatttttgtacacgtcgatcg

SEQ ID NO: 4423 - DNA, 5390 bp, Diabrotica virgifera
  SmartBlast Evalue=0; Info="Pyruvate carboxylase, mitochondrial n=5 Tax=Culicidae RepID=B0W649_CULQU"
ggaataacctagtcagacggttcgcgtagtgtgctgtggtggaagtgtcaattctcgagagtgtgctatatctacgattgttatcgatctttaaaataaccaccactacatgctaaggataccactagaatagaaaacaacacacaagaaccgaaatgttttcaagaaccctcctcttacgatccaacaaaatcaatcggatcgtacgatggaactattcgaccaaagtagaatacagacccattagaagtgttttagttgccaatagaggagagatagccgttagagtatttagagcatgtaacgaattaggaattaagtcagtagctatatattcgaaagaagacagagcccacatccatagactgaaagcagatgagagttatatggtcggtgagggactacctcccgtagaagcctacctgaatataccagaaatcataactatatgcaaggacaatggcatcgacgccgtccatccaggttatgggttcctttcggaacgttcagattttgctcaagcggttctcgatgccggaatcaggttcatcggaccgtcaccgaaggtggtgtaccaaatgggtgataaagtagctgctagggaagctgcgatggcagcaggagtgccaattgtacctggaactgatggaccagtcacaacctcagaggaagcgaaagaattctgtaacaaacacggtctacccgtaattttcaaggctgcctacggaggaggaggtagaggaatgagagttgtgaggaatatgtcagaagtggaagaaagctttaaaagagcttcgtcagaagctaagagtgcgttcggaaatggagctatgtttatcgaaaagttcatcgaaaggcccagacatattgaagtccaacttttaggtgacaaagctggaaacgttgtgcatttgtatgaacgagactgctcagtacaaagaagacatcaaaaagttgttgaaatggcgcccgctcctcatctcagccaagcagtgcgagacaaaatgacagatttagccgttaaattagcccgacatgttggatacgaaaacgccggtaccgttgagttcttatgtgatgaaaagggcaatttctatttcattgaagtcaatgcgagattgcaagtggagcatacggttactgaggaaattactggaattgatttggtgcagtcgcagatcaggattgctgaaggaatgaccttgcccgagttgggaatcaagcaagagagtattaaacctgatggcttcgccatccaatgtcgtgtcacgactgaagatccagccaaaaacttccaacccgacacaggtagaattgaagtattccggtccggagaaggtatgggtatccgtctcgatggagcctcagcctttgcaggagctatcatttcgccatactacgactcgttgttggtgaaagtcatagcccactcgaaagacttagccagttcctgtgccaaaatgaacagagctcttagagagttccgtgtcagaggcgtcaaaacgaacattccatttttattgaacgtgctcgaaaaccagaagttcctaaacggttcggtggatacctatttcatcgacgaaaatccacagttgttcaaattcgcccctacgaagaatcgagcccaaaaactgctgaactaccttggagaagtcttagtaaatggtcctcagacgcctttgggaacgaccttgaagcctgccgaaattaaaccacatgtgcctgttgtgtcgcaagagtacctggtgacgaatcctgaccatgttccaagtattgaaccaccaaaaggattccgtcaaatctacaaagaacagggaccagaagccttcgcgaaagccgttcgaaaccacaaaggagttctgttgatggacaccaccttccgagacgcccatcaatctcttctagcaacccgtgtcagaacccacgatctcctgaagatctcaccgtttgtagctcacaacttcaaccagttgtactcgctggagaactggggaggagccaccttcgacgtagctctaaggtttctacacgagtgtccatgggagcgtcttgaagacatgagaaaaatgattcctaatattcctttccaaatgttgttgagaggagctaatgctgtggggtacactaattacccggataatgttgtttacaaattctgtgatttagcggttcaaactggtatggacgtcttcagagtattcgactccctcaactatctacccaacttaatcgtcggtatggatgctgctggaaaggcaggaggtatcgttgaagctgccatttcctactccggtgacgtcagcaatcctaacaagaagaaatatgacctgaaatattatctcaacatagctgatgaattggtaaaagccggaacgcacgtgttggccattaaggatatggctggtttgttgaaacccaaagcagcaaagatgcttgtgtcagctattagagacaaatatcccgatctgccaattcacatccatacacatgacaccagtggtgcaggagtagctgctatgctcgcatgtgccgaggctggggcagatgttatcgatgttgccgttgattctatgtctggaattacaagtcaacctagtatgggagccatcgttgccagtttacagggttcagcaaatgatacgggcattgagttacccaaagttaccgaatactccgcctattgggaacaaaccagaacgttgtatgctccatttgaatgtactacgacgatgaagagtggaaatgccgatgtctacaataacgaaatacctggtggacagtacaccaacttacagttccaagccttctctctaggtttgggtgatttcttcgaagacgtaaagaaggcttacgccgaagccaacatcttattgggcgacataatcaaagtaacaccatcttccaaagtagtaggagatttggcgcaattcatggtccaaaacaaacttacccctcaagacgttttaaacaaagccgaagaactttcattccccaaatccgtagtagaattcctccaaggacacattggacaaccctacgggggattcccagagcctctcagatctaacgtcctcagagacatgcctcgcattgaaggaagacctggtgagagccttccacctctagattttaaaacgctaggagctgatttgaaagaaactttccctaatgcaaccgatagagatgttatgtctgcagctttatatccacaagtcacaaacgaatacttagcatttaatgagaaatttggaccagtagacaagcttcaaactaggatgttcttggtaggacctaaagtaggagaagaattcgaagtgaccatcgaaagaggaaaaactctaggcattaaaactctagcagtagctgaagacttaacagaaaacggtgagagagaagtattctttgaacttaatggtactctgcgatcagtcttgatcagagacaagtctgcaggtgaagaattacacctccatcctaaagccgagaaaaccaacaaaaaacaagtaggagctcctatgcccggtaccgtaattgatattagaataaaggctggtgacaaagtagagaaaggtacaccattagtaatcctttctgccatgaaaatggaaacagtagtccaaagtcctgtagctggagttgtcaaaacgatagacgctgccatgggaatgaaacttgaagctgaagatttaattattactttagaataggtactactttcaggaacgctattatacagagcctggtcataattttagtaacgttatagttggttctttaaaagaagatactcataaaagactttgtggcactacgtgcctattggagagtgtaatatacgtctttatcaccatattggtactgctagcgtactcaaaaaacttgattttctcaagttatctatgactatcagtgtttggatcttctatcatgcgtttcatcacagaagttgttctcgtgtgatgacacaacttccaagtaggtggtacattttgacgatacatttattcccaagacttattttaagataaaactctgttgcgcggttgacctcacaagtttaaatccaggttgatacccctcatgattttattgggtccatggtgatacacatgtcaattattttgtttctgctagtatagatgtctgtaacattcccctatttattgttgatgatattgtaaacctgaatgttatattgttgtttctactaatattttataaagctgactggaaattttgttacactttactaatactaactagaacactgctagaaataaaataatttcacattcgacagttgtcaaacgtcagatgtcacatatcactgtttgtattggtggaattacggcttttatttacaaggaaagcaccttttaacaattgagaagtggcattggatccgactcggatcaaacagaaacagaagaaagaataaaagaagacgacattgaatatgcgtgccactaatttaagcatcacacgttcttaattttatgataaatatatatttgggaatccccgaactctacaaactattttttataaatacaaaatattaaatatactatatttttaaaaatacaaagtatacacaatggcgttatgaattataatgtggtattttgtagtgttttatgtatgtttatttgttcgtttttatattgtctgcaatttcttcttagtatagacaaacgtgtgtgtattatgttgtatatatcgttaacactttcagacctgtttttgtagatttttaagcatgtcaaaagtcatgtatcaaacgtcaaaagttatatgtcaaacatcaaacgtcaattcaacaaaacttgaaatatgccaaaggatgtattcttaattgtcacacctaacctaatataacctatgaatatagtatagtaaggtgtaaaaccgtcaactaatacttttcggatagtatccagccttgtattactctcattttcattgtgaattcctcttttccttgtagttatgaacatgtactgccataaggttataggttattgataactcttatcaactaagtttattcttgttaatatcatacaggcttgaaagtgttttaaagacaatatgattattcctagggtcattttaagacattttactaaattaactctaatttttatattcataaagacgcaatatgctcgacaaaccatctcgaagaagttgcaactctaacttatgttaataacttccaatgacattacatatacttgtttaggctgtgctgttaaattacttttaaacgttgttgttgttattaaaaaatttgataatgatttattgatatgtaccatttttaaaatgataattttaccatgatcaggtttgtataatttattactctctatatttaatatattttt

SEQ ID NO: 4424 - DNA, 1002 bp, Diabrotica virgifera
tacggcttttatttacaaggaaagcacctcttaacaagtgagaagtggcatcggaacctctcattgacctcttggatcaaacagaagaaagaataaaagaagacattaaatatgcgtgccactaatttaagcatcacacattcttaattttatgataaatacacactattttttataaatacaaaattttaaatatactatatttttaaaaatccaaagtatacacaatggcgttatgaattataatgtggtattgtgtactgttttatgtacgtttatttgttcgtttttatattgtctgcattttgttcttagcatagaagtgtatattatgttgtatatatcgttaacactttcagacctgtttttgtagatttttaagcatgtcaaaagtcatgtatcaaacgtcaaaagttatatgtcaaacgtcaattcaacaaaaattgcatatgtcaaaggatgtattcttaattgtcaaacctaacctaatataacctatgaatagtagtacggtggaaaaccgttaagtaatacttttcggatagtatccagccttgtattactctcattttcattgtgaatttctcttttccttgtagttatgaacatgtactgccataaggttataggttattgataactcttatcaactaagtttattcttgttaatatcatacaggcttgaaagtgttttaaagacaatatgattattcctagggtcattttaagacattttactaaattaactctaatttttatattcataaagacgcaatatgctcgacaaaccatctcgaagaagttgcaactctaacttatgttaataacttccaatgacattacatatacttgtttaggctgtgctgttaaattacttttaaacgttgttgttgttattaaaaaatttgataatgatttattgatatgtaccatttttaaaatgataattttaccatgatcaggtttgtataatttattactctctatatttaatatattttt

SEQ ID NO: 4425 - DNA, 3268 bp, Diabrotica virgifera
  SmartBlast Evalue=4E-62; Info=Reverse transcriptase n=1 Tax= Aedes aegypti RepID=Q4F8Q2_AEDAE
atgtcaatttacagtgtatatcaaataaagtcgatatgatcaatgcttttcttgcggataaaaagttctatgacgtcatatgtttttcagagcactggcaaactgaagaaaatctaaaattaattaacatctccggcttttcactagctaactttttctgtagggttgaaaagaagcaaggtggcgttgcaatttatgtaaaagaaaatcttatgtattcttctcttaatctaaatgaatataacgtagagcaaacttcagagttttgtgcaatttatataccttcaatgagaaccaatgttttaactgtatacagatcaggtaatggtgactgtgacttgttcttggtgaattttgagaatgttatagcattcttacttaacaaagcagacaaactgattatacttggggattttaatataaatttaaattaaatctgactcttcttatgatattcaaaatctgttaatgtcttttggtctagaaataacgataaacgattatactagaatcacatctcagtccagtagttgcatcgataacattatgacaacttttctgaaaatatctacagggtgggcgtatttgaaccttgtttctctgaccatcgagcacaatttatatctattgattctgatcttaaagttgttgacactaatcaatcacttcaacggtctattacttcttctggtttgcagaagcttaaatatgcactagctagtacaaatatggactttttctatgacaccaataacgatcccgatgtcttgatgttctttttaactgaaacttataacaacttaatattaaagttttttccattaaaaaaagtacgacaaactgctaaaataacacccgtgcaatggtttaatgacgaattaaggtcttacagatctaatctttctctcattaaacacattgcagatgtcactaaggatcccgatattttcaaactatataaacaacaaaaatatgaatataatcggcagttacaaaatgctaaaaattcggcttactctggttttattactaactccaataataaacctagagactgctggaaaatattaaacttcgaaagaggcaatacaagatccagttcggtacaaccagatctatctccagacgaaataaatcaattttttattacaatcgcagagaatataattacatcccttccgactattaataacgatatcctcttcagttacagaaattatccttccccgagtaagtccttttgtttccgacccgttgtggaagatgagatctctcaaataattaaatctcttaataattccaattgtaaggacgttcacgaaattaatagcaaaattttaaaagaaacttaccaaatagttttaacacctttcactcatcttattaacttaattttatcaactggagtatttccagaagcactaaagtactcaaaggtactacctatctataaaaaaggtgattcctcgaaagctgacaattacagacccataagcattgtttctacattcgggaaagtgattgaaaaggtgatcaaacaacaattatattcttattttgagtctaaaagttattttagcaactcgcaatatggattcagaagtgctcgttctactacaaaagcggtatataatattgtgagcgaggtgattgaggggcttgaacgtggcaatcgcatagcaatttctctctgcgatttgtcgaaggcttttgactgcgtttcacatgacattttgctccacaaattaaactattatggaatcagaggtatccctcttaagcttatctcttcgtacctatgtggtagacaccaggctgtagtgtctaaaggttatctctccgattttcgacccgtaaaacatggagtcccacaaggttcggtcttgggacctcttttattcattatatatgtcaacgatttgtctcatttcatatctccgtacaaatcagtacaatttgcggatgatacgacatacataatatcaggtaataaaaatgaggatttaaaaatggcttacgaggaagtctctgataaatctagcacatggtttgctgcgaacaaactaaaactcaatactgaaaaaacgcaggacttgattatatctgcaagtggtttacatggcgatccagatgacaaagacactgctaaactattaggaataaccatagacaatcgattgaactggtcggctcatatttcacaagtaaaggcgaagctgtctagttcattgtttcttattcgtcaactagcaagggttgtcaactatgagacattgaaggtgacatatttttctttatttcactcacacctaagctatggattaatcttatggggcaattcaacaaatgctcttcaaattttcaggatgcaaaagaaagctatccggattttagcaggggttagttatctggaacattgccgacctctcttcatcaaattaaaaattatgccgctacctactctgttgatatatcaagttctgactgaaattcacagaaaaaggtcccatttaacaaagcagtctgatgttcacgttcacaatacgcgatactctcactatttacgaacaaatcgctctagattgcgtctttcagataaaaattgtcttaattataactactacaatattttaccaaaagatattaaacagctaagctgtaacagtttcaaaaaagtaataaaaaggtatctgttgaaacattgcttttattgctcggaagaatatatgactcattgcagaacatctactgaaatgcttaccgtgacacaaaatattttttgttaatctatattcttgtttgtgatacatatttataagttgtgttttatatttctgttttatataccttgtgattttgacttgctacaaacaaattttttgtaaagtagttaaataaatctatctatctatctacgtgggttaaaataaaaagtttatatcgaccactgtgaaatgatctaaatagtataaaaatattttgttaaaaaacatgtgtgtgtagtcagtgaggtgagagtaataaaataagtacagaaagtgctatcgatgaacaagtaaaagtaaagcagtcaacgtggaagaaaaataatgactaaaaacatggctaataaaactcgatttttacagattcgattagtctagaaaggtcctcattgtttagcatttgcaagatgtttattttacactcgaatataagttctggaacaatgatatccattgcagtaccagtctttttccagtaatagtagtctttccttaccgttacg

SEQ ID NO: 4426 - DNA, 3111 bp, Diabrotica virgifera
  SmartBlast Evalue=4E-62; Info=Reverse transcriptase n=1 Tax= Aedes aegypti RepID=Q4F8Q2_AEDAE
atgtcaatttacagtgtatatcaaataaagtcgatatgatcaatgcttttcttgcggataaaaagttctatgacgtcatatgtttttcagagcactggcaaactgaagaaaatctaaaattaattaacatctccggcttttcactagctaactttttctgtagggttgaaaagaagcaaggtggcgttgcaatttatgtaaaagaaaatcttatgtattcttctcttaatctaaatgaatataacgtagagcaaacttcagagttttgtgcaatttatataccttcaatgagaaccaatgttttaactgtatacagatcaggtaatggtgactgtgacttgttcttggtgaattttgagaatgttatagcattcttacttaacaaagcagacaaactgattatacttggggattttaatataaatttaaattaaatctgactcttcttatgatattcaaaatctgttaatgtcttttggtctagaaataacgataaacgattatactagaatcacatctcagtccagtagttgcatcgataacattatgacaacttttctgaaaatatctacagggtgggcgtatttgaaccttgtttctctgaccatcgagcacaatttatatctattgattctgatcttaaagttgttgacactaatcaatcacttcaacggtctattacttcttctggtttgcagaagcttaaatatgcactagctagtacaaatatggactttttctatgacaccaataacgatcccgatgtcttgatgttctttttaactgaaacttataacaacttaatattaaagttttttccattaaaaaaagtacgacaaactgctaaaataacacccgtgcaatggtttaatgacgaattaaggtcttacagatctaatctttctctcattaaacacattgcagatgtcactaaggatcccgatattttcaaactatataaacaacaaaaatatgaatataatcggcagttacaaaatgctaaaaattcggcttactctggttttattactaactccaataataaacctagagactgctggaaaatattaaacttcgaaagaggcaatacaagatccagttcggtacaaccagatctatctccagacgaaataaatcaattttttattacaatcgcagagaatataattacatcccttccgactattaataacgatatcctcttcagttacagaaattatccttccccgagtaagtccttttgtttccgacccgttgtggaagatgagatctctcaaataattaaatctcttaataattccaattgtaaggacgttcacgaaattaatagcaaaattttaaaagaaacttaccaaatagttttaacacctttcactcatcttattaacttaattttatcaactggagtatttccagaagcactaaagtactcaaaggtactacctatctataaaaaaggtgattcctcgaaagctgacaattacagacccataagcattgtttctacattcgggaaagtgattgaaaaggtgatcaaacaacaattatattcttattttgagtctaaaagttattttagcaactcgcaatatggattcagaagtgctcgttctactacaaaagcggtatataatattgtgagcgaggtgattgaggggcttgaacgtggcaatcgcatagcaatttctctctgcgatttgtcgaaggcttttgactgcgtttcacatgacattttgctccacaaattaaactattatggaatcagaggtatccctcttaagcttatctcttcgtacctatgtggtagacaccaggctgtagtgtctaaaggttatctctccgattttcgacccgtaaaacatggagtcccacaaggttcggtcttgggacctcttttattcattatatatgtcaacgatttgtctcatttcatatctccgtacaaatcagtacaatttgcggatgatacgacatacataatatcaggtaataaaaatgaggatttaaaaatggcttacgaggaagtctctgataaatctagcacatggtttgctgcgaacaaactaaaactcaatactgaaaaaacgcaggacttgattatatctgcaagtggtttacatggcgatccagatgacaaagacactgctaaactattaggaataaccatagacaatcgattgaactggtcggctcatatttcacaagtaaaggcgaagctgtctagttcattgtttcttattcgtcaactagcaagggttgtcaactatgagacattgaaggtgacatatttttctttatttcactcacacctaagctatggattaatcttatggggcaattcaacaaatgctcttcaaattttcaggatgcaaaagaaagctatccggattttagcaggggttagttatctggaacattgccgacctctcttcatcaaattaaaaattatgccgctacctactctgttgatatatcaagttctgactgaaattcacagaaaaaggtcccatttaacaaagcagtctgatgttcacgttcacaatacgcgatactctcactatttacgaacaaatcgctctagattgcgtctttcagataaaaattgtcttaattataactactacaatattttaccaaaagatattaaacagctaagctgtaacagtttcaaaaaagtaataaaaaggtatctgttgaaacattgcttttattgctcggaagaatatatgactcattgcagaacatctactgaaatgcttaccgtgacacaaaatattttttgttaatctatattcttgtttgtgatacatatttataagttgtgttttatatttctgttttatataccttgtgattttatataccttgtaatttttatattccttattttgactttgtaattttgacttgctacaaacaattttttttgtaaagtagttaaataaatctatctatctccaataacggacttaacataaatgcaacaaagacaaagttaggttagtaaacaagacgtcggccctatgcaactaattttcagtgatgaattaataacaaaagtttgcattttaaatgcctaggatgttggataaacgagacactaaatccgga

SEQ ID NO: 4427 - DNA, 3180 bp, Diabrotica virgifera
ctttgataatagcaaatattttgtttgtatttgcttattaaaatttgttacagtttaaataatataataattaagataccgaatacgcaagatgacaattattgttattagctcttgtaatcgagatagctaacaatattatcaaataataacctttctaatcagcgttttactttttctcgtcggaaaaaattacaagctgtaggtactgttttctgaatctttagtttgtttttaacgtaaaagttattaccgagtgttttcaaaactctacaacatggatgtgtttatgccaattgctttgtgtgttatttttattattttgtttactatttgtggttggtgctgcaaaagaaaacgtgagggtactgtttatggatatggtccttcagtcacagtcacaacgacaacgcagcatgctcaatcgccacaggtagtcccaccttatcccatagatacacgtcatccggtaccagctagtaatattacgggatatggaaatcaagccccatatcaacaatacccattccaccaacaggtaatgtggcatcacccatggcaggagcaactccatacccgccacagccttaccaacaagccgcacacgactacagcgccaacccacctccatacgacgtggcagtatctcaaccacctcttcaaccaccccccaattcaaaggagggctacgtcaagcagtccccttacaacccagggtataattaagttcttctcatccaaccgttgactgttttagttggttcttcttacatttcgttacttaaagaagttggcagaactttttttgtttataattaaagtgtgtttaatgttattgaaatagaagaggtgttaacgcgttgacggacagtgcgtcaaatgtataagcaagtgttgtgacactatatgaattttacaaagtagaataaggaaattgctgaatttttgcttttagcacttatagtttatggaaacaataagttttttaacattttttgtaaacacgtggacaacaaccatggatgtcgtgtcattcatatgcatctctagatgtaatatgacaaaaatctaccgattttttgtcacaactcgtattttaaaaatgtcgtctatagacgttgtgtcacattacatcagtggaaattagacgtctatagacgttctgtccgtcaacgtgttaagtataagtgttaattctaaaagtgataaacgaggacggtgattgaatgactgtgaatagaaaatttgtgaataaggagacagtgtatgcctttacggagatatgcacggtatccttaatactgtaaggaataaatttatattaaagtattgtttttcaatggttccttcttcaatatctcttaatccgtttaattcaagaagtcatggactggactcattttaataattgttttggggtttttgatcaagtactaacatttaagaaatcagccgtatatacagtgtaaatcgttaaaaatgtagtttaatctcaacaaacttttatgtttaacgtttaggaaaatttcttgtcaaatgttttcggatttctaatatcgattttttatcattcaatttatttcagcaaaattttaactcgttttttctgtcgcattgcaaactctcaattattttttttagcataacaatatgtatgtatacaagtgaataattttcatttatatttataccctttgcaacttttttgtgaataattatcatagttattggatgttaatatggatagaaaataatcttctttatgatgtcaacttataatttaaaagtattattatcaacaataatttagacagtgaacaatcaacaaaaatagctgtagtccattattagcgcaagtactggaattatgtagctgcacatagaaccttggaaccataggcgtatataacctgcagagctttacagaccaataaaacaaaatatatcaatcaatcatcagtaaaacctgaaagaaagtaatcccactctaatataatgaacataagggttcacattttgactatcaatttaaaaaacatgtggtatgtttttcttagttgagtatttgcaaaaacgccatgtacaaaacggtatagaatcatttaaattacattttgaaagttgtaaaaattaaaattaaaacgacataatgtcgatgacttaagacttcgccgaaagggaacagggggtagctcaagataataataagaattgtattactttcactgggaaaataaatagatgcatgagtgcagtgacaaaaaataagagatattcatatttcagtaacattagacaattatttataatgatctaaatgttgatattttcaagattagaaacgttgttctaacatgtacagcccattagatgtataaatgacttcaattatattttataaactccaaggaactataatgtcctacaaatatacacgtttcgaatcttgaaaacttaatttaaccgtataaataggttttgatactcgtttctattgatgtcaatatacataatagatagtcttgcaacaatttgtcgatcagttacgatgcgtattgtttttattttaaagagattatgtgataagggaacttttatgcagtattatctgataggatgagactttgtaaatatgtactactgtttatataaaatataaccataaataaatgtaatcgcaaatgagtaatgctacgacattaaaagataaaaattataatcgtatacaactactaacttaatattttcttaaacaagtgcttcaccaacgttaccccatgatgatataagttaatacgagccctaaatgttgggacacgaaaatttgaaaacgttcatcttcacaactgttcaatcacaaattaatcccttaatttgtaatgtcacattaatcttaacttcctaatattttatagtttcaccatgtataattgtgagacatatcgattaatagtttaatcacttcagaacagaaacttccggcaagttgaatgaattgccaaatattgttgtaatagtttctcgtttggattatgtttgtcacctttcaaagtatgtacaaggtttttgttgctatgctggagatattagcctttatgtcgagatgtgctttattggtgtattttttttttatttatgctgttcgaaggaccagtggacaattcgatgtaatataagttt

SEQ ID NO: 4428 - DNA, 3153 bp, Diabrotica virgifera
gctgaaggttggctgcaactttgatgggcgattacatttgatatatatttctcgctgcttctcgtactagtgactaatattaatcacaaaaaccacattattgtcgtcgtttagtgtcggaaaaactttttaaaatcaagtcattagtaaatggagtgtatggtgatgtgttcttccttaatacagtgtgttcgctcagtttttagagattagctaaaatagaactatgagtcatcattcaatacctgtctattttttcgtggttgtagctattatagtgactgttggtttattaattgttggatgtgccatctggatgtgttgttgtgccgccaataagagacgtcgttttaatggtccttcagtcacagtcacaacgacaacgcagcatgctcaatcgccacaggtagtcccaccttatcccatagatacacgtcatccggtaccagctagtaatattacgggatatggaaatcaagccccatatcaacaatacccattccaccaacaggtaatgtggcatcacccatggcaggagcaactccatacccgccacagccttaccaacaagccgcacacgactacagcgccaacccacctccatacgacgtggcagtatctcaaccacctcttcaaccaccccccaattcaaaggagggctacgtcaagcagtccccttacaacccagggtataattaagttcttctcatccaaccgttgactgttttagttggttcttcttacatttcgttacttaaagaagttggcagaactttttttgtttataattaaagtgtgtttaatgttattgaaatagaagaggtgttaacgcgttgacggacagtgcgtcaaatgtataagcaagtgttgtgacactatatgaattttacaaagtagaataaggaaattgctgaatttttgcttttagcacttatagtttatggaaacaataagttttttaacattttttgtaaacacgtggacaacaaccatggatgtcgtgtcattcatatgcatctctagatgtaatatgacaaaaatctaccgattttttgtcacaactcgtattttaaaaatgtcgtctatagacgttgtgtcacattacatcagtggaaattagacgtctatagacgttctgtccgtcaacgtgttaagtataagtgttaattctaaaagtgataaacgaggacggtgattgaatgactgtgaatagaaaatttgtgaataaggagacagtgtatgcctttacggagatatgcacggtatccttaatactgtaaggaataaatttatattaaagtattgtttttcaatggttccttcttcaatatctcttaatccgtttaattcaagaagtcatggactggactcattttaataattgttttggggtttttgatcaagtactaacatttaagaaatcagccgtatatacagtgtaaatcgttaaaaatgtagtttaatctcaacaaacttttatgtttaacgtttaggaaaatttcttgtcaaatgttttcggatttctaatatcgattttttatcattcaatttatttcagcaaaattttaactcgttttttctgtcgcattgcaaactctcaattattttttttagcataacaatatgtatgtatacaagtgaataattttcatttatatttataccctttgcaacttttttgtgaataattatcatagttattggatgttaatatggatagaaaataatcttctttatgatgtcaacttataatttaaaagtattattatcaacaataatttagacagtgaacaatcaacaaaaatagctgtagtccattattagcgcaagtactggaattatgtagctgcacatagaaccttggaaccataggcgtatataacctgcagagctttacagaccaataaaacaaaatatatcaatcaatcatcagtaaaacctgaaagaaagtaatcccactctaatataatgaacataagggttcacattttgactatcaatttaaaaaacatgtggtatgtttttcttagttgagtatttgcaaaaacgccatgtacaaaacggtatagaatcatttaaattacattttgaaagttgtaaaaattaaaattaaaacgacataatgtcgatgacttaagacttcgccgaaagggaacagggggtagctcaagataataataagaattgtattactttcactgggaaaataaatagatgcatgagtgcagtgacaaaaaataagagatattcatatttcagtaacattagacaattatttataatgatctaaatgttgatattttcaagattagaaacgttgttctaacatgtacagcccattagatgtataaatgacttcaattatattttataaactccaaggaactataatgtcctacaaatatacacgtttcgaatcttgaaaacttaatttaaccgtataaataggttttgatactcgtttctattgatgtcaatatacataatagatagtcttgcaacaatttgtcgatcagttacgatgcgtattgtttttattttaaagagattatgtgataagggaacttttatgcagtattatctgataggatgagactttgtaaatatgtactactgtttatataaaatataaccataaataaatgtaatcgcaaatgagtaatgctacgacattaaaagataaaaattataatcgtatacaactactaacttaatattttcttaaacaagtgcttcaccaacgttaccccatgatgatataagttaatacgagccctaaatgttgggacacgaaaatttgaaaacgttcatcttcacaactgttcaatcacaaattaatcccttaatttgtaatgtcacattaatcttaacttcctaatattttatagtttcaccatgtataattgtgagacatatcgattaatagtttaatcacttcagaacagaaacttccggcaagttgaatgaattgccaaatattgttgtaatagtttctcgtttggattatgtttgtcacctttcaaagtatgtacaaggtttttgttgctatgctggagatattagcctttatgtcgagatgtgctttattggtgtattttttttttatttatgctgttcgaaggaccagtggacaattcgatgtaatataagttt

SEQ ID NO: 4429 - DNA, 3570 bp, Diabrotica virgifera
  SmartBlast Evalue=0; Info=Sel1l protein n=1 Tax=Culex quinquefasciatus RepID=B0W9L0_CULQU
gagatgagttggagtgttttgagtggttacttttgaataaaaagttaaagtatatccatataaatttgtttttcgaacttaagaaagttacaatgaataaaatgcagtacaaatttctgctgttgctatttttaatgctaatttgttgtgagttttccgatgaaaccttgcaaggcccttccgaggtatcggaaaaaaagagtaaagacagtaaaagtgaaaatgagactccaaagaaacgggaatttattgcctccattgaagaacgtgacggggcaactgcaattcgaatagaaccagctcctgatcttactaatgaacgagaaagacaaaaaggtgataacattgatagtgaaatatcagaagcagttgacttgttcatgttagatcaagctaaggttatacaaaaaatggttcaacacctggatattgtcaatagcctacaacaaaatacagcttttgatgaaccgattgaagtaccaccaattcctacaagttcagaagaagacattttaacggatgaagaacttgaagctaaaaaactatttcaaactgctcaagagttgctttacaaaaccaaaccagacaaagaagagatttttcaaatgttcatggaagcatctaataaaggcaatcctgaggcgaaagggatgttagcctgggccaaactctttggagtccctatggaacaggatatatatgtggctaaagaaatgttttctgaattggcagcaatgggtaaagcagatggacatgcaggcttagggtttctctatgctactggtttagcagtgaatgtaagtcagccaaaagctttaattcattacacttttggtgctataggtggtaatcactttgctcaaatggctctggcgtatagatattggtcaggtattacagtacccgctagttgtgagaaggcattggattattatcgccaggtagcagacaaagttagtcaaggcgtatcatttggtggcggttctgcaatacaacgaataagacttttcgatgaattagaaaatggttttgcttctggaattcttgacaacgatcttattgaatattaccagcttttggcagagaaaggagatgttcaggcacaggttggtttgggacagcttcattaccagggaggtagaggtgtagagctggattatcaaaaagcccttcactactttactcaagcggctaatgctggcaatgctttggctatggcatatttaggaaaaatatatttagatggtagtgacgaaattcctgctaataacgatactgctttcaaatactttaaaaaagcttcggatttgaataatccagtcggattaagtggattaggcttaatgtatctgtatggaaaaggcgttgaaaaggattatacgaaggcacatcaatattttttgcaagctgctgaacaaggttgggtagatggacagttgcaactggggaatatgtattttggtggattaggcgtgaaacaagattataaagcagcaaacaaatatttttcgttggcttcacaatcgggtcatgttcttgcttattacaatctaggacagatgcacgcacaaggaacaggcatgttaagatcatgtgcaactgctgtcgagttgtttaaaaatgttgcagaaagaggtagatggggagagaccttaatgcaggctcacacagattacagaaatggacgttataatgaggcatttgttcaatatgccttcctcggtgaattgggctacgaagtagctcaaagtaatgcagcatttttgttagatagaaatgaaattcctatgttgtcaactcaagaagctctagttagagcactgttgtattggagcagagccgcatcacagggatattctgctgcgcaagttaaacttggagattactactactacggcatgggaacgtcaatagattatgaaacggcagctatacattaccgtttagcttcggatcaacaacacaatgctcaggcaactttcaatttgggctatatgcatgaacaaggtttgggaatggtacgggatatgcatttggccaaacgttattacgatagagcagcagagctcagtccggatgccaaagttccagttgcactagctctaatcaagcttaacgtgctgtttagtttcgaaagtattgaagagggtccattacatcatttgctagacttcaacgcaacagttggatccaactgggacttatatttaattacaaccttgactgtcatgttagcagcaattgtgtattttagaaggcctcaggtggctgtctaaagatccaaccgaaagaagccatgtaggtcgtgatatttttatatttattttgtaaatattagaatgaataagtaattcaaatatcgtgtatatattgcttatagatcattttctaaaaatgttgaatatcattatcagtaaaacctttacaaataaatatttagaataatattactttatgagtccatttattatatacagtaactaaatatactgaatacgttaagaacataagtgtacattgaaacaatcaaaatccacataatagggaaaatatagtaaaaggaaatggaggaaattaaatcaattaaaattagacaaaaacgtacaaacatggtgaacagagtatgcacaaataagtacacaagaaagtactccaaatacgtttaacacgtttggtgcccatcttgaacaagtgccacttagcggtaccacgtacttaatccttcatttagtagcacagtactactgacgccacttaccgatgcgtcatcggtacctttgataaaaccttcgtgacgctatttgtgcgtcatgggcaccgaacgtcataattaaaattgtgaacgggagagggatttttcgtcgattgtcatttgcaccagtttgacaaatgacattgtttttaatgattatgatggaaattttgtttcgttttaggaaatgatctcaaggcggtgactgttgtgatttcattcgtacattactttaaaatccattaaaaacctatcacatcaagataagttattttagatgcaacagataccttcaatttggtttcattgatattggttttaaatccaaatgtagcctataataccgattttagtaatacggttttgtaaggatgtctcttagctctaaataaatactatatagtcgataaggcttttgacgtttcattataagtaagagtagcttgatctgcaattgatttttttatatgcatttatgcaaactgtaagtttatattcgtcggtatgccgaagtattttctttcctgtacggaaaagcctccattacaatttttctttctctctgttcctccaaaaatttcaagtatacataaatggtatagcatatccaatgtatacataaatggtatagccgatgtagccaatgataatgatctttttggcttgtaaatgattaatttggtgtctatgtctctaagataattaattttttgttatagcgtcatattttatcaaatactactttaaaattcagactgttttgtttacatgtgtaaatacttaacttttgattgttattttattgtatgtgaaataaa

SEQ ID NO: 4430 - DNA, 2701 bp, Diabrotica virgifera
  SmartBlast Evalue=0; Info=Sel1l protein n=1 Tax=Culex quinquefasciatus RepID=B0W9L0_CULQU
gagatgagttggagtgttttgagtggttacttttgaataaaaagttaaagtatatccatataaatttgtttttcgaacttaagaaagttacaatgaataaaatgcagtacaaatttctgctgttgctatttttaatgctaatttgttgtgagttttccgatgaaaccttgcaaggcccttccgaggtatcggaaaaaaagagtaaagacagtaaaagtgaaaatgagactccaaagaaacgggaatttattgcctccattgaagaacgtgacggggcaactgcaattcgaatagaaccagctcctgatcttactaatgaacgagaaagacaaaaaggtgataacattgatagtgaaatatcagaagcagttgacttgttcatgttagatcaagctaaggttatacaaaaaatggttcaacacctggatattgtcaatagcctacaacaaaatacagcttttgatgaaccgattgaagtaccaccaattcctacaagttcagaagaagacattttaacggatgaagaacttgaagctaaaaaactatttcaaactgctcaagagttgctttacaaaaccaaaccagacaaagaagagatttttcaaatgttcatggaagcatctaataaaggcaatcctgaggcgaaagggatgttagcctgggccaaactctttggagtccctatggaacaggatatatatgtggctaaagaaatgttttctgaattggcagcaatgggtaaagcagatggacatgcaggcttagggtttctctatgctactggtttagcagtgaatgtaagtcagccaaaagctttaattcattacacttttggtgctataggtggtaatcactttgctcaaatggctctggcgtatagatattggtcaggtattacagtacccgctagttgtgagaaggcattggattattatcgccaggtagcagacaaagttagtcaaggcgtatcatttggtggcggttctgcaatacaacgaataagacttttcgatgaattagaaaatggttttgcttctggaattcttgacaacgatcttattgaatattaccagcttttggcagagaaaggagatgttcaggcacaggttggtttgggacagcttcattaccagggaggtagaggtgtagagctggattatcaaaaagcccttcactactttactcaagcggctaatgctggcaatgctttggctatggcatatttaggaaaaatatatttagatggtagtgacgaaattcctgctaataacgatactgctttcaaatactttaaaaaagcttcggatttgaataatccagtcggattaagtggattaggcttaatgtatctgtatggaaaaggcgttgaaaaggattatacgaaggcacatcaatattttttgcaagctgctgaacaaggttgggtagatggacagttgcaactggggaatatgtattttggtggattaggcgtgaaacaagattataaagcagcaaacaaatatttttcgttggcttcacaatcgggtcatgttcttgcttattacaatctaggacagatgcacgcacaaggaacaggcatgttaagatcatgtgcaactgctgtcgagttgtttaaaaatgttgcagaaagaggtagatggggagagaccttaatgcaggctcacacagattacagaaatggacgttataatgaggcatttgttcaatatgccttcctcggtgaattgggctacgaagtagctcaaagtaatgcagcatttttgttagatagaaatgaaattcctatgttgtcaactcaagaagctctagttagagcactgttgtattggagcagagccgcatcacagggatattctgctgcgcaagttaaacttggagattactactactacggcatgggaacgtcaatagattatgaaacggcagctatacattaccgtttagcttcggatcaacaacacaatgctcaggcaactttcaatttgggctatatgcatgaacaaggtttgggaatggtacgggatatgcatttggccaaacgttattacgatagagcagcagagctcagtccggatgccaaagttccagttgcactagctctaatcaagcttaacgtgctgtttagtttcgaaagtattgaagagggtccattacatcatttgctagacttcaacgcaacagttggatccaactgggacttatatttaattacaaccttgactgtcatgttagcagcaattgtgtattttagaaggcctcaggtggctgtctaaagatccaaccgaaagaagccatgtaggtcgtgatatttttatatttattttgtaaatattagaatgaataagtaattcaaatatcgtgtatatattgcttatagatcattttctaaaaattttgaatatcattatcagtaaaacctttattgtccttttcatgatcatttttcagtgcgtaacaaatgataggaaaaagggtaagtccgtgataatacacatttatgacatttattctaacatgacattttagttaaatctgacagttgtcacattttattttcaatttggaataaaaccaaatcaattgtgtctattgcatttataaatggtattttctttgatttgtatagtcttataaattatacagattatatttgtaatattatgatctaattaaaaaaaattacttttttattatggcg

SEQ ID NO: 4431 - DNA, 3448 bp, Diabrotica virgifera
  SmartBlast Evalue=4E-49; Info="Lingerer, putative n=1 Tax= Pediculus humanus corporis RepID=E0VHH8_PEDHC"
gccagagtggattgtaaaatcagttagcttgtaaatagtacctctgtacatattgtacaaagaaaatgagttcgggaaacagagccacctccaagggtggcaaagtgaagagtgaaaaatctcaaaagtcagagaaatcagaaaataaaggaaaaggcggcgataaacagcagaacagagattccaattccaaaaatgaggaccccagcattaaagataaagtaaaacaacttatagaaatgtcgcaaagatctgaagaagaagtttgtttggctcttcacgaatgtgattatgatatgaaccaggctacaaacatgttgtttgaagaaatgaccactggcgagtgggaaactagagttaagaagaaaaagaacagacaagcctcagccagcaaacaagacaaggccgatgaaaatgccccagttgaagaatggaatgatgcgctgccaccattatctaatgccgcaggcggagacaaagataaaccacggggtggcagtcgcggcggcagacagaataacaggggctggcgaggccgtgaacgcgaacgtcaagaaaacgatcgtaatgctgaggaccgtccccgaggcgatagagatagaaggggtcgaccaggaggcggtccaagaggtggtggaagtggtcgaggaggaagaggaggtggcagaaccggcgggcgatatttacccaggggcaacagaaacaacaacgcctataagcctattgacacgtgggatagttcgaatacttgggataataatactgtcgctgttacaaatcacgtagaagataattgggacgattttccaggcaccgatgaatggtcaacagaggaataccaaggaagtctggcagatactaaagtatttactcctagcattccttcttcagcaatggatcctgtgattgagcaaagtaatgcaatgagtgcattacaagatccaacatttgttgcagatcaactggtacagcatacccctcagaggccctcacaaagtcctgtgccgcctatgatgggtagtcttacagcagctcaaactcaatatttttcacagctgcagcagaacaatgatagcctcgccaaatcgtatcagactcaaccgtatcaaagtcaaacctatgaaaaacctactacaaaccaatatgcaactaacacaagtccacagtacaacagtgcatcaactaatgcatatgggtcgagtgtttcttctcaatcttacggtactggaactcagcagtatggtacccaaacgaactcaagccagtatggtacccaaacgaactcaagccagtatggtacccaaaccaactcgagccaatatggtacccaaaccaactcgagccaatatggtacagacaatacataccagagtaatgtttatgttgcaggtcaagaaacagcgtccactcaacaaccaacccggacaaaaccacagagggctcgggtaccaccaccttcaaagattccagctagtgcggtagaaatgccaggtgatctgaattcgagtataggctacttggacgtccagtttggtgctatggatctgatagacgcgaattcttcgtttgacggcggcatagaaaccaaatatggtactacaactcagtctactaatagcattgaagcagcgtcagtagtgactccttcaggtggaagcctagatctcagttcatcgtctgtgaatcaaaactctagtttggatgcctattctcccaaaactaatacacagaacagtattagctctgctttgtcacagagcctgtcaaattcagattccattccccaaactaccgatcatctgacgaacacgtacagttctgctccgaggacgacgacgcagggcagcactccagcatcatcttcggtaacggcagcaggcctggatctaggagggagcaagcaacctcctgacacgcattcgtactcacagtcgtcaacttacagttcctaccagcctaaaacaaatacttataattcatcaacatatagtgggacgacatctactgtgagttcttatgtgacgaatcaagctaatagttacgcgaacagtcagactggatcatacaatgctgctagtgggaacacttatccaagtacctactcttctaatagttcgtatcaatccagtacgaattcgacagcatatccatcgattagtcaggcgaattcttactcttcgaataccccatcctatccacagaatactagtcaatctgtttatggtgctaacacaggtttgaataacagttctagttatggtaatacgacgacaaatcagtataatagctacagttccacgaacaaaataagcaaagatagcagcgtctatgaaaatagttcgagtacatcaagtagcagccagacgacttctacgagtagcgtaacgactacgacaccattgtcattgtctcagtccggggttactactagtaaaacgtcgacagctttagtgaaaaattccaacagtattgtgtcaaacatgccacccaacgtaacgcctgtcatgagtatgccgtacatagggcaggtgccgtatttccaacagcccatctattcttttgaagacatgcagatgctgcagcagaggcttccacatatgttacctggtgacgtcgatttggtaccatcgaatgtgacgaacctatgtatttatcctacacagacgacgacgccctactatgatatgagttatcagacgccgacgacgatgccggccgtccgggacgccgcggcgctaggcaacgtcgggtattcgctgtcggatgggaggtttgcgaggaccgacaacaacgcgtcgcccgtgccgaccaccctctcccagcagacgagcactttgacgcagggacatcaaggccagccgatactgaccggtaccgctcctccgccttacttctatgcgacggcgttcaacaccatcgctccaaactaccagttcggtatgtacacgcaactacccgcaacaaacgctcatggttccagtaacagtacccaatatcccaaacctgcgacgtacagcaactatggcaactacgataccttaggtcagtcacaagactacactaaagccggttatgtaagcaacacgcaggggcagaaaggtagcgcggcgaacgcctcttccacgggatctacagctactgatctctctgcgatgtacgggaaatctcacaccgctttaggaaaagttaattcatacgaaaacagggtttccattcggggacgcctccccgttcacgggtggcattcacggtagtcaaaacgcggggttggcgccaggtgggacgggctacgctccaccagtgtacatacctaccctgcctccacatcagcagcacctcatgcagcagcctcttcatcagatggatgtaaggcaccagaatcgacgcatggattcaggtaccactgcgggtcaacgttcacaagcgacaaaccaagctaagaccggtc

SEQ ID NO: 4432 - DNA, 2745 bp, Diabrotica virgifera
  SmartBlast Evalue=1E-25; Info=Protein lingerer n=5 Tax=Aedes aegypti RepID=LIG_AEDAE
gccagagtggattgtaaaatcagttagcttgtaaatagtacctctgtacatattgtacaaagaaaatgagttcgggaaacagagccacctccaagggtggcaaagtgaagagtgaaaaatctcaaaagtcagagaaatcagaaaataaaggaaaaggcggcgataaacagcagaacagagattccaattccaaaaatgaggaccccagcattaaagataaagtaaaacaacttatagaaatgtcgcaaagatctgaagaagaagtttgtttggctcttcacgaatgtgattatgatatgaaccaggctacaaacatgttgtttgaagaaatgaccactggcgagtgggaaactagagttaagaagaaaaagaacagacaagcctcagccagcaaacaagacaaggccgatgaaaatgccccagttgaagaatggaatgatgcgctgccaccattatctaatgccgcaggcggagacaaagataaaccacggggtggcagtcgcggcggcagacagaataacaggggctggcgaggccgtgaacgcgaacgtcaagaaaacgatcgtaatgctgaggaccgtccccgaggcgatagagatagaaggggtcgaccaggaggcggtccaagaggtggtggaagtggtcgaggaggaagaggaggtggcagaaccggcgggcgatatttacccaggggcaacagaaacaacaacgcctataagcctattgacacgtgggatagttcgaatacttgggataataatactgtcgctgttacaaatcacgtagaagataattgggacgattttccaggcaccgatgaatggtcaacagaggaataccaaggaagtctggcagatactaaagtatttactcctagcattccttcttcagcaatggatcctgtgattgagcaaagtaatgcaatgagtgcattacaagatccaacatttgttgcagatcaactggtacagcatacccctcagaggccctcacaaagtcctgtgccgcctatgatgggtagtcttacagcagctcaaactcaatatttttcacagctgcagcagaacaatgatagcctcgccaaatcgtatcagactcaaccgtatcaaagtcaaacctatgaaaaacctactacaaaccaatatgcaactaacacaagtccacagtacaacagtgcatcaactaatgcatatgggtcgagtgtttcttctcaatcttacggtactggaactcagcagtatggtacccaaacgaactcaagccagtatggtacccaaacgaactcaagccagtatggtacccaaaccaactcgagccaatatggtacccaaaccaactcgagccaatatggtacagacaatacataccagagtaatgtttatgttgcaggtcaagaaacagcgtccactcaacaaccaacccggacaaaaccacagagggctcgggtaccaccaccttcaaagattccagctagtgcggtagaaatgccaggtgatctgaattcgagtataggctacttggacgtccagtttggtgctatggatctgatagacgcgaattcttcgtttgacggcggcatagaaaccaaatatggtactacaactcagtctactaatagcattgaagcagcgtcagtagtgactccttcaggtggaagcctagatctcagttcatcgtctgtgaatcaaaactctagtttggatgcctattctcccaaaactaatacacagaacagtattagctctgctttgtcacagagcctgtcaaattcagattccattccccaaactaccgatcatctgacgaacacgtacagttctgctccgaggacgacgacgcagggcagcactccagcatcatcttcggtaacggcagcaggcctggatctaggagggagcaagcaacctcctgacacgcattcgtactcacagtcgtcaacttacagttcctaccagcctaaaacaaatacttataattcatcaacatatagtgggacgacatctactgtgagttcttatgtgacgaatcaagctaatagttacgcgaacagtcagactggatcatacaatgctgctagtgggaacacttatccaagtacctactcttctaatagttcgtatcaatccagtacgaattcgacagcatatccatcgattagtcaggcgaattcttactcttcgaataccccatcctatccacagaatactagtcaatctgtttatggtgctaacacaggtttgaataacagttctagttatggtaatacgacgacaaatcagtataatagctacagttccacgaacaaaataagcaaagatagcagcgtctatgaaaatagttcgagtacatcaagtagcagccagacgacttctacgagtagcgtaacgactacgacaccattgtcattgtctcagtccggggttactactagtaaaacgtcgacagctttagtgaaaaattccaacagtattgtgtcaaacatgccacccaacgtaacgcctgtcatgagtatgccgtacatagggcaggtgccgtatttccaacagcccatctattcttttgaagacatgcagatgctgcagcagaggcttccacatatgacgacgacgccctactatgatatgagttatcagacgccgacgacgatgccggccgtccgggacgccgcggcgctaggcaacgtcgggtattcgctgtcggatgggaggtttgcgaggaccgacaacaacgcgtcgcccgtgccga

SEQ ID NO: 4433 - DNA, 3133 bp, Diabrotica virgifera
  SmartBlast Evalue=4E-40; Info=Insulin-like growth factor- binding protein complex acid labile chain n=1 Tax=Harpegnathos saltator RepID=E2BXU3_9HYME
ttctccgataaaaaatttattgaaaacattttgattacaactagaaattagatagtttacagatattaagaagagctgaatgctgctgatattaggtacatatggcaaacaatacctgcttaatctgtggcttaacaatatttttctatactataagcgcaataacatttatagacagttaaattacgtagaactaagacatgacaatatagttctgcaatcaaactatgagagtcattaatattcagctcagcgggacaccattattggaaatgtgtacttaaataatcaagggatcattccataaaacaggtagatctcttgttgataaagtttcacaccttgaagaatatcaccccgctgagctgaatatgaatgactcttagttcgattgcaccggtataccagtgcatgcttctaatttgaaaattaagtagattttaaatcaatagtctaaattcagtacatgaaaatggatctttacctagtgcaattgttaggaaacggttaaagggtatggtaaaaatcaattttcaaattgtcttattttaaaaatacacaaaacatttttcgacagtacctatctatggcggagtgcacaaaatgcgaactctccagtccccaggacgattaaagcttaaaaatggttttggttcacagaagtaatggaaatttggtccctaggttatctgccgtactgcagtcagccgaatactttatcgctaatcttatttcataagagacaataatttgattatatacatattaaacaaaatagtcttatttatctatgaaccacagaattttaagtaactttaagcagtatgcactactggggttgtattaaattcatagcgactcaatttaggagtcttgggacccgagaggtcttcggaaagaggtctgtatacagacccactgtgtttcttttgacctggagttgtattccaaagaggaattttcagccttggtaagttagctcgttgcatgtcaaagcggttgtttctgcgcagaatgcatagagttaaggtaacagctatggtcagtactactaaagcacttaatacaaatactgaagttactgacaagatgtaagtggctctagcaagagatgtgtcttggaacttagtagtcgtttcttcgtcgtagtattcatcgtcgtattcatcagaatcgctatcgtcgtcgtcatcgtcttcctcataatcttctttctcaattttgtcaatagttttatacgtagttttgttatctatgcgagttagttcaggtaaagcagactcagtaatatgttcaggacatttacctttatgaacatctttccattcaatggttacaaaatcatcaatgtcttccctaaaagccttatcagctccggtatatatattcttgctataatcgataggagtaatgccttgaagatctaaaaagtataataacatacataacttctcatcaaacactaaaggattgtcttccaattctattgcctctaatttgggcatgatgttgaaatcatcgttggttagagttcctaagaagtttccacttagaagcagtttatgcaaagatttaacaggtttgttgtagttggaccacaattttgttagagtagcatttctggcgtcaatatctctaagaagatgatttgcggcaaacacttctggattaagaaccagtaaaggattaccagcaatgtttaaaatttctaaattgccgttatgtacaaaagctgctggcgacaagtatgaaatttcattataagaaatatctaattgtttcaagctggtaattttgtcgaagacattatccacattcattaacttattgtgtgacagttccagattaatcaaaccatccatattctggaagacgttggctgaaagaattcgtaagttacaagatttacaagagaacgtgtaagtagagaaactttcatggttttggcggtagaaagatggtaaggtgtcgaaattgtttccatctaagataactttgatgagtttaccgtttccagagaaaatattatcttgaagtttagtcaacttattgtaagaaaggtcaattactgaaagatcctgcatgtgggacaatgctttactgaatatgtctgtaagattgttgtgacttaggtttaattcattaagagaagttaatttttttgttgattcttcgtcaaatgtctctaattggcaattcttaagtgacaatatctctaaactgtcggatgtattaatgttaaaatgtttaagggggttgttgtcgaggttaagggtgattaattcttggttattaataaacgcagtaggtgggagtttgtggatgttattgtcggaaagatgaagctctcctagatcaaacagttcagcgaaagcttcaacttcaatgtttttaatgtaatttcccgataaatttaaaaacgttagattgatcagtccatttagattgggaatttcttctaatttgcattcaccaaaatgcacctcctccaactttgtagagaagaggtcaggactgtcttcaaaggcacatttggagaactttaggcgcgtcacattctcgaaggctttcacatctatagtcgcaattctcgtgttggtaatgatgacatcgtcaagattcttgaacccggcgaatgcactaacttggatctggttgatgatcaaattgtcaagggtgatgacgttcgttgaggtcttgctaatgtacttaaaagtggcgtcgttaagtactagaggcctatcgcatttggttacctgcagcctattggtcagcattccaaagctgcacgtgcagtggtcaatgcaagtcttcgaattggttggaagcgacggtggcgccgacggtgtggatggtgtcgacggcggtgacgttaataccgccgcggcctggacggccacaagcattagaaccaatttcatgtaggtatcttaatttacaatccctaactaacaaaacttaatcacttaaaggtactactgaatcacttcgttcaccaataatggttttacctgtaccacttacacacaggcaggtaaactttcccactactttgtgtcgtattctttcgtgaattgctcactagaggcagcaccgtatacagcgagcgttttaacaaatctgatgaactgct

SEQ ID NO: 4434 - DNA, 3048 bp, Diabrotica virgifera
  SmartBlast Evalue=4E-40; Info=Insulin-like growth factor- binding protein complex acid labile chain n=1 Tax=Harpegnathos saltator RepID=E2BXU3_9HYME
ttctccgataaaaaatttattgaaaacattttgattacaactagaaattagatagtttacagatattaagaagagctgaatgctgctgatattaggtacatatggcaaacaatacctgcttaatctgtggcttaacaatatttttctatactataagcgcaataacatttatagacagttaaattacgtagaactaagacatgacaatatagttctgcaatcaaactatgagagtcattaatattcagctcagcgggacaccattattggaaatgtgtacttaaataatcaagggatcattccataaaacaggtagatctcttgttgataaagtttcacaccttgaagaatatcaccccgctgagctgaatatgaatgactcttagttcgattgcaccggtataccagtgcatgcttctaatttgaaaattaagtagattttaaatcaatagtctaaattcagtacatgaaaatggatctttacctagtgcaattgttaggaaacggttaaagggtatggtaaaaatcaattttcaaattgtcttattttaaaaatacacaaaacatttttcgacagtacctatctatggcggagtgcacaaaatgcgaactctccagtccccaggacgattaaagcttaaaaatggttttggttcacagaagtaatggaaatttggtccctaggttatctgccgtactgcagtcagccgaatactttatcgctaatcttatttcataagagacaataatttgattatatacatattaaacaaaatagtcttatttatctatgaaccacagaattttaagtaactttaagcagtatgcactactggggttgtattaaattcatagcgactcaatttaggagtcttgggacccgagaggtcttcggaaagaggtctgtatacagacccactgtgtttcttttgacctggagttgtattccaaagaggaattttcagccttggtaagttagctcgttgcatgtcaaagcggttgtttctgcgcagaatgcatagagttaaggtaacagctatggtcagtactactaaagcacttaatacaaatactgaagttactgacaagatgtaagtggctctagcaagagatgtgtcttggaacttagtagtcgtttcttcgtcgtagtattcatcgtcgtattcatcagaatcgctatcgtcgtcgtcatcgtcttcctcataatcttctttctcaattttgtcaatagttttatacgtagttttgttatctatgcgagttagttcaggtaaagcagactcagtaatatgttcaggacatttacctttatgaacatctttccattcaatggttacaaaatcatcaatgtcttccctaaaagccttatcagctccggtatatatattcttgctataatcgataggagtaatgccttgaagatctaaaaagtataataacatacataacttctcatcaaacactaaaggattgtcttccaattctattgcctctaatttgggcatgatgttgaaatcatcgttggttagagttcctaagaagtttccacttagaagcagtttatgcaaagatttaacaggtttgttgtagttggaccacaattttgttagagtagcatttctggcgtcaatatctctaagaagatgatttgcggcaaacacttctggattaagaaccagtaaaggattaccagcaatgtttaaaatttctaaattgccgttatgtacaaaagctgctggcgacaagtatgaaatttcattataagaaatatctaattgtttcaagctggtaattttgtcgaagacattatccacattcattaacttattgtgtgacagttccagattaatcaaaccatccatattctggaagacgttggctgaaagaattcgtaagttacaagatttacaagagaacgtgtaagtagagaaactttcatggttttggcggtagaaagatggtaaggtgtcgaaattgtttccatctaagataactttgatgagtttaccgtttccagagaaaatattatcttgaagtttagtcaacttattgtaagaaaggtcaattactgaaagatcctgcatgtgggacaatgctttactgaatatgtctgtaagattgttgtgacttaggtttaattcattaagagaagttaatttttttgttgattcttcgtcaaatgtctctaattggcaattcttaagtgacaatatctctaaactgtcggatgtattaatgttaaaatgtttaagggggttgttgtcgaggttaagggtgattaattcttggttattaataaacgcagtaggtgggagtttgtggatgttattgtcggaaagatgaagctctcctagatcaaacagttcagcgaaagcttcaacttcaatgtttttaatgtaatttcccgataaatttaaaaacgttagattgatcagtccatttagattgggaatttcttctaatttgcattcaccaaaatgcacctcctccaactttgtagagaagaggtcaggactgtcttcaaaggcacatttggagaactttaggcgcgtcacattctcgaaggctttcacatctatagtcgcaattctcgtgttggtaatgatgacatcgtcaagattcttgaacccggcgaatgcactaacttggatctggttgatgatcaaattgtcaagggtgatgacgttcgttgaggtcttgctaatgtacttaaaagtggcgtcgttaagtactagaggcctatcgcatttggttacctgcagcctattggtcagcattccaaagctgcacgtgcagtggtcaatgcaagtcttcgaattggttggaagcgacggtggcgccgacggtgtggatggtgtcgacggcggtgacgttaataccgccgcggcctggacggccacaagcattagaaccaatttcatgtaggtattgtttctgtcacgagctgtaacctgtaacgaacaacgtcaaatatgtcgctattcactatctattactggaatgtatttcaaaaaatgttaatattatcggaacgtgacaccgattact

SEQ ID NO: 4435 - DNA, 4082 bp, Diabrotica virgifera
  SmartBlast Evalue=0; Info="Tripartite motif protein trim2,3 n=1 Tax=Aedes aegypti RepID=Q17GE7_AEDAE"
aaaatgcaaatagatttattgatgtcagttaaacacactttatattggaaaaaagttattattatgtcgattaaaaccaaaaactctttcagaaaacttgtatcctatgattttcccgatcgcacaccaaaatgtgcccgtttggtgtcatagcaacgccttctaatcctttaaattccgcttttccaatgccccagcaaccaaaagctctcagaaaaccgccatcagggctgaatatctggattcgattgtttccagaatcagcaacgcagatatatccttggtcgtcaactgctacccctcttgggaatttgaattgaccttcttctgagccttcggatccgaaggaagtgaggactttaccgtttacgtcaaatatctgaattctgtggttgttggagtctgaaactactactctgttcgtatttgagactgctatgtaatgagggtgttccaactggccttctttgttgcccatggaaccgaattttcccacaaatgtgccatccgattggaaaacctgaactctgtgattttccttatcacacacatatatgaaacctaaagcatctgttgttatgccccaaggatagttgaaacgaccatctgcagtcccttggcttccaaatgctcttaaaaagcgtcctgatggatcgaaaacttgtattctatggttatatctatcagcaatgatgtactgtcctatacgattgacagcaacaccagcaagacaatcaaactctccctctttattaccatattgtccgaactctttaataaaacgtccgttagcgtcgaaaacttgaactctgtgattggaggaatcggcaacgacgatggtattgtctggaccgacggcaacaccgcgcggccatgtgaagcatccggcttcgctcccccggctacctatttgaaacagctgctcgcacttttgaaggtactggcttctaggggtggtacctgctactgcttgggcgatacctgccactgctatagctgctgtaggggtagtgggggagccttgcatgttttttgaatcatcatcagaacttgctaactcagttgatgatcttaaaggcaatcccaaagacaatcttcttgccgctcctgaactactcgctgaaggagtactcgcactcgatgaaacgtctttgtctttcgctccgcttctatttccgtatttgctcttgaggtatctcgcccaagaacttaatgctgctccatctttttcggcagcggctgctgccgaacgatctggagaattgtctcttgatttcagcgcatgggaagaacggcttcttgcaaggtcatgagctgatgatgaagtgccatacccctttgctgcaaggtacgctgaaggattggaagttgttggtgaaactggttcgtctatatcttcatcgtctccaaattgttggctgcttctacttctagctaatcgttgcctacgttctttcaaagccatatagcgggaacgaccgcttgctgggtacttactatcaacgtcatctgcggtagaattgtacctactcgaactgtaatcttcatcttccggaggcacagctgcagaacttttgcttttgcttaaaaatcgacttgtgtaaccgtacttaggtgtttcttcttccgttacagtcgatgtcctgcttctagaatacttggacggttcatctctagtagtcccatatctcgttcttacaggagattcagcttcctctctactttttctacgaacgctttcgacactattatctcttgcatttgcacttctagctaaaagaggacctatatcagatttggcaatttccttagtatcagttttctgtgtttcctcatcagattcttcttcagattcagtttcttcttcagagctagtttccgtttcatcttcttcttcttccttagttggagctgttgtatttttgtttaagaatcgactttggaaaggtttgttttggacaggtgatgaattctttttacttggtgtagttggttctactttagagagaattttcttcttaacctcatctgtggtgaaaggagctccagtagatcgaactgcgcttgaggacgtagaggattcggaagatgtatgagattcagagctagctgatcttgcggatttcttgtggctagcatcagatggtcgccttggagttgctgcggtggcacttttaggggatgtctttttttgactctgttgacgagaatttacagactcctcactttcttcggcgctggagacagcctcaggggctggtgttttccgctgtctttcttcagtagcaggcctcactgtctctgtcgttgtatccgtcgacgtagtagcccctttattttgtttcttaattctagctatttcgtcatcttcactaacttgccttacggctggcggaggaggcctttttggcacaactttaggttggacaggggcaggggtgggttcttcctttttcttggttttgccactttcatgttcctgcatttttttcattaccctgggtgagtctgcaagcctagttattccactaagaggacctctagatgcgtcttctgtatcaaacgcacgttctcgttccttctccttgtgctcattaaatctcactctagtgtttggttcggtatctgaatcgttttctgttgcttgatgtcttctaaacctactatatttggatcgtgttggtctagtgtcatggtcatagtcatccccataatcacctccacgaccataacgactttctccagtactttttggtctatctccaaatttccttcctcctaaaacttgatcttcatcattatagcctcgttccccatatcctctttcttcttgttgcctaaattgtgaggctaatcgatggtcgctcttagatctcattagtccagaatttggaggctgcaataatccaggctgttgaccaaagtgtgactgacttggtaaattaagatctccaaaaccagcaacatggagtaccaattgattgggatcatgtgctagaactaaccttactttccgactgtagtcagcgttttcgtattcgaaattacgaataaactctacagtctttaaaaatatttctttggcatccataagctcgcaatcatcccagatatctacgttttcattcatatgtttatcagctaggtcgcaattacttaaaatattcgatatttctagctctaaattttcttttagagtagttagacttcttacttcggtaccaaggtatctgtctagctctcctcttaaatagtcagtacggtcttttaaagctttgctaagtcttctatatatttcttcaacttcctcaccaactgataaacagttcgtttgcatattctgtgagttcttttccaccaaagctagagtatcctgcaacctgtgaataccccttctgatttgattatttatcctagaaatttctcgtcttagtatttccatatgtgctgatttacactcttcacatatttttttatcgcagtgagaacagaagctgcagtatgctttttctgaacagacgttgcatcgttccatgatctgtccactggttggatcgggcagttctccggttatttctatgtgtagttccaaaaagcgttgaagggttacgttcgttggaaatccttggactccattgtatggtattctgtgttctgcgcggcattctgggcatttgatctgtcttctaacgtaatctacagtgccttctaagcatggttccatacaaaagctgtgttggcatggtaaaagctttggatttctgtaacggtctaagcaaatagcgcatgtcaatagctgctcgaattgctccatttttcagtcgtttatttcctcgtttaattcgtaaagctgaggttagattctttggcgcttatatccgaggccccgtagggctgtaacactagctggcctctggtataaggttaggatggaaatttttcgttccgcactgaatatcgggtttatcacttgtcgcaaaaattgtggaaaatttttttaacacttttctaaattatgtcttaaagccggcagatgcatcacttagcgtgttggagtcgtttagcgactaacttaaccaaac

SEQ ID NO: 4436 - DNA, 2044 bp, Diabrotica virgifera
  SmartBlast Evalue=1E-175; Info="Nhl repeat-containing protein, putative n=1 Tax=Pediculus humanus corporis RepID=E0VK33_PEDHC"
aaaaaagatttgaagaagaagtagtagaaacatgccagtgtgtaatcggggtaatcaatagtcatctatacttttcaagttaatttttacagaatgtacaagcaacacaacatttaatatttatctattaagagctctattctaaaaattgtttaatcaggtacttgagtgcttataaagaggctactgttcaagttcatctagactcacctcaggggctggtgttttccgctgtctttcttcagtagcaggcctcactgtctctgtcgttgtatccgtcgacgtagtagcccctttattttgtttcttaattctagctatttcgtcatcttcactaacttgccttacggctggcggaggaggcctttttggcacaactttaggttggacaggggcaggggtgggttcttcctttttcttggttttgccactttcatgttcctgcatttttttcattaccctgggtgagtctgcaagcctagttattccactaagaggacctctagatgcgtcttctgtatcaaacgcacgttctcgttccttctccttgtgctcattaaatctcactctagtgtttggttcggtatctgaatcgttttctgttgcttgatgtcttctaaacctactatatttggatcgtgttggtctagtgtcatggtcatagtcatccccataatcacctccacgaccataacgactttctccagtactttttggtctatctccaaatttccttcctcctaaaacttgatcttcatcattatagcctcgttccccatatcctctttcttcttgttgcctaaattgtgaggctaatcgatggtcgctcttagatctcattagtccagaatttggaggctgcaataatccaggctgttgaccaaagtgtgactgacttggtaaattaagatctccaaaaccagcaacatggagtaccaattgattgggatcatgtgctagaactaaccttactttccgactgtagtcagcgttttcgtattcgaaattacgaataaactctacagtctttaaaaatatttctttggcatccataagctcgcaatcatcccagatatctacgttttcattcatatgtttatcagctaggtcgcaattacttaaaatattcgatatttctagctctaaattttcttttagagtagttagacttcttacttcggtaccaaggtatctgtctagctctcctcttaaatagtcagtacggtcttttaaagctttgctaagtcttctatatatttcttcaacttcctcaccaactgataaacagttcgtttgcatattctgtgagttcttttccaccaaagctagagtatcctgcaacctgtgaataccccttctgatttgattatttatcctagaaatttctcgtcttagtatttccatatgtgctgatttacactcttcacatatttttttatcgcagtgagaacagaagctgcagtatgctttttctgaacagacgttgcatcgttccatgatctgtccactggttggatcgggcagttctccggttatttctatgtgtagttccaaaaagcgttgaagggttacgttcgttggaaatccttggactccattgtatggtattctgtgttctgcgcggcattctgggcatttgatctgtcttctaacgtaatctacagtgccttctaagcatggttccatacaaaagctgtgttggcatggtaaaagctttggatttctgtaacggtctaagcaaatagcgcatgtcaatagctgctcgaattgctccatttttcagtcgtttatttcctcgtttaattcgtaaagctgaggttagattctttggcgcttatatccgaggccccgtagggctgtaacactagctggcctctggtataaggttaggatggaaatttttcgttccgcactgaatatcgggtttatcacttgtcgcaaaaattgtggaaaatttttttaacacttttctaaattatgtcttaaagccggcagatgcatcacttagcgtgttggagtcgtttagcgactaacttaaccaaac

SEQ ID NO: 4437 - DNA, 2985 bp, Diabrotica virgifera
  SmartBlast Evalue=0; Info="Heat-shock protein 105 kDa, putative n=1 Tax=Pediculus humanus corporis RepID=E0VY10_PEDHC"
cgaacgacaaagacagatatttccttctacataaagtcatttctagaaaaacgtgaactgaactgtgccggtgtgatttcgcagttaaataaaagaaaagttcaaaatcgtgatcgaaaaaaccttttattatattaatacaattttttaaaatggctgcaatgtctgtgataggtatcgatttgggaaatgaatcctgttatgtagctgtcgcaaaggctggtggaatcgaaaccattgcaaatgactacagtttaagggctactccatcatgcgttgctttttctggaaagaaccgcatattgggagttgcggcgaaaaatcagcaagtcaccaatatgaagaacactgtatatgggctaaaaaggctgttaggtagaaagtttagggatcctcatgtcaaaaaagaaattcagtttttaccatatacagttgtagaagaaaaaaacgggggtattggaattagggtaaattatttaaatgaagaacataaattttcaccagaacaatgtttggccatgttgttaacaaaattaaaagatagtgctatgacagctctacaaactcccataaatgattgtgttatatcagttccttcttactttacaaacaatgagaggaaggcactattagattctgcagccatagcaggtcttaatactctaaggttatttaatgaaacaacagctacggccttgtcatatggcatttacaagcaggatttaccagctgttgaagaaaagcctcgtaatattatttttgtcgattgtggccattcatccttacaagtatttgcagttgcatttaataagggcaaattgaagatgcttaccactgctgcagatcccaatttaggtggtagggactttgatctcatcattgctgagcatttttgcaaacaattccaaaccaaatacaacatggatgcaaaatctaatccaagagcttttctaagattgctaacggaggtagaaaagttgaagaagcagatgtctgcaaattctacaaccttaccactcaacatagaatgtttcatgaacgataaagatgtgtccagtgacatgaagagagcagatatggaaactttatgtgctcatctgtttgaaagagttgaagtaagcttaaagcaatgtctcaaacaatcaggattgtcattggatgacatttacgctgtagaaatagtgggcggatctagcagagtacctgctattaaacaattaatagagaaagtattccacaaagtaccaagtactacattaaatcaagatgaagctgtgagccgtggttgtgctctacagtgtgcgatgctatctcctgctataagagttcgggattttagcgttacagatgtacaggcgtacccgatctctgtagcatgggatgcaagtccaggaggagaatctgctggggagatagaagcattcccacttaaccatccggttccattctcgagaatgttgacattctatagacaggaaccattcaccatcagagcaaaatacagtggcaacatcccgtatcccgatcatgatataggtacctgggttataaaagacataaaacctaactctgaaggaaagccgcagaaagtgaaagtcaaggtccgtgtaaacctccatggaatcatgtcgatatcgagtgctagtttgtacgaagcaaaagagtcagttgaaccagaaagtccggaagaacaacagaaggaggcacaggtgaacagtaacgaccaacagaatggcggtgtgcagactaacgagagcggcgaatcgatggaaacgacaaacgaaggaacaggagccaacagtggagaaggtgctgttcctgaggtaggctccggcaccagctggacgaagaaaatatctgcctggttcagcggggaaggaagcgataaaaagaaaaagcaatcggtaaaatccatagaattaccaatcgaatctcttacgaccggcttctctcaggtggaaataaatcatttcaccgagcaagaattcaaaatgatcgcttctgatcgacaagagaaagaacgcgctgacgctcgaaatgcatttgaagaatacgtttatgaattgcgtaacaaagtcagttctgatggagatttcgcacctttcatgcctgagaacgatagaaatactttggtgtcgcaattagatgatatggaaaattggctttatgaggatggcgaagactgtaataaacaagtatatatcgacaaattacagcagttaaaaagtattggagaacctgttcaaactagaaaaattgaatatgaactaagacctgtggttattgaggattttgctaaatcattacaattatgtatgaaagctttggaattgataagatcaaaagatcaaaaatatgctcacctaactgaagaagactataataaagtagaagatgcatttaaacattactaccaatggttagagcagactagaggtaaattgagctcggctcctaatcacttgccaccacctgtaactgtagcgcagatcagacaggaaaagtcaagtttcgaaaattccgtaaattcaatacttaacaaaccaccaccaaaagcgccatctcctccaaaggaggaaaaggctgcagaacaacaaaattcacaagaatatgcagaatcgccgaaaaacgcaaaaaacgatgaaaatatggagtggtcgtcaaattagattaattaggtgtttttgtaattaaaaatgtcgctagaatcgacgatataacaaatattaaaatatgcttaatatatctgatgtattaaatttgactttccgaaagaattgtgtattatttttatttgccactatttcaaatttacatacattttaattttttatactgtgttgagtagcttctttctcatgttttaatttatttttaattgcgaaattaatgtctcacagtttatgtcacacactgtaataattaaacatcattctttagcaagacttagtgtatggtaaatataatttaaaaaataaaatgtcc

SEQ ID NO: 4438 - DNA, 2934 bp, Diabrotica virgifera
  SmartBlast Evalue=0; Info="Heat-shock protein 105 kDa, putative n=1 Tax=Pediculus humanus corporis RepID=E0VY10_PEDHC"
cgaacgacaaagacagatatttccttctacataaagtcatttctagaaaaacgtgaactgaactgtgccggtgtgatttcgcagttaaataaaagaaaagttcaaaatcgtgatcgaaaaaaccttttattatattaatacaattttttaaaatggctgcaatgtctgtgataggtatcgatttgggaaatgaatcctgttatgtagctgtcgcaaaggctggtggaatcgaaaccattgcaaatgactacagtttaagggctactccatcatgcgttgctttttctggaaagaaccgcatattgggagttgcggcgaaaaatcagcaagtcaccaatatgaagaacactgtatatgggctaaaaaggctgttaggtagaaagtttagggatcctcatgtcaaaaaagaaattcagtttttaccatatacagttgtagaagaaaaaaacgggggtattggaattagggtaaattatttaaatgaagaacataaattttcaccagaacaatgtttggccatgttgttaacaaaattaaaagatagtgctatgacagctctacaaactcccataaatgattgtgttatatcagttccttcttactttacaaacaatgagaggaaggcactattagattctgcagccatagcaggtcttaatactctaaggttatttaatgaaacaacagctacggccttgtcatatggcatttacaagcaggatttaccagctgttgaagaaaagcctcgtaatattatttttgtcgattgtggccattcatccttacaagtatttgcagttgcatttaataagggcaaattgaagatgcttaccactgctgcagatcccaatttaggtggtagggactttgatctcatcattgctgagcatttttgcaaacaattccaaaccaaatacaacatggatgcaaaatctaatccaagagcttttctaagattgctaacggaggtagaaaagttgaagaagcagatgtctgcaaattctacaaccttaccactcaacatagaatgtttcatgaacgataaagatgtgtccagtgacatgaagagagcagatatggaaactttatgtgctcatctgtttgaaagagttgaagtaagcttaaagcaatgtctcaaacaatcaggattgtcattggatgacatttacgctgtagaaatagtgggcggatctagcagagtacctgctattaaacaattaatagagaaagtattccacaaagtaccaagtactacattaaatcaagatgaagctgtgagccgtggttgtgctctacagtgtgcgatgctatctcctgctataagagttcgggattttagcgttacagatgtacaggcgtacccgatctctgtagcatgggatgcaagtccaggaggagaatctgctggggagatagaagcattcccacttaaccatccggttccattctcgagaatgttgacattctatagacaggaaccattcaccatcagagcaaaatacagtggcaacatcccgtatcccgatcatgatataggtacctgggttataaaagacataaaacctaactctgaaggaaagccgcagaaagtgaaagtcaaggtccgtgtaaacctccatggaatcatgtcgatatcgagtgctagtttgtacgaagcaaaagagtcagttgaaccagaaagtccggaagaacaacagaaggaggcacaggtgaacagtaacgaccaacagaatggcggtgtgcagactaacgagagcggcgaatcgatggaaacgacaaacgaaggaacaggagccaacagtggagaaggtgctgttcctgaggaaggaagcgataaaaagaaaaagcaatcggtaaaatccatagaattaccaatcgaatctcttacgaccggcttctctcaggtggaaataaatcatttcaccgagcaagaattcaaaatgatcgcttctgatcgacaagagaaagaacgcgctgacgctcgaaatgcatttgaagaatacgtttatgaattgcgtaacaaagtcagttctgatggagatttcgcacctttcatgcctgagaacgatagaaatactttggtgtcgcaattagatgatatggaaaattggctttatgaggatggcgaagactgtaataaacaagtatatatcgacaaattacagcagttaaaaagtattggagaacctgttcaaactagaaaaattgaatatgaactaagacctgtggttattgaggattttgctaaatcattacaattatgtatgaaagctttggaattgataagatcaaaagatcaaaaatatgctcacctaactgaagaagactataataaagtagaagatgcatttaaacattactaccaatggttagagcagactagaggtaaattgagctcggctcctaatcacttgccaccacctgtaactgtagcgcagatcagacaggaaaagtcaagtttcgaaaattccgtaaattcaatacttaacaaaccaccaccaaaagcgccatctcctccaaaggaggaaaaggctgcagaacaacaaaattcacaagaatatgcagaatcgccgaaaaacgcaaaaaacgatgaaaatatggagtggtcgtcaaattagattaattaggtgtttttgtaattaaaaatgtcgctagaatcgacgatataacaaatattaaaatatgcttaatatatctgatgtattaaatttgactttccgaaagaattgtgtattatttttatttgccactatttcaaatttacatacattttaattttttatactgtgttgagtagcttctttctcatgttttaatttatttttaattgcgaaattaatgtctcacagtttatgtcacacactgtaataattaaacatcattctttagcaagacttagtgtatggtaaatataatttaaaaaataaaatgtcc

SEQ ID NO: 4439 - DNA, 2962 bp, Diabrotica virgifera
  SmartBlast Evalue=0; Info=Zinc finger RNA-binding protein n=2 Tax=Formicidae RepID=E2BI21_9HYME
ggctcaatatttattttgtagcttctaggaaacaacttcgctcgtcaaatacattcaactccataatgaaatagaaagaaatacattcaactcattactgaatgttcagtaatactttagaccagattagatatataacactaagtaaaaaagaactaaaaaatcaatcacaaagaactaagttaaataaacataattagttacttatatgcctatacagtaaaatacttcaagagatgtaaaaatataatttaactaactaattctgtgttttcaccatctttcctgtatcactttctgaaccatcttgacctgaacccgatagacgtcttttccgcgtgattccaactctcctgaacgatttctgaggtgctggtaaaggatccatacctaataccttgtatatttgtctataagctattaatctaagcgcgtattgtgcggaacaggtgagatcttccctctgttgagcgttcaatgctccggaagcgtcgggattgtccttttcgcacggatcagccaaaccgggaccgcccgggagaagcagaccgctagccaccgcttccatgacgcgtcgtagggcatctcctggtgacagctgggcttgtccaggcactgacgagatcactttctcggcaagcagttccatggcccatggagacaacggcgaccaagtaggaactctctggcataaatctctcagtatacgaatgatgatgacacaggaatgcagaccaagagcccttgcctggaaccatttggtatgtctgagggctgccagcgcctggagacacttgccgcgtgacagaacatcccggtcgaacccaccgcttgcagcttctggttgttcccgaattacgggactggtgaactgtaccaacaccgtcaaactgtctccagcgatgatcaagcctgcctcggaagcgttgatggccacggtgtaggcgctctctggggccacttgcttcagagctgatggaaggatttcgacgactttcttgagaagagtgagggtgggtttatcagcacatagtaccaccaattcaacatttgtatcgcctcgaaggagaagacctttagcaagatgtcctacacgcataacgccttttagaatgcggttctgatcgccttgttggaaagagaagagttgattgtcacgtccatcctctttttgttgtggttctgccttttcatctggtttcgcttctggagctttattcttgccgtcacccatttgatctgatacaaccttcagtgccctctctgtatgggaaacgatgcgttggatggcctgtagctcttcctccttgggataaatttcagcatgtctcgccattacatgtttatcatcgctagattcagctctacgactcaaaacaccgggtggaccttgacctccagggaagggtcttcctctttggaaaggcatatttccgtggcccatcatatattcatcttcatatcttctttgttcttcccaatagagactttcatttacatcaggataatgacgacgagcccagaattcttctcttagttgagctcttctcagtttctcttcctggattcttctttgtctcaacgatggcttaacatcaactactaattcaggattgaccttctttttgtactgcaacctatgtcttctgcccttcatgtgcatttccttagcatttggatcgttaaatctacattcacacaatttgcagttgaagcttataactttgccatcatcactcttgatctcctcaatataatcttgtcctacaggctgtatatctggttctattatatcatcgtcttcatcctttgatgcatctccattcccagcagccacacctaagcctcctgatgctacaaagttgattttaggagtggaagaaactgatttctttgatcctccaagaacttctggttcttgtggaggtatgggcttgcctagcttggtgtgtagcaataccaccttctgatgtttcgccccacggatgtgggcagcataagcatcattacctgtgcaagttacatcacataactgacatcttagagagttcccagcacggttttgagtagtaacagcaacagaggctgccattttagtggctgcttctcgtttcttgtgtttttgtccttctaaatgttctctgtaagtctggggaccagcacaactgattttacaaacatcacaatagtgcaactgttgaggttttgggggtgcctttggtcttgcagttttcgcaccgatacctggtttcttgtagttttgccagccgacagctttatgttgggcagtgcctgactgttgggctacatacatggtagctgctgaatacagggcagcatcgtatcctgaatatgttgtggtagaattagtctgtttggcttgtgttgtaggttgagcagctattgtagtctgtgcagcagctggttgggggtaggtagtctggtaagctgttgcagtgggctggtatgtggccgtgtactgtgcaggctgcttgaccacggccgcagcagcgacagcagctgatgctgctgcttgttgtgcctgctgtgaggtagttctctgtgtataagtagtggcataggaagcaggttttgcagctgctgctacagctgctgcagcagcagctgtttgatcataaccacttgtgtaaccagttgcagctgtttgaccatatccatactcataggcgggagttgcagtggttcctacagcagcataagtgccttggctggctgcagctgcagcctgataggctgtgtcatagctggtgggtctttgggtaccgtacgtagctgcagcagctgcagtcgcaggagtagctacagcgtaaccagcctgacccgcttggtaggctccagtggttgctccatactgcgttccaccatgagtaaatccaaaataattattcgtagccattctttaatcactccaacaaaaatgcgatcaactagagatgtaaaa

SEQ ID NO: 4440 - DNA, 2935 bp, Diabrotica virgifera
  SmartBlast Evalue=0; Info=Zinc finger RNA-binding protein n=2 Tax=Formicidae RepID=E2BI21_9HYME
ggctcaatatttattttgtagcttctaggaaacaacttcgctcgtcaaatacattcaactccataatgaaatagaaagaaatacattcaactcattactgaatgttcagtaatactttagaccagattagatatataacactaagtaaaaaagaactaaaaaatcaatcacaaagaactaagttaaataaacataattagttacttatatgcctatacagtaaaatacttcaagagatgtaaaaatataatttaactaactaattctgtgttttcaccatctttcctgtatcactttctgaaccatcttgacctgaacccgatagacgtcttttccgcgtgattccaactctcctgaacgatttctgaggtgctggtaaaggatccatacctaataccttgtatatttgtctataagctattaatctaagcgcgtattgtgcggaacaggtgagatcttccctctgttgagcgttcaatgctccggaagcgtcgggattgtccttttcgcacggatcagccaaaccgggaccgcccgggagaagcagaccgctagccaccgcttccatgacgcgtcgtagggcatctcctggtgacagctgggcttgtccaggcactgacgagatcactttctcggcaagcagttccatggcccatggagacaacggcgaccaagtaggaactctctggcataaatctctcagtatacgaatgatgatgacacaggaatgcagaccaagagcccttgcctggaaccatttggtatgtctgagggctgccagcgcctggagacacttgccgcgtgacagaacatcccggtcgaacccaccgcttgcagcttctggttgttcccgaattacgggactggtgaactgtaccaacaccgtcaaactgtctccagcgatgatcaagcctgcctcggaagcgttgatggccacggtgtaggcgctctctggggccacttgcttcagagctgatggaaggatttcgacgactttcttgagaagagtgagggtgggtttatcagcacatagtaccaccaattcaacatttgtatcgcctcgaaggagaagacctttagcaagatgtcctacacgcataacgccttttagaatgcggttctgatcgccttgttggaaagagaagagttgattgtcacgtccatcctctttttgttgtggttctgccttttcatctggtttcgcttctggagctttattcttgccgtcacccatttgatctgatacaaccttcagtgccctctctgtatgggaaacgatgcgttggatggcctgtagctcttcctccttgggataaatttcagcatgtctcgccattacatgtttatcatcgctagattcagctctacgactcaaaacaccgggtggaccttgacctccagggaagggtcttcctctttggaaaggcatatttccgtggcccatcatatattcatcttcatatcttctttgttcttcccaatagagactttcatttacatcaggataatgacgacgagcccagaattcttctcttagttgagctcttctcagtttctcttcctggattcttctttgtctcaacgatggcttaacatcaactactaattcaggattgaccttctttttgtactgcaacctatgtcttctgcccttcatgtgcatttccttagcatttggatcgttaaatctacattcacacaatttgcagttgaagcttataactttgccatcatcactcttgatctcctcaatataatcttgtcctacaggctgtatatctggttctattatatcatcgtcttcatcctttgatgcatctccattcccagcagccacacctaagcctcctgatgctacaaagttgattttaggagtggaagaaactgatttctttgatcctccaagaacttctggttcttgtggaggtatgggcttgcctagcttggtgtgtagcaataccaccttctgatgtttcgccccacggatgtgggcagcataagcatcattacctgtgcaagttacatcacataactgacatcttagagagttcccagcacggttttgagtagtaacagcaacagaggctgccattttagtggctgcttctcgtttcttgtgtttttgtccttctaaatgttctctgtaagtctggggaccagcacaactgattttacaaacatcacaatagtgcaactgttgaggttttgggggtgcctttggtcttgcagttttcgcaccgatacctggtttcttgtagttttgccagccgacagctttatgttgggcagtgcctgactgttgggctacatacatggtagctgctgaatacagggcagcatcgtatcgtttggcttgtgttgtaggttgagcagctattgtagtctgtgcagcagctggttgggggtaggtagtctggtaagctgttgcagtgggctggtatgtggccgtgtactgtgcaggctgcttgaccacggccgcagcagcgacagcagctgatgctgctgcttgttgtgcctgctgtgaggtagttctctgtgtataagtagtggcataggaagcaggttttgcagctgctgctacagctgctgcagcagcagctgtttgatcataaccacttgtgtaaccagttgcagctgtttgaccatatccatactcataggcgggagttgcagtggttcctacagcagcataagtgccttggctggctgcagctgcagcctgataggctgtgtcatagctggtgggtctttgggtaccgtacgtagctgcagcagctgcagtcgcaggagtagctacagcgtaaccagcctgacccgcttggtaggctccagtggttgctccatactgcgttccaccatgagtaaatccaaaataattattcgtagccattctttaatcactccaacaaaaatgcgatcaactagagatgtaaaa

SEQ ID NO: 4441 - DNA, 3154 bp, Diabrotica virgifera
atcatattgaattataaaagatttacaaacaaaactgagtagaaaagcttataaaactcaattcaggaagattttcaaagcctttcttgtagcagcagtatgatttctgaattctgctgctaatggttttgatacgatattgaattataaaggatttgcaaacgaaactgagtagaccagcttataaaacccaatttaggaagattaaggccccgttctcatgacaagcgcttaacgcgcgattacagctacatacattttactcgagacagttcacatgctaaccccgttttaagtcattaaaacgagcatgtgaacggtctcaagtaaaatgtaagtagttactgtatgtactgacggatagatacaaaaaccagttggttaattgatagttgattagaccttttttacacaaaacatacgcaaaaatacaaaaatgcgttttacagagatatttaaactaaaatttagtaatttgatgagatgactagcatgtacgaatacatcttaacagttattatgaatgactgattgccatcgcattttggcattctaattaccccaaaacagccaaataagattgatgttttgtgctaataccgaacattataagcttttcatctaggaaacgaagattataattttcaatgtgtaaatcggttttattctgaatgcaacaaaatttcttttcgatatcaacaaaatttgtgctatgtggttttaatgatgttaaatataacaatattttaaacaattaggccatgtgtaaaataccctaaaataaaggaattaatttataaaataagtagaggaatattttgataaaaatatcactgtcaagtggtatgagaccgtgagatgttttttcaatttttttgacggcttttcgattgtaaatcaactacacatcgagtcaagacttgaatcgaaatatacagagtggtaaaattattatttgaagtataaaaactgcagcaaaataaaccttgcaggttatcttaaagaaaagatattgttgagtctgcagtaaaaccgaaattatctccttaaagttaattcacgtcatcaatggcatctatgtcgtcacagtactaccaactgcagttcataattccctacattctttactatcctgacaatatggcaactttgtgcgaaaatgtcaaatgtcaatgtcaaaattagataacgtgcaattaaacaaataatgtatagacaatctgcttgaaaattgaaatttggcacagccgacttgatgaaaacactttcatcatctcaattatcaaagactattacaatgttaacagattttattcgtctctattccttctcgaaaactctcacgatcacacaccactagtaaatctaataaaattgtcaataccatatttctgctcaaaacagtaattctaatggaaggaaaaattcagtttaccgaaatattgtgttagtgacattgacagacttaagctaacttcaactggtcaaaaagacggtattgtttattacaatcttccaacaaagagacaaaagataactataaaacagttgccaagacttcattatatagaaaagtttgtcaccaatttgatagtagctgcgcttatacttatacactgaaatctacattcaggtgttcaactattggttttatttgaatttgtagcagcgaacaaactgagcagaacatactggctccaatgtcattaatttctggtttgtttgcgtatattttctacaacaaatttattgtcttcttagattggttacattggtgttaagccaaatgtaatgatccctagtggcatgttagatgcattggggccttgacgttttgccatgacaagctacgacagccacaaattcaaatatatttataaatttaataataaaaaaattaaaaagaacgaataattcctatcaattagtaaaatatatctcaatcatcaaattataactttcaattcacatatcagaagataaatatagtgtgtctaaaattcacccttacaattattttctgaggcaaaagacatcaaaattatgtatcacatgctatatgttcatttaagaaatatggcgattacgtcatattttgacagctgtcaaatgaaatttatcgaactatgagaagctagtaaaatcaagagttttccttaaaagctgaattattacgcatgatacatacattttttattgtagatggtagccattgtaagttaaatagttgccattttaaagagacttaacataatactacaaaaatttaggaacagactgagtaataacagatctaaaattagatattgctgcacatatgatcacatttaaaatacttttacaaactggcttccaatgtgaagttaagtgctttgtccataaaataattgaagggtgaggtggattttaaatgggcacatatacttatgttataaaaaaatattctcattttgttttgtgaatttaactgccataatgaggtctttgattcagaatcagtttttgggtgtcggcacacgtcgatctgtactatttctgaataaataaataaataattttatacacaatgtgtacatacacaatataaaaccaaatatagacgaggcacaagctaagctgaatacaaataggtgtagatagaacgttaagagctaagaacatcatgtacgaggaaggttccagtaaatatacagggtgttagcaaataagtatgaaaaactttaagggccaattctacatgaaaaaacaatgccggtttgctctataaacatatgtccgcaaatgcttcgttttcgagatacgaggtgttgaaatttttatttcaaactgccaatttcatttactactccaagaccagctgagatatgaaactgaaacttgatgagttttaggaggtagccattgcgcaattttttacatacaatcaagaaccctgcattcatcattggcgcgcatacgggcaatagtctgaatttttttaagaaaaaaatagtacaccactgagatatttcaaattaaaaattattttgaaactccacgtttaactgttgataaaaaaaacctctcttgccttcttttcacaccgttcttatgcagaaaaataaaacgtcttgacgcgcatccctcatttcccaatacatcatcaagaactatc

SEQ ID NO: 4442 - DNA, 2637 bp, Diabrotica virgifera
tcgcattttggcattctaattaccccaaacagccaaataagattgatgttttgtgctaataccgaacattataagcttttcatctaggaaacgaagattataattttcaatgtgtaaatcggttttattctgaatgcaacaaaatttcttttgaatgcaacaaaatttcttttcgatatcaacaaaatttgtgctatgtggttttaatgatgttaaatataacaatattttaaacaattaggccatgtgtaaaataccctaaaataaaggaattaatttataaaataagtagaggaatattttgataaaaatatcactgtcaagtggtatgagaccgtgagatgttttttcaatttttttgacggcttttcgattgtaaatcaactacacatcgagtcaagacttgaatcgaaatatacagagtggtaaaattattatttgaagtataaaaactgcagcaaaataaaccttgcaggttatcttaaagaaaagatattgttgagtctgcagtaaaaccgaaattatctccttaaagttaattcacgtcatcaatggcatctatgtcgtcacagtactaccaactgcagttcataattccctacattctttactatcctgacaatatggcaactttgtgcgaaaatgtcaaatgtcaatgtcaaaattagataacgtgcaattaaacaaataatgtatagacaatctgcttgaaaattgaaatttggcacagccgacttgatgaaaacactttcatcatctcaattatcaaagactattacaatgttaacagattttattcgtctctattccttctcgaaaactctcacgatcacacaccactagtaaatctaataaaattgtcaataccatatttctgctcaaaacagtaattctaatggaaggaaaaattcagtttaccgaaatattgtgttagtgacattgacagacttaagctaacttcaactggtcaaaaagacggtattgtttattacaatcttccaacaaagagacaaaagataactataaaacagttgccaagacttcattatatagaaaagtttgtcaccaatttgatagtagctgcgcttatacttatacactgaaatctacattcaggtgttcaactattggttttatttgaatttgtagcagcgaacaaactgagcagaacatactggctccaatgtcattaatttctggtttgtttgcgtatattttctacaacaaatttattgtcttcttagattggttacattggtgttaagccaaatgtaatgatccctagtggcatgttagatgcattggggccttgacgttttgccatgacaagctacgacagccacaaattcaaatatatttataaatttaataataaaaaaattaaaaagaacgaataattcctatcaattagtaaaatatatctcaatcatcaaattataactttcaattcacatatcagaagataaatatagtgtgtctaaaattcacccttacaattattttctgaggcaaaagacatcaaaattatgtatcacatgctatatgttcatttaagaaatatggcgattacgtcatattttgacagctgtcaaatgaaatttatcgaactatgagaagctagtaaaatcaagagttttccttaaaagctgaattattacgcatgatacatacattttttattgtagatggtagccattgtaagttaaatagttgccattttaaagagacttaacataatactacaaaaatttaggaacagactgagtaataacagatctaaaattagatattgctgcacatatgatcacatttaaaatacttttacaaactggcttccaatgtgaagttaagtgctttgtccataaaataattgaagggtgaggtggattttaaatgggcacatatacttatgttataaaaaaatattctcattttgttttgtgaatttaactgccataatgaggtctttgattcagaatcagtttttgggtgtcggcacacgtcgatctgtactatttctgaataaataaataaataattttatacacaatgtgtacatacacaatataaaaccaaatatagacgaggcacaagctaagctgaatacaaataggtgtagatagaacgttaagagctaagaacatcatgtacgaggaaggttccagtaaatatacagggtgttagcaaataagtatgaaaaactttaagggccaattctacatgaaaaaacaatgccggtttgctctataaacatatgtccgcaaatgcttcgttttcgagatacgaggtgttgaaatttttatttcaaactgccaatttcatttactactccaagaccagctgagatatgaaactgaaacttgatgagttttaggaggtagccattgcgcaattttttacatacaatcaagaaccctgcattcatcattggcgcgcatacgggcaatagtctgaatttttttaagaaaaaaatagtacaccactgagatatttcaaattaaaaattattttgaaactccacgtttaactgttgataaaaaaaacctctcttgccttcttttcacaccgttcttatgcagaaaaataaaacgtcttgacgcgcatccctcatttcccaatacatcatcaagaactatc

SEQ ID NO: 4443 - DNA, 3167 bp, Diabrotica virgifera
  SmartBlast Evalue=1E-109; Info=Serine/threonine protein kinase n=1 Tax=Culex quinquefasciatus RepID=B0WKD4_CULQU
tatatatttcaataaattatagtaacatttgtataatttagagggtttgattcaacagtcaaattcgcctattgtcacttgctgcaggtctaatttttttcagatttttctataaggcgcgccaccttcaaaaaccccaaaaaactgggtttttaggagttttggggactttctccattttatagacttcaaaatagatcaaatcaaggtttttttccaggttatacataattttaagtaactgtgtcctcgagtcgtttaagacattcaaaaagtaggcgagacacctttaaacccccaaagaaccacatttttcagggttcttaagaactttgcgattttttgcggggttaatcaattaatcatattatttgagatcgatacaacctgaataactatttcatttttgcatcttgtgtgtaaaatgactcatcgcaattttagtccacccaaatcctcctggcccccaaaaacgaaatttttcgtttttatttttttttgtgggttttttgggggggttgtaatcaatttaaaaattccaaacatttacccgtataatggagtcttttacttctctatttttttataaatccttaagtggaatgtacttaatgtacataacctaaatatgatttttattttcgaaaaatggatctccatctccaaaactttttttttggagatggctgcagctctaattttattattttatgtattttatccaaaaatatatttctcattttttccagatttttctataaggtggcgttcgggttttaaaagtggcgacctttaaaaatcagaaaatctggttttttagtagtgttggggtgttttctccattaaataaattgcaaaattgatcaaatcaaggttcttttataggttataaataatttcaagtaaatcacttttagtacgttcaagaattgggcgaaatacctttaaacccccaagaaaccatgttttttcgaggtgttacgggttcttgcgagttttgaaaaattatgatttttttgtgggtttaaaggtgttttgcccaattttttggggattcatttacttcaaattacataaccttaaaaaaaaacgttgatttgatccattttgaagtctataaaatggggaaaatctcccaaaaccactaaaaacgagtttttcgggtttttgacagtggcacacattatgggaaaataaaaaatcaataatataggtattggttatctaaacatatgaaaacaatgaacctgcaaccatctccaaaaaaagttatacgctatttaaaaaaaatgcatttttaggttatgtacctatacttaactggtctatcaaaaatagacaagttttgtaaaagcctcaaatatgcgtgcgaattttttgaaatttttaaattgaatgcaactcatcgaaaaaaaaagataaaccgaaaaaattacgtttatttaatcaaatagaacgtaaaaaaatttaaaaaaattgaattctgggagtgaggacattttgcctattttcagggcggttacccttggtttaagtctataaatgtctaagtaaagtctcttgacattttttttaatggcactaaatcgtctctgtgtactttcggtgtatgtaagtatcattattagacatctaataaatgtacgattagattgagcaggaaacaaagttctggagaaagacagaaaggaaaggaagttctgaagaaagagagacaatgtgcgaattccactgttgaatgaaagttatcaatatacgtacagtcttgactattaataaatactaaaatttttatattgaactaacattttaagctattcaccgctgctttttatcttgttcaaaacctcctcaagtctgtgttccgaaatagacggcaacagctttgtgatcacgttggttacaaagagctcgctaataccaggataacagtcttctgcgtccgtgaatgccatactgacaattttatcattaattaaattcttcattacatcagataagtgactttttgcaggaaggggatcaattatgatgtttttcttaacgagcgtgttaaacatttcgtttgaatcttctgtaacggttaagttccaatcaggtactgtcgatgtggtactaaaccagtcgtcattaaaacgagtatccaacgtttcggcattttcacgtttccacttcaggtatctctctattagatctattagtacgtaatttcgcttagcctttctaatgaagagaagctttaacaagtctttagccggtggtctatattctggtttcttgttcaaacaagtctccacgaaatctttaaacggtttactgaaatcgccttctaatttgggagggctgctatctgctattttagccagagcttgcatagtgtgcattttagaataaggaggttcaccgtcagccaattctattgcagtaattcccaaactccaaatatcagctttataatcgtaaaaattttgtttgataacctcaggagccatccaatatggagttcctgttaaagtattccttttattcatggtgttagttaattgtcccgcgacacctaaatctgctaattttacctctccagtttcgctaagcataatattggcagctttgatgtctctatgtaatttctgctcactgtgtaaatattccaaacctttaagaacctctcgaagaataacagctatatgtgcttcttctaaaggtcctgctttcatgagatctttagcggaaccccctcctaaatattccataatgatccataacttgctttcttttaataatgaaccaaaatacttagttatgaaaggactgtcacattgagaaagaatattgatttcttgttggatgtcatctatttcgtcttgagctttttccaagtcgattatttttatggctactacttgatttgatctcttgtcaatacctttaaaaacttcaccaaatgagccttggccaacaagttcgtgtttcgtgagtatctcttctaagtagtaaagtttaggtgttgacatttttgtagccttagtaatggctgtggcagctccaggtttaatagaataattcccttatcaccgttttatcgcaacattttgtcagtaaaatatccaatacttattttttaaagattgataaaaatgataatgtacatctatcttggtgggtat

SEQ ID NO: 4444 - DNA, 2618 bp, Diabrotica virgifera
  SmartBlast Evalue=1E-109; Info=Serine/threonine protein kinase n=1 Tax=Culex quinquefasciatus RepID=B0WKD4_CULQU
cgcataatggagtctgtcacttctctatttttataaatctgtaggaaacatgtacataacctaaatatgatttttatttcgaaaaatggatctccatctctaaaacttcatctccaaaactttttttttggagatggctgcagctctaattttattattttatgtattttatccaaaaatatatttctcattttttccagatttttctataaggtggcgttcgggttttaaaagtggcgacctttaaaaatcagaaaatctggttttttagtagtgttggggtgttttctccattaaataaattgcaaaattgatcaaatcaaggttcttttataggttataaataatttcaagtaaatcacttttagtacgttcaagaattgggcgaaatacctttaaacccccaagaaaccatgttttttcgaggtgttacgggttcttgcgagttttgaaaaattatgatttttttgtgggtttaaaggtgttttgcccaattttttggggattcatttacttcaaattacataaccttaaaaaaaaacgttgatttgatccattttgaagtctataaaatggggaaaatctcccaaaaccactaaaaacgagtttttcgggtttttgacagtggcacacattatgggaaaataaaaaatcaataatataggtattggttatctaaacatatgaaaacaatgaacctgcaaccatctccaaaaaaagttatacgctatttaaaaaaaatgcatttttaggttatgtacctatacttaactggtctatcaaaaatagacaagttttgtaaaagcctcaaatatgcgtgcgaattttttgaaatttttaaattgaatgcaactcatcgaaaaaaaaagataaaccgaaaaaattacgtttatttaatcaaatagaacgtaaaaaaatttaaaaaaattgaattctgggagtgaggacattttgcctattttcagggcggttacccttggtttaagtctataaatgtctaagtaaagtctcttgacattttttttaatggcactaaatcgtctctgtgtactttcggtgtatgtaagtatcattattagacatctaataaatgtacgattagattgagcaggaaacaaagttctggagaaagacagaaaggaaaggaagttctgaagaaagagagacaatgtgcgaattccactgttgaatgaaagttatcaatatacgtacagtcttgactattaataaatactaaaatttttatattgaactaacattttaagctattcaccgctgctttttatcttgttcaaaacctcctcaagtctgtgttccgaaatagacggcaacagctttgtgatcacgttggttacaaagagctcgctaataccaggataacagtcttctgcgtccgtgaatgccatactgacaattttatcattaattaaattcttcattacatcagataagtgactttttgcaggaaggggatcaattatgatgtttttcttaacgagcgtgttaaacatttcgtttgaatcttctgtaacggttaagttccaatcaggtactgtcgatgtggtactaaaccagtcgtcattaaaacgagtatccaacgtttcggcattttcacgtttccacttcaggtatctctctattagatctattagtacgtaatttcgcttagcctttctaatgaagagaagctttaacaagtctttagccggtggtctatattctggtttcttgttcaaacaagtctccacgaaatctttaaacggtttactgaaatcgccttctaatttgggagggctgctatctgctattttagccagagcttgcatagtgtgcattttagaataaggaggttcaccgtcagccaattctattgcagtaattcccaaactccaaatatcagctttataatcgtaaaaattttgtttgataacctcaggagccatccaatatggagttcctgttaaagtattccttttattcatggtgttagttaattgtcccgcgacacctaaatctgctaattttacctctccagtttcgctaagcataatattggcagctttgatgtctctatgtaatttctgctcactgtgtaaatattccaaacctttaagaacctctcgaagaataacagctatatgtgcttcttctaaaggtcctgctttcatgagatctttagcggaaccccctcctaaatattccataatgatccataacttgctttcttttaataatgaaccaaaatacttagttatgaaaggactgtcacattgagaaagaatattgatttcttgttggatgtcatctatttcgtcttgagctttttccaagtcgattatttttatggctactacttgatttgatctcttgtcaatacctttaaaaacttcaccaaatgagccttggccaacaagttcgtgtttcgtgagtatctcttctaagtagtaaagtttaggtgttgacatttttgtagccttagtaatggctgtggcagctccaggtttaatagaataattcccttatcaccgttttatcgcaacattttgtcagtaaaatatccaatacttattttttaaagattgataaaaatgataatgtacatctatcttggtgggtat

SEQ ID NO: 4445 - DNA, 2890 bp, Diabrotica virgifera
  SmartBlast Evalue=0; Info=Saposin n=1 Tax=Aedes aegypti RepID= Q0IGB5_AEDAE
tgtgatttgtgattaggagtgttgtgtttgtgttgttctggaagaagtagagaataaatacataatacataccagagtgcgtatacgatcatacgatatacgattttagttcgcgttagtagaacaaagcatctaaatttatattacactgagaacgcaaaaagtttattatacttttcaaaaatagtgattttgttgaaagcggtattgtatggttaaaatgaagattttaataatcgtagcggtgtttgctgcatttgccagcggggtatttgtcccaccaagaccagggcacaaaaaacatctgttgggcgcggatttatgcacacgaggaccgggacattggtgccaaaatttgactactgctgctgactgccatgccactaaacactgcattcagaccgtttggattcatcaaaccttgccaccagatgacagcagcgtttgtcaaatttgtttggatatggtaaaacaggcacgggatcagctagagagtaatgaaacacaagaagagattaaagaagtttttgaaggctcttgtgccttactttatatcaaacccattgtaaaagaatgtgacaaactggccgacgattatattcccgatttgatcgatactttggcatctcaaatgaatccccaagtcgtctgctctgtagccggactttgcaacaacgaaagagttaaaaaattactagaggaagctgatgacgaaccaacaactgaagtaatgccaggtaaagtagataaatgcaaagggtgtcaccaagtggttgatattttggacaacaaatttaacaagatgtcgagggatgaattcctgcatggactcttaaatttctgtggtaaattcagcagcttttcggatggatgcagtaatctcgttatcacttatttcaccgaaatatacaaccatcttcaacaacatttgaattccgaggaagtttgcctcttctctggagaatgcagtgctcagttccatgctcacagagctagagttgaaatcacacccaattctcatattggctacgttaatgtgggagatgataaagatgacgttccgtgccaactttgcgaacagttagttgaccatctcagaaatttattggtagctaataccaccgaagatgaatttaaacgggtaatggaaggtctttgcaaacaaaccggtaaattttcagaagagtgcgttgagctgatagaccaatattatggcgaagtatacaccttcttagtagatcatctgaatgcaacggaagtatgtgacgagattggaatttgcaaagcgagtaaggaaaaggaagacctttacattgcaccacttttggaaaaaaataatgcagaaaaagcattggagatttcttctgaaagaaaaccggagaaagttgatatgagtgcattatctgaagttaacttggaacagcaattacctattgatcttttgatgccaccacatactcaaattctttacaataaggaactctgcgcattttgtgaatatttcttacattatgtccagatcgcacttacagatcctaaaactgaaacagaaattaagtcagtaatagaaaaagcctgcaaagaactaccagtttcagtcaacgctacttgtatgagcttcgtagatatgtatgaaccagctctagttgctctgctagatcaggcaatagatccttcccaagtatgtcccttgataaaagtttgcccttcttcgaagagtggtatcgaagtgtttatggaagctaagagcgattccaaatgtcctttgtgtcttgttgctgttaccaagttggaagagatggtatctaataacaagtctgtggctcaaatcaaggctgcgcttgaaaaattgtgcaatgttcttccaaaatcgatcgacaaccaatgcgaagcatttgttgataaatatacagatcatatcgtcgacatgttactcgctgatttgactcctgaagaagtgtgtgtagcattaaaactctgtactgatgatagaaaagttaattccttaccaccatatgtagtcaggcaaataggtggaaatatcgaaactaacgttatacccgacaacactgtcaatggtcaaataatcgttgatatccatactggttctattggatccaaaccagagtgtatattatgcgaattcgtgatgaaggaaatagaagatcaattgaacgataagtcgactgatgctgaaattgaaactgtagttaaagacatttgcaagattatgccatcatccgtaagacaagattgtgataagtttgttgatcaatatgctgacactgtcattcagttattgattgctgctctggaaccatcaaaaatatgttcgtacataaaattgtgcgcaggatcacagatggacatgattaaagttcaaattttggagtgccctgtttgcgaaatgaccgtggaagtgatggaaaagattttgtccaatccgaacgtagatcacgatattgttcatgtaattgaaaaaacttgtagaggtcttcctgcgaaatacagaccacaatgtatccaaatcgtagaagcttatggtaaagagatgatcgacttaatcgtccaccagggtggcaaaactgtgtgccgaaaattcggatattgcaaatcttcacttggggaagttgtgatagattaaagttatagatactttaataaattagtgttacatgttaagcaaggcaaaattattttgtgtcataaattaccaaagtagatttatttgtaaacctaatcttaagtactttaaaataaaaatatggaagtagttattaatgaattatctttagtagacagttgtattacttgggagattattttgttacttgactggattctgtgataccgctggataatttggaatctaataaaatttcatttgtaa

SEQ ID NO: 4446 - DNA, 2871 bp, Diabrotica virgifera
  SmartBlast Evalue=0; Info=Saposin n=1 Tax=Aedes aegypti RepID= Q0IGB5_AEDAE
gtgattaggagtgttgtgttttgtgtttgtgttgttctggaagaagtagagaagagaatacatacgatcatacgattttagttcgaagaagtaattacgttagaacaaagcatctaaaattatattagactgagaacgcaaaaagtttattatacttttcaaaaatagtgattttgttgaaagcggtattgtatggttaaaatgaagattttaataatcgtagcggtgtttgctgcatttgccagcggggtatttgtcccaccaagaccagggcacaaaaaacatctgttgggcgcggatttatgcacacgaggaccgggacattggtgccaaaatttgactactgctgctgactgccatgccactaaacactgcattcagaccgtttggattcatcaaaccttgccaccagatgacagcagcgtttgtcaaatttgtttggatatggtaaaacaggcacgggatcagctagagagtaatgaaacacaagaagagattaaagaagtttttgaaggctcttgtgccttactttatatcaaacccattgtaaaagaatgtgacaaactggccgacgattatattcccgatttgatcgatactttggcatctcaaatgaatccccaagtcgtctgctctgtagccggactttgcaacaacgaaagagttaaaaaattactagaggaagctgatgacgaaccaacaactgaagtaatgccaggtaaagtagataaatgcaaagggtgtcaccaagtggttgatattttggacaacaaatttaacaagatgtcgagggatgaattcctgcatggactcttaaatttctgtggtaaattcagcagcttttcggatggatgcagtaatctcgttatcacttatttcaccgaaatatacaaccatcttcaacaacatttgaattccgaggaagtttgcctcttctctggagaatgcagtgctcagttccatgctcacagagctagagttgaaatcacacccaattctcatattggctacgttaatgtgggagatgataaagatgacgttccgtgccaactttgcgaacagttagttgaccatctcagaaatttattggtagctaataccaccgaagatgaatttaaacgggtaatggaaggtctttgcaaacaaaccggtaaattttcagaagagtgcgttgagctgatagaccaatattatggcgaagtatacaccttcttagtagatcatctgaatgcaacggaagtatgtgacgagattggaatttgcaaagcgagtaaggaaaaggaagacctttacattgcaccacttttggaaaaaaataatgcagaaaaagcattggagatttcttctgaaagaaaaccggagaaagttgatatgagtgcattatctgaagttaacttggaacagcaattacctattgatcttttgatgccaccacatactcaaattctttacaataaggaactctgcgcattttgtgaatatttcttacattatgtccagatcgcacttacagatcctaaaactgaaacagaaattaagtcagtaatagaaaaagcctgcaaagaactaccagtttcagtcaacgctacttgtatgagcttcgtagatatgtatgaaccagctctagttgctctgctagatcaggcaatagatccttcccaagtatgtcccttgataaaagtttgcccttcttcgaagagtggtatcgaagtgtttatggaagctaagagcgattccaaatgtcctttgtgtcttgttgctgttaccaagttggaagagatggtatctaataacaagtctgtggctcaaatcaaggctgcgcttgaaaaattgtgcaatgttcttccaaaatcgatcgacaaccaatgcgaagcatttgttgataaatatacagatcatatcgtcgacatgttactcgctgatttgactcctgaagaagtgtgtgtagcattaaaactctgtactgatgatagaaaagttaattccttaccaccatatgtagtcaggcaaataggtggaaatatcgaaactaacgttatacccgacaacactgtcaatggtcaaataatcgttgatatccatactggttctattggatccaaaccagagtgtatattatgcgaattcgtgatgaaggaaatagaagatcaattgaacgataagtcgactgatgctgaaattgaaactgtagttaaagacatttgcaagattatgccatcatccgtaagacaagattgtgataagtttgttgatcaatatgctgacactgtcattcagttattgattgctgctctggaaccatcaaaaatatgttcgtacataaaattgtgcgcaggatcacagatggacatgattaaagttcaaattttggagtgccctgtttgcgaaatgaccgtggaagtgatggaaaagattttgtccaatccgaacgtagatcacgatattgttcatgtaattgaaaaaacttgtagaggtcttcctgcgaaatacagaccacaatgtatccaaatcgtagaagcttatggtaaagagatgatcgacttaatcgtccaccagggtggcaaaactgtgtgccgaaaattcggatattgcaaatcttcacttggggaagttgtgatagattaaagttatagatactttaataaattagtgttacatgttaagcaaggcaaaattattttgtgtcataaattaccaaagtagatttatttgtaaacctaatcttaagtactttaaaataaaaatatggaagtagttattaatgaattatctttagtagacagttgtattacttgggagattattttgttacttgactggattctgtgataccgctggataatttggaatctaataaaatttcatttgtaa

SEQ ID NO: 4447 - DNA, 4831 bp, Diabrotica virgifera
  SmartBlast Evalue=2E-75; Info="Protease, reverse transcriptase, ribonuclease H, integrase (Fragment) n=1 Tax=Drosophila buzzatii RepID=Q9XZR7_DROBU"
atttatcatatgtaaagcaaaggagatattgaagcacgagaatataaaaccctgagattagagcattaaatagtgtgattaaatcataagtgcatcattaaaattaaatttaattaattagttaattatctaatcaattgctttgagcacaccgatctttgaatatcacattaactggagcccagaacgtggtggcttaaaaaatatcgcagctttgcatttgatggtagggaaagagataaggaataactacaggtgatccagagataatttgacaatttttccaggtgtaaaaatatttttgatttatggattgatcgtaggtagttgatatttactgctattgaattatttaatatttttaccaatcgtacatttgatatttattttgaaatttactgattgcatatttgatatttgtggcgaaaatttattaaatttggggagaaatatttgtcgtgttctgcaacttatagagtgttgtaaaatttcacatttggcggggacaaagaaaacagtaacaaaaagaaacaacatgtcgaccacaaggaggcaaagcaaaatgcaagaaagcagagagaataacagagaagaggaaaaaattgttgaagaaggattgggtaatgaaggagatacaacgattatggagagaaaagaacaggaattaacaggaatagagaaactattgcaactgatgcaactccaatcacaacaaatggatagaaatcaacaggaaacaaaaaggacaatgcaagaaaatcaacaggaatcaaaacgagccatggaagaaacacaacaaaaaatagagaatagaacagaaattggaagagaatgatggcaaattgaaaaagcgtttggaaaaatatgaaaatgaaatgaaagcctgctttagaaaaagttagagaagaaacagaaaggaaactggagatgcaacgagaagaaatagaaactaaaatgaaggatattaagaatgtgcagaagatggaattagaacagttagaaagcaaatttgaaaatgcaatacaagaagacaggcgagaaatagaagaaaaatttaagcaaaacgaaaaacaaattgcggaactcaagaatcaacagaattgtggagaaagaagggaaatgattatccatggtacaagcgacgcgaaaatacaatttggcggggatattagaaaaacacacccagtaccatttgttaaaaatttgagaaccaaattgcaacatattagatattttgacgactgcaaagaaacaattagaaaccatctgaaagaaggagcagcgttatggtatgaaagtaaagaagatgagtttgaaaattggacagatttcgaaaataaatttctcaactatttctgggggaaagttaaacagagggaaatcaaccaagagctacagaatggaagatatcacgagaaaatgggaatatcggaagaaagatatgctttgcagatatataacaattccaaatatctagactacaaatactctaccgaacaactggtagaaatgataagcagacatttcgaagaaacgctggaggaccacgtgattttgagaaactatcaagatattgatagtttgtgccaattccttcaagtaagggaagcaaaaagaagagaaatgcgaaacagaagacaacatgaacaatataatggaccggcaagaaggtatcaatcaaattatgaccagagaaaccgacatgcccaatcaacaaacgaagataggccgagagaataccaaaattacaatagacaacaaaattatgataacaggaatcacgcaaaaaatagaacatatgaaaatcacaacagaaacagagatgcacaaaatcctccgactaggaatacgaacgaacaaagggacggtagaaacaatcagaatttccaacgacaaaatagaagggagatgaatcatgtaacaatagaaaacgaggaagaagatgtatgcaatgaatccagacaggattttcaataaagcatccactgaacaaacataaacaactctccggtatatttgtcatccgagagagtttatacagttggcgggaaatgaaagacaaagttctaattcaaatttaatattcttagatgcatttataaaacataaagcgattaaaattttgattgattctggatcggagatatcgttaatcaataagaaactagtaaaagaattaaatttggacagatttgtgtataaaattcctagggttgctttagtgggtgcaaacaacaaaaaattgacgacagtaaatgaaggtttgggagtgcggatcagagtgggagacaaatactatattatgcaatgtgtggtgatcgaagatttaaaccatgatatgatagcgggaattgatgaattgagtgaaaaacatatcaccataaatttttcggagaataaactggaaatcagagcagaaccagacaacatagaagaagaaatggaaatagataggaaaataattgttgaaaagataaatgaacaggaaaaacataaagaaatcaatatgactgtagaggaaaaaccgaaagtacaagaaaaaaatcaaccagaaaaaaaaaaagaaggaagaaaaagaagaagagttcaaaaagaaagaaggaaaacacggtggatacaagagaaagacaggaaatcgaagatacggaagaattgtcggcaatcgacgataaaacagaaaggaagcaggaagaaaaggaagttctcataagagaaatgaaagcagtagaaacatggtgctcgggataccaaatggaaattgaagataaaaaaaaaacagaagaagaaataaaggatgaggacagagaagaaatggcaataatggacgagaatccagaattttatgaagaaatattatggacagtgaacacatgcgaacaaaatgaggatgaaagaaaattaaaatgtggagaaaacatggaaaaggaagtagagaagattctagaaaattatggagatttgattaatgaagaaagccgagtggctaaaaattatgaacattcttttaaagttaaaaacttagaaaattttaaatccaagacatatccaatcccgtataaatacaggcaaagcgtcggacaggaaattgaaaaaatgatcgaagacaaggtgatagaaagatgtgactctccatatatcaacccgatagtatgcgttaaaaaatcgagtggtgatttgcgattatgtttagatgcaagaaacattaattcacacacaatcgcgcaatacgaagcgcctttgaacatcgaagccatatttggacgaatcacagggtcacacattttttccaaaatcgatttgaaacatagtttttggttaatacctttggcagagaaatgtcgaaattataccgctttttcgatcgacggagtggtataccgatttagggtggtaccatttggcctacagagtgcatgcgctgctttggttcgcgcattgaacacaatcttaaataggcatgaagaatttgttgtacattacatagatgatttattaattttctcaccagatataacaagccatctacgacatattcacactgtgctagaagaactggatcaagcgggattgaaattaaatattcaaaagtgtcagtttttccaaaaggaaatactgtatttaggattcaaattagacacaaaagggattagtcttgcagaagatagaatcgaaattataaataactacgctaggccaaccaatttaaaaacattgcggggatttttgggaatggtaaactatttcaaaaaactaataccagacatcagcacaaaagaaataccgttgatagcattacttaagaaaaatgttaggtggaaatggggaacggaacaagaaatggctttcaaaaatttaaaaggagctttctccacagctgtaagagtacaccacccaagatatgatcaacctttcattctccggaccgatgcttccataacaaaattcgcaggggtgttatcacagatccaagacgatgtagaggtgccaatctgttttgtctcccgtgtaaccaaaacatatgagagaaagtacagcgttactgaattagagttcgccagtgtgttattttgtgtaaataaattacggttttacctactaggggcaaaattcaccgttgaaacagaccatgcagctttggtacatataatgaaaaataggctggtaaataatagaattcataggggcattcttttacttcaagagtatgattttgaatttaaatatatcaaaggaactgacaatatcttggctgatgcgttgacgagagatgaacaattccgcaaagaggaccacaaaactctccacgttggcatgaacataatgagagaagaagcaggcttatttctttggctcagatcagggaaaatcaggaacaactggatgaaagagaaaagcaaagggccgaacaagaagataacttatattttaagagggtcgatggtaaagaactatatgtaatcacggaacagatggcaaaagaagttttagcaaaattacactgtgacaacggacacattggaagcaggaaggtgtggcttatgttcagggagaactacatttgtcgacaggactatacaatagccaaagagatgactcgaaattgcgagacatgccaaaagtgtaaaagtaagaatttcaaaaacgaaaacatcacaaaaaacgtcatagctcggaagaaactggatattgtcgccattgatatgttgagcgatttaataacaacaacacagaggaataaacacatattagttatggtggatgttttctcaaagtatttaaaactgtacccatgtagaaccacgaaaggagctgaaatacttcggaagataga

SEQ ID NO: 4448 - DNA, 913 bp, Diabrotica virgifera
atttatcatatgtaaagcaaaggagatattgaagcacgagaatataaaaccctgagattagagcattaaatagtgtgattaaatcataagtgcatcattaaaattaaatttaattaattagttaattatctaatcaattgctttgagcacaccgatctttgaatatcacattaactggagcccagaacgtggtggcttaaaaaatatcgcagctttgcatttgatggtagggaaagagataaggaataactacaggtgatccagagataatttgacaatttttccaggtgtaaaaatatttttgatttatggattgatcgtaggtagttgatatttactgctattgaattatttaatatttttaccaatcgtacatttgatatttattttgaaatttactgattgcatatttgatatttgtggcgaaaatttattaaatttggggagaaatatttgtcgtgttctgcaacttatagagtgttgtaaaatttcacatttggcggggacaaagaaaacagtaacaaaaagaaacaacatgtcgaccacaaggaggcaaagcaaaatgcaagaaagcagagagaataacagagaagaggaaaaaattgttgaagaaggattgggtaatgaaggagatacaacgattatggagagaaaagaacaggaattaacaggaatagagaaactattgcaactgatgcaactccaatcacaacaaatggatagaaatcaacaggaaacaaaaaggacaatgcaagaaaatcaacaggaatcaaaacgagccatggaagaaacacaacaaaaaatagagaaaaatcaacaggaagcaaaacgagccatggaaataacacaacaaaaaatggaagaaacacaaagagaaatatcacagagaatagaacagaaattgggagagaat

SEQ ID NO: 4449 - DNA, 3240 bp, Diabrotica virgifera
  SmartBlast Evalue=1E-51; Info=Chromodomain Y-like protein n=1 Tax=Harpegnathos saltator RepID=E2BY40_9HYME
taataaagatcgggttatcgtggtcgttgagcgtgaaagaagacatatcaggcgccaaggcgttgatgccagacgtctcggccgctgcgttctcttcgggttcttgttgaatagcggccggtacttgggtaatcgacggttccgaaaccaccgccattttatgtgcttcttcaggttcgtgtgcttcgagggcggctatcgtttgcacgggctgaacgggggcttgttttggtctcggttgtgcaggtttggttgtcagaaggaggtcgtcgtcacttatcaaagaaggcatattgataactgttttgggtttttgttgtatctttcgttctactctctccggctggcctctaacttgcatgggctcccttctcacctgcgtctgtaccaccttttgcaccaatcccgaactggttctgacgtattttgttgtttgaactttatgctgattgttggctgcagacacacccgcgggagaactcctgatggtggtgtttccaatttttcgcatcgtaggtgaaggaacgacttgtctagtgaaggaatatacgtttttaggcgatgtattatggtccggttggatgaacttctctgacatatcgctggcaatgttaaaccttggtttgggggccaccggttttgtcctgacgaaagtttttgtttgtctcactacgggatttacaatgggccgtgccatcgaatggttcaggactctttgttgtttttctgcagatccggttaccgcccttcttatgacctgaggacctgtcagggccttgtttagtatggaagtcgggtttgctattaccttgcgagaggtaacaggcattttaactacttgtttcgtagaagcagcggtggggaatcttctttcaggtacaatctgaggttcagtcttaataattttcacaggttctggtgcttgaaccagatggtgcacttcaatgtccatgggttcttcctgaggctcgttcttcaagtcctcttctgttatatcagctgctgccagcttcactatattatctagcgacatgtctgatttggcttcttcgattggctcgggttcatgctctgggtattctacaccagctatttttccagttgtaggatccaaaataaagtctttgtctgcttcttcttcttccggttccggtaatttgatttcttctgggaacggcagttcttctaacccatcatcagattcctcttctctactctcgacttgattgaatttcaagaacgctttggggcccggttttggagccaattctggaagtttcttgacgaccatctgtttcttgtcaatgtccatcttggttggtgtcagtacttgttttttgagaacttccgcctttttaggtgtagctggcgatgctttcagttctgataatgattttttagctttcgtcaggtgacttttcagtgcttttggtgtttgttgaatattcttagggctcatttggacaacctgttgtgttgatgtaccatctttcttcatgatttttatatgagtctgtccaattttaggtgccactttcacgatcatctggccgctgcttgtagctactttagatgtgctggagtccaattttataataccagccgttttcgacatgatgtatactcctgtgctcaaagaaggcagctgcttctggttgatcctaaccaccccgttggcgtccggtatgagaatgttctgcggcaaaggcgtgtttttaccaacgccgtttttgatcacctgcaacggagacgctggtggcttgggagcgattttcctcaatggcattttaggctttgacacttctccgtctgagtcttcggacatttcttcgaacttcattcttttttcgctaaaggaatcgtcactgtccggagatcgagggcgtttcatactgatgccctcttcgtctgaaatgtttccgcaccacgactttacttgctctagagctttttgtttgctcgttctttgtggacgatttttaggtcctgttccggctagtgaaggtgaactgaccgctgagactatctgcttcactttgggagtatttttgctagcagctgcagcgatttgttgttgcttggccttttccgctttcaatttcttcagttgttcttcgaactcatccaccatttgtctgcagtgattgagatttgataaaggttcccaggtgttgtgttcacttgtgaagtgctcccacttaatttggtactcccaagtcttcttcttggggttaaacctctttgctgcaattttttccacagcgtattcgcttttatctagatttggagcagatctcatggccttgttagtgttagcactgttgttatttatcttgacttcggtcaccttggcagtctccaacttgtggcaatactgcagaagctccccggctgatatccacgaagttttgtcactttctggtagagcacaccacgttttgtacagctcccattgggtttgtcctcgtccgggctcctctttcacttgttttgttttccataaagtgaacgcccaaacttgtgagttactgtcgtttgataatgttgagtttgactttgccgagcaaatttttgacttgtgggtcttgaattcttctacgaagtggaatacttgatggcaattgccacacacaagcacatctacctttccaagatcttgttgagcatttttaatcattagtggatcctgcaacacatcatcagctgccaacatctcttccaaatcagaatccttcattataggagttggcttgctctctgtatgcactttactttcaggaacattaacttcctcaggcttttcagactcagcgtgtttctgaaccggttctgtttctggctggacagattcctcatgcatcctttccagctcttcttccagtgaatagacaggttccttttgaacatccttcatcgcctctactggtgcttcggcaagatctttaggaggctctacgacaggctcttcctgtccctctggtttttcattaaagctcatatcttctgttgacatgtcattgggttcatcaggtaggacaagtgcaggcattgacaggtcagaatcagcagcattgctattttgatcatcattagcttgtgattcagaggttggattttctgatgtaaatgagtctaaaaaggaatctgtctcattactcgttgctgcagcagacagactaacatcatttaactcagaaattagagtattatcatcgttcccaacagcagactcaatgtttg

SEQ ID NO: 4450 - DNA, 2457 bp, Diabrotica virgifera
  SmartBlast Evalue=5E-30; Info=Chromodomain Y-like protein n=1 Tax=Harpegnathos saltator RepID=E2BY40_9HYME
taataaagatcgggttatcgtggtcgttgagcgtgaaagaagacatatcaggcgccaaggcgttgatgccagacgtctcggccgctgcgttctcttcgggttcttgttgaatagcggccggtacttgggtaatcgacggttccgaaaccaccgccattttatgtgcttcttcaggttcgtgtgcttcgagggcggctatcgtttgcacgggctgaacgggggcttgttttggtctcggttgtgcaggtttggttgtcagaaggaggtcgtcgtcacttatcaaagaaggcatattgataactgttttgggtttttgttgtatctttcgttctactctctccggctggcctctaacttgcatgggctcccttctcacctgcgtctgtaccaccttttgcaccaatcccgaactggttctgacgtattttgttgtttgaactttatgctgattgttggctgcagacacacccgcgggagaactcctgatggtggtgtttccaatttttcgcatcgtaggtgaaggaacgacttgtctagtgaaggaatatacgtttttaggcgatgtattatggtccggttggatgaacttctctgacatatcgctggcaatgttaaaccttggtttgggggccaccggttttgtcctgacgaaagtttttgtttgtctcactacgggatttacaatgggccgtgccatcgaatggttcaggactctttgttgtttttctgcagatccggttaccgcccttcttatgacctgaggacctgtcagggccttgtttagtatggaagtcgggtttgctattaccttgcgagaggtaacaggcattttaactacttgtttcgtagaagcagcggtggggaatcttctttcaggtacaatctgaggttcagtcttaataattttcacaggttctggtgcttgaaccagatggtgcacttcaatgtccatgggttcttcctgaggctcgttcttcaagtcctcttctgttatatcagctgctgccagcttcactatattatctagcgacatgtctgatttggcttcttcgattggctcgggttcatgctctgggtattctacaccagctatttttccagttgtaggatccaaaataaagtctttgtctgcttcttcttcttccggttccggtaatttgatttcttctgggaacggcagttcttctaacccatcatcagattcctcttctctactctcgacttgattgaatttcaagaacgctttggggcccggttttggagccaattctggaagtttcttgacgaccatctgtttcttgtcaatgtccatcttggttggtgtcagtacttgttttttgagaacttccgcctttttaggtgtagctggcgatgctttcagttctgataatgattttttagctttcgtcaggtgacttttcagtgcttttggtgtttgttgaatattcttagggctcatttggacaacctgttgtgttgatgtaccatctttcttcatgatttttatatgagtctgtccaattttaggtgccactttcacgatcatctggccgctgcttgtagctactttagatgtgctggagtccaattttataataccagccgttttcgacatgatgtatactcctgtgctcaaagaaggcagctgcttctggttgatcctaaccaccccgttggcgtccggtatgagaatgttctgcggcaaaggcgtgtttttaccaacgccgtttttgatcacctgcaacggagacgctggtggcttgggagcgattttcctcaatggcattttaggctttgacacttctccgtctgagtcttcggacatttcttcgaacttcattcttttttcgctaaaggaatcgtcactgtccggagatcgagggcgtttcatactgatgccctcttcgtctgaaatgtttccgcaccacgactttacttgctctagagctttttgtttgctcgttctttgtggacgatttttaggtcctgttccggctagtgaaggtgaactgaccgctgagactatctgcttcactttgggagtatttttgctagcagctgcagcgatttgttgttgcttggccttttccgctttcaatttcttcagttgttcttcgaactcatccaccatttgtctgcagtgattgagatttgataaaggttcccaggtgttgtgttcacttgtgaagtgctcccacttaatttggtactcccaagtcttcttcttggggttaaacctctttgctgcaattttttccacagcgtattcgcttttatctagatttggagcagatctcatggccttgttagtgttagcactgttgttatttatcttcggaaccgtaggaacaggtttaggtttattaataactgttcgttttacatcgagcaaaggcgatttagaattatcaactgaggaattttccttattactatcgaaaccatccaaagaaagcg

SEQ ID NO: 4451 - DNA, 2866 bp, Diabrotica virgifera
  SmartBlast Evalue=3E-83; Info=Transferrin n=1 Tax=Harpegnathos saltator RepID=E2C2G6_9HYME
ttagaccacctttcgcgtgggcgacttcccgaatcccactctgaaatgtctcacgaactcgattatgcaaaaaatctcatgggaataccttctccaaagaacccgccgccttcgccttgtctatttaggtgtcatgtttttggtcccagaaattcgaagagcgaaacattatcacttttcaggtaagttatttttgaaatgtatactgttttataaacattaggttatgtgttgatagtcagtaaaggcgtttagttaatttaataaataaattattatacattgaatacttaacaacttccattgttttttttatttttttttattaaaatcatttaaatataatttttctaactagtttagatttacttttgatgaaaactcattaaccctccacttccataggtatttatggcaccaaattatatattaagcagaggcaactgctgggtctataatataaatataatatacgtcattggtacttaatgcaataaatatttatagtattttaaatataataacacttatacattctatgaacctgagttttgcaaaaaaggagagcagtcctagttaggtaactatacaaatcaatatctaaaatcttacaataagcattatcacggtcaataaaatagtggatggaatgatgctataagcgctattggggtttactatgcagtcttcggaacgcttcaatagtcctttgtagttttctacgtatttggcagtgaccccgctaccgtcaacgtcaattcctggagtgttatctgggaagagtaaatctgattcgccgttaaacctttcgtacattctgaacgggcttctaagatgttgtgcgaattcaacgtcaattccatttagtaaaaatctaatatcttcttttttaggagagtctttctggataagaacttgacctgaagtaatcactgccagtgctatatcgtccatgttgggatcaaaccagaagtttgtggttacgacagaaccatttttcgccagaatttggaaatctttagatccgttgaactctttgatatcttttagagttataacagcatattctccagcaccacttgaaagacatcttaaggcaccatcggttccataatatttattatcatcatctgcgttacaataaactgcggtatgtaaattcgaaacaggaatgcattgtgcgcacaacttatcactatccccggtgctaaatccgaaatctttggatcgggcgtcaggcacgcaactgctaccgacgaaatcgctgaatattgcactgtaatcgcaagacttctttgagactatgttctgtgtcctcaatgtgtcaataaacaccagccattctcttccaccatatcgagggaaacaagattgctttccttggagatcatttaaactcttaatgcttgtgccgttcttcacagctattactacgtaagaaatattagtcttgaaggtttctggataagcgataggttgcaagcctttcttgagagcaatatatccataagtaacgtcggaatacatcacatcagatttattgttttgtagatcaattaagcaagacaccgtatcgttatccgaactttgtttgcaatctacgacaggttcaagaccaacgtttaaggcagcttgtgcgaaccatttacatttttgctgttctttgtcattcaatgtgcaccagttaactacttctttacaacgagtgttattcgaaagtgatgggatagatctgatacctgctacatgcttggaaagtgaagtgtcaggaagataattaattttatcagtggacttcattttaagaagttctagtagagagtcttttatagggagcattcctaaactttgagatgcaaatgcggtgttagctggtaagtttttcttcaggtagtccgagacttcattgactctagtccttcctgttacgatcagtctattcagttgtttggtccatacgcaaggaatggtcgtgctaatagtgccattaggacaaagatattggtacctatcagcattggtacttttgtttagaaatactaaggctctggaaaggcttgtgacggctacatctccaccagattcaaggcaattcaaggaatcgttgaatggagtcttgtagttgacgttgcatttttcaggtccacaaagatcacataggttggaatatttagatttaagatttttatctaggtcatcattatcttcaacccatggacctggacgacaggcacttccaaagaaatttgataaaacagatagttctttttcgatgagtgttgatgcttgtttattctcacagtacgtctgattggcatcaataatcttcttttcgaattcattcagcacgaatttcgttacgagttcatcatgaacaaatccaggatggcagaacctctttccccttaagctctcgaagttagtgtattgtttgcgaacaacgacgactgtctgatacggttggttctcaccaacaatttctcctatcacagaaacattatcggaagcaaaacttgcccccaaaagggcttcttcggggtccaaaacagcaaactgatcttcgcctctatcaatatgcaaaacgcagctaacctttgatttaacagtatcgcattcgtagggttcagtaccacgggcaacattaccacaggctgcgtctaagctgttgactgttgtgcaaattttatttccctgctgttgtggaaaaacatatccagttaggcacgcaaccagaataagaaatacacttttgtactggtttggcataatggcacactaatttaagaaatgatttagatgcgtttactgctaaaaacatctacaaaactaacttaaaaatgtttcatgtcgcgcgaatgccaaggcg

SEQ ID NO: 4452 - DNA, 2806 bp, Diabrotica virgifera
  SmartBlast Evalue=9E-84; Info=Transferrin n=1 Tax=Harpegnathos saltator RepID=E2C2G6_9HYME
ttagaccacctttcgcgtgggcgacttcccgaatcccactctgaaatgtctcacgaactcgattatgcaaaaaatctcatgggaataccttctccaaagaacccgccgccttcgccttgtctatttaggtgtcatgtttttggtcccagaaattcgaagagcgaaacattatcacttttcaggtaagttatttttgaaatgtatactgttttataaacattaggttatgtgttgatagtcagtaaaggcgtttagttaatttaataaataaattattatacattgaatacttaacaacttccattgttttttttatttttttttattaaaatcatttaaatataatttttctaactagtttagatttacttttgatgaaaactcattaaccctccacttccataggtatttatggcaccaaattatatattaagcagaggcaactgctgggtctataatataaatataatatacgtcattggtacttaatgcaataaatatttatagtattttaaatataataacacttatacattctatgaacctgagttttgcaaaaaaggagagcagtcctagttaggtaactatacaaatcaatatctaaaatcttacaataagcattatcacggtcaataaaatagtggatggaatgatgctataagcgctattggggtttactatgcagtcttcggaacgcttcaatagtcctttgtagttttctacgtatttggcagtgaccccgctaccgtcaacgtcaattcctggagtgttatctgggaagagtaaatctgattcgccgttaaacctttcgtacattctgaacgggcttctaagatgttgtgcgaattcaacgtcaattccatttagtaaaaatctaatatcttcttttttaggagagtctttctggataagaacttgacctgaagtaatcactgccagtgctatatcgtccatgttgggatcaaaccagaagtttgtggttacgacagaaccatttttcgccagaatttggaaatctttagatccgttgaactctttgatatcttttagagttataacagcatattctccagcaccacttgaaagacatcttaaggcaccatcggttccataatatttattatcatcatctgcgttacaataaactgcggtatgtaaattcgaaacaggaatgcattgtgcgcacaacttatcactatccccggtgctaaatccgaaatctttggatcgggcgtcaggcacgcaactgctaccgacgaaatcgctgaatattgcactgtaatcgcaagacttctttgagactatgttctgtgtcctcaatgtgtcaataaacaccagccattctcttccaccatatcgagggaaacaagattgctttccttggagatcatttaaactcttaatgcttgtgccgttcttcacagctattactacgtaagaaatattagtcttgaaggtttctggataagcgataggttgcaagcctttcttgagagcaatatatccataagtaacgtcggaatacatcacatcagatttattgttttgtagatcaattaagcaagacaccgtatcgttatccgaactttgtttgcaatctacgacaggttcaagaccaacgtttaaggcagcttgtgcgaaccatttacatttttgctgttctttgtcattcaatgtgcaccagttaactacttctttacaacgagtgttattcgaaagtgatgggatagatctgatacctgctacatgcttggaaagtgaagtgtcaggaagataattaattttatcagtggacttcattttaagaagttctagtagagagtcttttatagggagcattcctaaactttgagatgcaaatgcggtgttagctggtaagtttttcttcaggtagtccgagacttcattgactctagtccttcctgttacgatcagtctattcagttgtttggtccatacgcaaggaatggtcgtgctaatagtgccattaggacaaagatattggtacctatcagcattggtacttttgtttagaaatactaaggctctggaaaggcttgtgacggctacatctccaccagattcaaggcaattcaaggaatcgttgaatggagtcttgtagttgacgttgcatttttcaggtccacaaagatcacataggttggaatatttagatttaagatttttatctaggtcatcattatcttcaacccatggacctggacgacaggcacttccaaagaaatttgataaaacagatagttctttttcgatgagtgttgatgcttgtttattctcacagtacgtctgattggcatcaataatcttcttttcgaattcattcagcacgaatttcgttacgagttcatcatgaacaaatccaggatggcagaacctctttccccttaagctctcgaagttagtgtattgtttgcgaacaacgacgactgtctgatacggttggttctcaccaacaatttctcctatcacagaaacattatcggaagcaaaacttgcccccaaaagggcttcttcggggtccaaaacagcaaactgatcttcgcctctatcaatatgcaaaacgcagctaacctttgatttaacagtatcgcattcgtagggttcagtaccacgggcaacattaccacaggctgcgtctaagctgttgactgttgtgcaaattttatcttgcaaactagcacctatcattaacataagaacaggtaaaattttcattttatcaacgttatcacaattacttttcaaattcgattttccacctgttgtaactataccacggcgcgcg

SEQ ID NO: 4453 - DNA, 2895 bp, Diabrotica virgifera
  SmartBlast Evalue=1E-176; Info=Serine/threonine-protein phosphatase 2A catalytic subunit beta isoform n=71 Tax=Metazoa RepID=PP2AB_HUMAN
gctgcctcttggactataaggtggaatatagatggagaaggatgcaaggacaggacaccagtaagcaggatgaaaggataacaagattaaatctgaaatcatctattaaatgataataatcatctatagtttgaaatagtagtgctggtatacagactgctcgaaaaccgatgaagatgttggagtattcaggggaaccaatgctaagccttagtgaaagcttgggtaattatcccactatcttccaagtagaaattcatgctagagatgtgtgtttgtccgaactagcaaggataagtatataaaaattacatcagacagccaggcagcatttaaggtactggaatcgaattgattcggatcagaaacaataacaaagtgagtttactatgggtacctggataaactggccttgaaggggcgaaaaagcaccccagcttaccagttaagggacaaaaaaacattaatgggcccaaaatctttcgttgtcataggaaggggcacatccaacagaactatacaggatgtccccgaaaatagtacgcttccttaaaggtataggtagaaggcaccatgtagaacaaaaaagtcttataacatttctttctaaattcaaccgtttgaccaaaaaatcaaaatacattttggtatgcaaattgaaatctgacaactatgtatacaaaaatctgaagataaagaatcacaattcaaaaatagttgcagtatgggcctgtagtatttacgttaaaccctgacttcctcctcaacaaacaaacaaattcttgttttgtttgcttttcaaacatgggatgatataattattttgcaggtgtctacctttctgacatacttttttggtgtcaataacctaagtcacccacagttcttgtacagtgatgccaaattattcaattttatggaaataaaagttcgcttatatggagaaccatataagtggattatatccaaaccttaaaggaacacactattttcggggacaccctgtataggcctgagtgaaatggatgtaatgtatccactgctagcaacaaaatgggtctcagacactcacaggctttaatacatgaatcttcgaagatgtgatccaaagatctacgaatgcgtaggtcttcttgaatgacactgtcgtctccacgtggtttcagatgtctttgtttagaatttttagtgtatgcacatgagtctaggcttaaaaagtactcctataacttgccattgcagcttgaaagatatagcagtttcgcttttataaaaagtatttctaaatgcaagattaggagtgtagacagtccacgtattcttttaatatatacaaatacaagcacaatgcgttttggatgcatttctcttggtcttttatacaaatctagtagtactgggggatgaaaaaataaccagaattgcagcgatagacgcaacatacccattgtctcgatgaaaaccctcttgataacgatcgaaaagggggctctacataattctaaagggtaaataattgtaattacacagctagacgattctcgagaattaaatagtacaccaataacatacttacaatttatttatcgttatcaaaaaggaatcaaatataataaaaatattaagaataataataatcgtaataatataggatgggatgtggtgttcgtcagcgtcatcgcaatagactatatgatattttgttttacaaatacaattatactaagctttcttctttgtatttttttttgttgtatgatatattgcagttgaaaaaaaaacgtatcaataagaatgtttaaaggaaatagtctggagttctacgcgtaacatgaggttcgccacgtcttggtgctggatcaaactgtaagaatgaatatttcagggcatcatctaattccataatggccgcctggttaccgcatcggtagcaataattgggggcgctgaaaatggtcactacgtttctttcgtgacaccaattgtaaccctccatgacgagttgatgcgccctagatactaaagacagaccgttggtatggttgaacgtttctgaaatgtcctgtccgaaggtgtagccggctccacggggggagatgccccagcccccgcggtcgtcagggtctgaccagagaaggtcgcacatggggccttcatgaggtacctcttgtaaacgatcaagcgccctaatgtgatccaaggtgtcgatgctaggactcaatccgccgtgcagacagaaaatttgactatcgacgagcgctgttaggggcaaataatcgaacagatcggtgaagaatttccatacattcgcgtttccgtatttccttagacattcatcgtaaaatccgtaaacttgtgtgatttgtcttgattcgtggttgcctctcaaaattgtaattctctctttgtacctgactttcagtgctaccaataaggtgacagtctcaacagaatagtatccacgatctacataatctcccatgaacaggtaattagtgtctgggctcctacctcctatcctaaacagttccatcagatcgtggaactgtccatggacatctccacatactgttactgggcatttcacttcttgtacatttgattcttttgacaatatttctttagccttatcacatagtgttttaacttgattttccgttaattgcttgcattcatttaactgttctatccatccatccagctccttacacgacgccttatcgtccattattacaatgttttttatctttaaaataaaataattaaattactaacagatgaatgcacaaactggacaccaacttaattatttatattcctcgttagtactatcatttggtaaatctttttctaattacaaatacaacacaccaaaatggcgatatcttagcatag

SEQ ID NO: 4454 - DNA, 2767 bp, Diabrotica virgifera
  SmartBlast Evalue=1E-176; Info=Serine/threonine-protein phosphatase 2A catalytic subunit beta isoform n=71 Tax=Metazoa RepID=PP2AB_HUMAN
tgctgatatacagactgctcgaaaaccgatgaagatgttggagtattcaggggaaccaatgctaagccttagtgaaagcttgggtaattatcccactatcttccaagaagaaattcatgttagagatgtgtgtttgtccgaactaatactgaggaactagcaaggataagtatataaaaattacatcagacagccaggcagcatttaaggtactggaatcgaattgattcggatcagaaacaataacaaagtgagtttactatgggtacctggataaactggccttgaaggggcgaaaaagcaccccagcttaccagttaagggacaaaaaaacattaatgggcccaaaatctttcgttgtcataggaaggggcacatccaacagaactatacaggatgtccccgaaaatagtacgcttccttaaaggtataggtagaaggcaccatgtagaacaaaaaagtcttataacatttctttctaaattcaaccgtttgaccaaaaaatcaaaatacattttggtatgcaaattgaaatctgacaactatgtatacaaaaatctgaagataaagaatcacaattcaaaaatagttgcagtatgggcctgtagtatttacgttaaaccctgacttcctcctcaacaaacaaacaaattcttgttttgtttgcttttcaaacatgggatgatataattattttgcaggtgtctacctttctgacatacttttttggtgtcaataacctaagtcacccacagttcttgtacagtgatgccaaattattcaattttatggaaataaaagttcgcttatatggagaaccatataagtggattatatccaaaccttaaaggaacacactattttcggggacaccctgtataggcctgagtgaaatggatgtaatgtatccactgctagcaacaaaatgggtctcagacactcacaggctttaatacatgaatcttcgaagatgtgatccaaagatctacgaatgcgtaggtcttcttgaatgacactgtcgtctccacgtggtttcagatgtctttgtttagaatttttagtgtatgcacatgagtctaggcttaaaaagtactcctataacttgccattgcagcttgaaagatatagcagtttcgcttttataaaaagtatttctaaatgcaagattaggagtgtagacagtccacgtattcttttaatatatacaaatacaagcacaatgcgttttggatgcatttctcttggtcttttatacaaatctagtagtactgggggatgaaaaaataaccagaattgcagcgatagacgcaacatacccattgtctcgatgaaaaccctcttgataacgatcgaaaagggggctctacataattctaaagggtaaataattgtaattacacagctagacgattctcgagaattaaatagtacaccaataacatacttacaatttatttatcgttatcaaaaaggaatcaaatataataaaaatattaagaataataataatcgtaataatataggatgggatgtggtgttcgtcagcgtcatcgcaatagactatatgatattttgttttacaaatacaattatactaagctttcttctttgtatttttttttgttgtatgatatattgcagttgaaaaaaaaacgtatcaataagaatgtttaaaggaaatagtctggagttctacgcgtaacatgaggttcgccacgtcttggtgctggatcaaactgtaagaatgaatatttcagggcatcatctaattccataatggccgcctggttaccgcatcggtagcaataattgggggcgctgaaaatggtcactacgtttctttcgtgacaccaattgtaaccctccatgacgagttgatgcgccctagatactaaagacagaccgttggtatggttgaacgtttctgaaatgtcctgtccgaaggtgtagccggctccacggggggagatgccccagcccccgcggtcgtcagggtctgaccagagaaggtcgcacatggggccttcatgaggtacctcttgtaaacgatcaagcgccctaatgtgatccaaggtgtcgatgctaggactcaatccgccgtgcagacagaaaatttgactatcgacgagcgctgttaggggcaaataatcgaacagatcggtgaagaatttccatacattcgcgtttccgtatttccttagacattcatcgtaaaatccgtaaacttgtgtgatttgtcttgattcgtggttgcctctcaaaattgtaattctctctttgtacctgactttcagtgctaccaataaggtgacagtctcaacagaatagtatccacgatctacataatctcccatgaacaggtaattagtgtctgggctcctacctcctatcctaaacagttccatcagatcgtggaactgtccatggacatctccacatactgttactgggcatttcacttcttgtacatttgattcttttgacaatatttctttagccttatcacatagtgttttaacttgattttccgttaattgcttgcattcatttaactgttctatccatccatccagctccttacacgacgccttatcgtccattattacaatgttttttatctttaaaataaaataattaaattactaacagatgaatgcacaaactggacaccaacttaattatttatattcctcgttagtactatcatttggtaaatctttttctaattacaaatacaacacaccaaaatggcgatatcttagcatag

SEQ ID NO: 4455 - DNA, 2835 bp, Diabrotica virgifera
  SmartBlast Evalue=1E-162; Info=Ornithine decarboxylase n=1 Tax= Harpegnathos saltator RepID=E2C5W2_9HYME
attctacttcgcatttctattctggtatcaaggaccttgtctctttttcgtgataattttcacggaaataggcatggtattcgtagggtgcagcaaaatagtgctaaaatttgttgattgacgaaggaccgacgtgttttttacacacttgtttaaccaaaaactcaagattccaccgaaaacctttatcgaacccagagggtggctaccgaagggtcgtaacttggacgaagctagcccagatactagcagccttcttttaccctacaactggaaaattttcctaaacggcgaaccgccttggcagtgctgacaaaaatctaggagatactaagtcacacctaccttaataaacctgtgtgaatctgagcacaggctgcctccttgcttatttcatcgaaaatattcaactgtatttgacaaagacaccttataaccaaccaaaaacaaaatgaaaattccaagtgttgaagaacgcattcacgttttggatgaccaatcaaacgtatggacggtgatccgggaaatcgtaagcaacaacaatcaggaagatgccttttacgtcttggatgtcggagatatcgtcagaaaacatcaggaatggcgcgaaaaactacctcgagtcacgccgcactacgctgtcaaatgcaacgacagccttacagttcttgaaaccctcaacgccttgggaactaacttcgactgcgcttcaaagggcgagattaacaaagttctcagcatgggtgtggagcccgaaagaatcatctttgccaatcctgccaaaccttccagtcatatcagacatgctgcagccactggcgttaacactatgacattcgacagtgacactgaattgcacaaagttaagaatctctttcctgaagccaagttagtcattcgcattcgttgcgatgccactgatgtccaatgtcaactgggaaacaaatttggttgtgatcctatcactgaggctccagaactccttcgaatcgctagatcccttgacttggacgtcgtcggtgtgagtttccacgtaggctccggatgccgtgaaccgccagtttttcgtagggctatttcagccgcaagggacatctttgattttgccgaaactttgggctacaacttttctctgcttgatatcggaggaggatatcctggtggaaaaggaacttccatccatcagatcgctgaaattgtcaatctcgcactggacaattacttccctgatccatcagttcatgtaatagctgaacctggtcgtttctatgtaagctctgcctacactttggtgtgcaatatccattcaattagaaacgtcaatcaagtcaacgatgagggtggaaataatatgcaccgcatgtactacatcaacgatggagtgtacggcagtttcaattgcatcttgtacgatcatcaggttgtagtaccacagccactagaagaacgcgttggagcaaaatactacgacagcagcgtatggggaccgacctgcgatggactcgaccaagtaattgaacatgcaatgttgccagaaatgaaagttggtgattggttggtgtttgaagacatgggagcgtatacccttcccgttgccagcccttttaatggttttccaattcctaaagtccatatagtgatggacgagagcatcagtgttctgatggaggatatgtttgaactgaccgacagacacttcgagatgctgaccataccgaacaatttgaaaaataaaaatgattcctcttccaaatacgaacttcctgatttcccaatagccattggaaattcgattttagattacgttgacgtcgttgctatggaataacggtacaagaagtttggattacgatctgtaaagcgacttgaacggtcgctaaaaatccatttattttcgagaccaatttttaaaattaattttctttaaaaacttccaaggtgtttatgacaaatcttctaattttaactgtagtttaattatactaaaagcaaaattgctggatgggcctttgtacgaactatcaattgtttttactcatcaattttatggttgtccaaccttcaaaattcaaataaaaacaataattttattccttaagtcatataacgtaattttcagcaaaaattaagtgtaatttgaatttttaatgcatcaaaaaccgtacaggagcccaactaatagaatataagtgcaaaaatttgaaacgtactacaatggtaggttttacaatatcagttaactacacttaactaattaaccgttaaatttaacagctatgtagctgaggaagtgctataagtagcggttaaagttaggatctattagttaagcgccgattaacggttgtttgtaaaaccggtaataaatttatatttttaacgattattgataaggaaaaggatctatagcatttttagagttattaattaggtaaacggcagaatatttgtcataatactaaaagatttttaatatagatctcttttataattaattttgggaatagttaatgaaatatttctttttaaaatacttttgtaactttgtatttaaagttgggatgtatttgttaaatacaattagattattgggttggggttttatttttatcttctaatatttgtgaatgttattagataaaaattgtaatggccaactttggtgtgtaagcaagggggcagcttaaagcttttcgataatgaataaatgttttttgttaatatagttcctaatgtattttcgtcaaatttaatttgagtaaatagactaggatatatatttattcgctgtttagatttagattattgctgcatagaattaaataacttaaggct

SEQ ID NO: 4456 - DNA, 2818 bp, Diabrotica virgifera
  SmartBlast Evalue=1E-162; Info=Ornithine decarboxylase n=1 Tax= Harpegnathos saltator RepID=E2C5W2_9HYME
cgctagctaaagtcttaaatactaaaatacttcacatcgctcggttcgcgcgttttgtttgagttttccaaagtttttgagtgttcttttttaataccggtggctagatgacccgctggtagtcgacaaatttatccaaaaaaattttcatgtgttcatatgttataaacaaagtcccatttacccacggacttcagggtcgtaacttggacgaagctagcccagatactagcagccttcttttaccctacaactggaaaattttcctaaacggcgaaccgccttggcagtgctgacaaaaatctaggagatactaagtcacacctaccttaataaacctgtgtgaatctgagcacaggctgcctccttgcttatttcatcgaaaatattcaactgtatttgacaaagacaccttataaccaaccaaaaacaaaatgaaaattccaagtgttgaagaacgcattcacgttttggatgaccaatcaaacgtatggacggtgatccgggaaatcgtaagcaacaacaatcaggaagatgccttttacgtcttggatgtcggagatatcgtcagaaaacatcaggaatggcgcgaaaaactacctcgagtcacgccgcactacgctgtcaaatgcaacgacagccttacagttcttgaaaccctcaacgccttgggaactaacttcgactgcgcttcaaagggcgagattaacaaagttctcagcatgggtgtggagcccgaaagaatcatctttgccaatcctgccaaaccttccagtcatatcagacatgctgcagccactggcgttaacactatgacattcgacagtgacactgaattgcacaaagttaagaatctctttcctgaagccaagttagtcattcgcattcgttgcgatgccactgatgtccaatgtcaactgggaaacaaatttggttgtgatcctatcactgaggctccagaactccttcgaatcgctagatcccttgacttggacgtcgtcggtgtgagtttccacgtaggctccggatgccgtgaaccgccagtttttcgtagggctatttcagccgcaagggacatctttgattttgccgaaactttgggctacaacttttctctgcttgatatcggaggaggatatcctggtggaaaaggaacttccatccatcagatcgctgaaattgtcaatctcgcactggacaattacttccctgatccatcagttcatgtaatagctgaacctggtcgtttctatgtaagctctgcctacactttggtgtgcaatatccattcaattagaaacgtcaatcaagtcaacgatgagggtggaaataatatgcaccgcatgtactacatcaacgatggagtgtacggcagtttcaattgcatcttgtacgatcatcaggttgtagtaccacagccactagaagaacgcgttggagcaaaatactacgacagcagcgtatggggaccgacctgcgatggactcgaccaagtaattgaacatgcaatgttgccagaaatgaaagttggtgattggttggtgtttgaagacatgggagcgtatacccttcccgttgccagcccttttaatggttttccaattcctaaagtccatatagtgatggacgagagcatcagtgttctgatggaggatatgtttgaactgaccgacagacacttcgagatgctgaccataccgaacaatttgaaaaataaaaatgattcctcttccaaatacgaacttcctgatttcccaatagccattggaaattcgattttagattacgttgacgtcgttgctatggaataacggtacaagaagtttggattacgatctgtaaagcgacttgaacggtcgctaaaaatccatttattttcgagaccaatttttaaaattaattttctttaaaaacttccaaggtgtttatgacaaatcttctaattttaactgtagtttaattatactaaaagcaaaattgctggatgggcctttgtacgaactatcaattgtttttactcatcaattttatggttgtccaaccttcaaaattcaaataaaaacaataattttattccttaagtcatataacgtaattttcagcaaaaattaagtgtaatttgaatttttaatgcatcaaaaaccgtacaggagcccaactaatagaatataagtgcaaaaatttgaaacgtactacaatggtaggttttacaatatcagttaactacacttaactaattaaccgttaaatttaacagctatgtagctgaggaagtgctataagtagcggttaaagttaggatctattagttaagcgccgattaacggttgtttgtaaaaccggtaataaatttatatttttaacgattattgataaggaaaaggatctatagcatttttagagttattaattaggtaaacggcagaatatttgtcataatactaaaagatttttaatatagatctcttttataattaattttgggaatagttaatgaaatatttctttttaaaatacttttgtaactttgtatttaaagttgggatgtatttgttaaatacaattagattattgggttggggttttatttttatcttctaatatttgtgaatgttattagataaaaattgtaatggccaactttggtgtgtaagcaagggggcagcttaaagcttttcgataatgaataaatgttttttgttaatatagttcctaatgtattttcgtcaaatttaatttgagtaaatagactaggatatatatttattcgctgtttagatttagattattgctgcatagaattaaataacttaaggct

SEQ ID NO: 4457 - DNA, 2902 bp, Diabrotica virgifera
  SmartBlast Evalue=1E-116; Info=p130CAS n=1 Tax=Culex quinquefasciatus RepID=B0VZE9_CULQU
ctatttctgtaatagatgccaacttcagtctaggaatttttattttatcacactttttcacaaagctgtcgcaaaatggcttaattacaatatgatagtattaaaaaccacatttttcgtattaatacgaattttatattcactgaatttaattagcaatttgattttcctcttctatataaatatagttttaaaaatggtcaaaattataatttttatcgttaacaaggtatgttatattgaaataatacagttttgtaaaacagaatagtattttataagctatacaactccagctcgatcctaaaaaagtttcttagttttttcaccttatagtgcaggagctagagtgggtgagtagggcatttttctgacccctcgataccttgagttttttttgttttttttttgggcgtaacatgggttgttttttgtgcgtttgttttcttttcgtttttcacgaaatttgttataacttcggttctaacaatcagatcaaaatttaccaaacgccattttgttcatttttccaaaaggaacaattttcatttcggtaaaattaaacatctctaataatttaaaagatataatcatttaaacaattaaatagttaacaacaaattatctgacgcatttttagtttggtgccctcgaaaattaaaatttacgcaccaaaaaacaataaaaaaaaacgtcaaagtaccgaggggacataatagtgcataatacccaaaccctggctcctagctagaataggggtttagctgaacatcaacatgtcataatatatgtcactttgcacagattatccatcagaaaaatcttgttttgtgcgtcaaatttgcattaaaatttgcaatagtatctgctctaatcacatactcaatataacataccttttaaaaaataaatatgtaagggtatggtttaaaaggaaactgcagcttgtaccaagcatacctttaaatccttagctgaatgagaaatatctacaacagagtcgaccatttcctgaacagcattgacagaagggaattgcatcgcagcttgcttagtcttatttacactggtcgctaaagcatctgaaagagcattggcataactcaaagatctatcctttatatctctgcacgtgatattccgatgcactgtatcacctattaggaccaatttgtgagcactgagaaccacaaacttgccgtgagccaaaaatatttttggtggttggttgtgttccactgtctgcaagaatgcgtctatagcatgtgtcaaattcgtgtgatgtgtaaccacctgcgttgcgtaaaacgccaagagctgtttgtcgtcaggatctaatcctgctgtcttatggtcaacgtcgaaagctacatcatcagcatgtttaacacagttgtcgtagtctttctgtaagttctttggtaaagttttcattatatctgcgtggttcttgttaatgttttcttttgaatctaagcttacatagtcatattcttcgttccattcgttcgaagactcttttttgaacaataacgtaccattgccttgaatgaacgatgctatctgtcgaatatcttccgttaacgctcgcgagcaagcaactagttgttctaattcgtcaggtttcttcacgcattcttcatcaagcggccttgaaagaatgtttaaagaccagttgtgtttattaagtttttctgaaacttcttgtaccagggtgtttgctttcctgattgctaaaactaagggagataatttgccagccaaatttttatcggaagctctagctgcgttccccagcgtcccttctccaaactcagccagatcttggagagacgtgcgcaatcgtgtcgctgatagtttaatttccattaaatttgtttctagcttgtctttcgtcctccattgaggcccgacaaatcctaataactttgatattgcactggtggtgtcagtctgtaatctctccaagttttcaagggctgaatttagctccaaaggcaactcttttgtaacgtgtgtgggtacgtcgtaatttgaagtggattggagaactaattgggggcctctgttgtaaggtttggggacgtcgtagtcgggcatattggctaaactgctacggtttgacgaactaagtgaatccgctgttagagaactagccgaactagagggtgttaattggttctgaatgcctaaatgttgtctgggaatgtcatatgtgtcacctgaatctctattgatcggtgaggcacatgatggggctggggagcatcgggggcaattcctaaaactttcattacctactggtactggtcggggaggtacatcgtagcagtcgttctggtcccgagttatcgtacccgggctaactcctgaagaaactgaaatcggagaacatctcgatggaggcatgtcgtataaaaatacatcgttgaattttttgggagttacgacctggttaggaaggacgtgccaacttcttctctttccctgtcgttgcaaagagataaaatcaccttggtcggaaaattggttcggagaaatacctctgataagttgtccagtgtcttcaaatacaccaggaattaatcgaagtctgttcgcaggacatattccctgttttcctcgtagggaacaaagccaccatccttcgatgttcgctgtgttttgttccagtacaactaaagtgtcacctttccgaaattggagctcgtctggggtatcggggacattatcgtagagtgctcgggctaaacaatgctgtgaggaaatgtccatttgttgaggcatgacacacaaccaactaaataaaataataaataaacgttaacagaacatagtaaatacacaaaaattcatgtaaaattaacgaaaaacacttcttaacctcctctctacaaagctt

SEQ ID NO: 4458 - DNA, 2746 bp, Diabrotica virgifera
  SmartBlast Evalue=1E-116; Info=p130CAS n=1 Tax=Culex quinquefasciatus RepID=B0VZE9_CULQU
atataaatatagtttaaaatggtcaaaattgtaatttttatcgttaacaaggtatgttatattgaaataatacagagttttgtaaaacagaatagtattttataagctatacaactccagctcgatcctaaaaaagtttcttagttttttcaccttaaaacgagttttttcaccttatagtgcaggagctagagtgggtgagtagggcatttttctgacccctcgataccttgagttttttttgttttttttttgggcgtaacatgggttgttttttgtgcgtttgttttcttttcgtttttcacgaaatttgttataacttcggttctaacaatcagatcaaaatttaccaaacgccattttgttcatttttccaaaaggaacaattttcatttcggtaaaattaaacatctctaataatttaaaagatataatcatttaaacaattaaatagttaacaacaaattatctgacgcatttttagtttggtgccctcgaaaattaaaatttacgcaccaaaaaacaataaaaaaaaacgtcaaagtaccgaggggacataatagtgcataatacccaaaccctggctcctagctagaataggggtttagctgaacatcaacatgtcataatatatgtcactttgcacagattatccatcagaaaaatcttgttttgtgcgtcaaatttgcattaaaatttgcaatagtatctgctctaatcacatactcaatataacataccttttaaaaaataaatatgtaagggtatggtttaaaaggaaactgcagcttgtaccaagcatacctttaaatccttagctgaatgagaaatatctacaacagagtcgaccatttcctgaacagcattgacagaagggaattgcatcgcagcttgcttagtcttatttacactggtcgctaaagcatctgaaagagcattggcataactcaaagatctatcctttatatctctgcacgtgatattccgatgcactgtatcacctattaggaccaatttgtgagcactgagaaccacaaacttgccgtgagccaaaaatatttttggtggttggttgtgttccactgtctgcaagaatgcgtctatagcatgtgtcaaattcgtgtgatgtgtaaccacctgcgttgcgtaaaacgccaagagctgtttgtcgtcaggatctaatcctgctgtcttatggtcaacgtcgaaagctacatcatcagcatgtttaacacagttgtcgtagtctttctgtaagttctttggtaaagttttcattatatctgcgtggttcttgttaatgttttcttttgaatctaagcttacatagtcatattcttcgttccattcgttcgaagactcttttttgaacaataacgtaccattgccttgaatgaacgatgctatctgtcgaatatcttccgttaacgctcgcgagcaagcaactagttgttctaattcgtcaggtttcttcacgcattcttcatcaagcggccttgaaagaatgtttaaagaccagttgtgtttattaagtttttctgaaacttcttgtaccagggtgtttgctttcctgattgctaaaactaagggagataatttgccagccaaatttttatcggaagctctagctgcgttccccagcgtcccttctccaaactcagccagatcttggagagacgtgcgcaatcgtgtcgctgatagtttaatttccattaaatttgtttctagcttgtctttcgtcctccattgaggcccgacaaatcctaataactttgatattgcactggtggtgtcagtctgtaatctctccaagttttcaagggctgaatttagctccaaaggcaactcttttgtaacgtgtgtgggtacgtcgtaatttgaagtggattggagaactaattgggggcctctgttgtaaggtttggggacgtcgtagtcgggcatattggctaaactgctacggtttgacgaactaagtgaatccgctgttagagaactagccgaactagagggtgttaattggttctgaatgcctaaatgttgtctgggaatgtcatatgtgtcacctgaatctctattgatcggtgaggcacatgatggggctggggagcatcgggggcaattcctaaaactttcattacctactggtactggtcggggaggtacatcgtagcagtcgttctggtcccgagttatcgtacccgggctaactcctgaagaaactgaaatcggagaacatctcgatggaggcatgtcgtataaaaatacatcgttgaattttttgggagttacgacctggttaggaaggacgtgccaacttcttctctttccctgtcgttgcaaagagataaaatcaccttggtcggaaaattggttcggagaaatacctctgataagttgtccagtgtcttcaaatacaccaggaattaatcgaagtctgttcgcaggacatattccctgttttcctcgtagggaacaaagccaccatccttcgatgttcgctgtgttttgttccagtacaactaaagtgtcacctttccgaaattggagctcgtctggggtatcggggacattatcgtagagtgctcgggctaaacaatgctgtgaggaaatgtccatttgttgaggcatgacacacaaccaactaaataaaataataaataaacgttaacagaacatagtaaatacacaaaaattcatgtaaaattaacgaaaaacacttcttaacctcctctctacaaagctt

SEQ ID NO: 4459 - DNA, 4205 bp, Diabrotica virgifera
  SmartBlast Evalue=8E-78; Info=Endonuclease-reverse transcriptase n=1 Tax=Schistosoma mansoni RepID=Q4QQE8_SCHMA
aaggagttcgagtttggcaagcgaggcgagaggtcgtgtggcaggtgtattggcgataaggtaatttcgaattcgaaacctatcacaataaaaacaccggttttttaaaagacctatcgttatcgataatcgttaaacttaaaaagcgttcttgtgcgaaataaaaataaacttctaagtgtataataataatatttatattagtgctgaggttaacatttaatttaaaatggccagtggcggaacaggaacaatccgaaaggaaacctatagaaagaatgaagaactatctgatagtggcgacgaagaatctaagaagaaaaaatataaagaagataaattatattttgaaaagagtaacctgacgagacgaacaccgaataaaagcaacgacacaaatgaagagatgataaaaatgatgcgggaagttatgtggaaaaatgatgaaatgatggcagaaataagaaccatacggaaagaccaaaaagaaacgatggaatatattaaggagctgaaagaaaaaaaaaacgaaaaattggaagaaggtttaaaaatggcaaacaatagaatagaacaattggaaaaagatagacggagaaataatatagtattaaaaggcctaacactagatgctaccgacggaaagcctgtaaaggagtcagtagaacacttcataggaagaaatctgaaattagaggtcagactgagaggagcggtgaagatcggcgaccaaatctttgtagcagaaatggaaaacctaacggataagatgagtgtactaaaaaacaaaggaaaactgaaaaatctacagggacaaaaggtgtatatagaatcagatttaacaagaaaggaaagggaaatacaagcaaaaattaggaaaatggcaaaagaagaaaaagacaaaggtaatactacgaagataggatatatgaaactggagattaatggaaaggagtggaaatgggaccataataaagagaaacttatactaactcacagaaatatcggggaagggacttcaaaaaactaaaagaaaataatgagaccggacccacaacaatgacaaccaaggcaatgaatgggaaaagcgatagggaaaaagatgatgcaaaggtaaacaaggatgaaaataggaaaaaggggaaagctagattgcagaaaaaaggagagataaaaatgggaacatggaatgtgagaagcatcaatggaaaagaggaagaactggtagaagatatgataagacaaaaaatagaaatactaggaataacagaaacgaagatgaaaggaaaaggtcttaagaaaatacacaaaggatattggttactttgggtaggagcggatacaaaagagagagcaaaagaaggagtcgggataataattgcaccgaatagactacaacacgttatagaagaaacatatgttaaccagagaatattatcggtgaaaatgaaactgatggacgaagaaatatggacaataataacagcctacggagtaaatgaagatgcaagaaaggaagagaaagataaatttttcgaggagctccaaatgcaaattgataatggggaagaaaacataattgtaatgggagatctaaacggtagagtcggaaacaacaacagcggaatagaggagtgcatgggaaaagaaggagaagaaatactaaacagaaatggtgaaagaataatagaaatatgtatggagaacaaactagttataacaaatacaaaatttaaacataaagaagtacacaaatacacgagagtacaagacagcagaaacgaaaaatcaatcatagattactttttggtaagcagcaacaaatggaaaagagtacaggatacgaaagtgaaaagaggctcggagattggcagtgaccaccatctagtaataatgagaatgagaacaacagaggaaaaagaagaaaagagaagaaaggtagtaaatgaaaaaataaaaagttacaaattaaaagaggaaatatataagaagaaattccaagaaaaattagataatactttgaaaggtagggcaaaaaatacaaatatagaaaaaaaaatgggaatatctaaaaaccagcataatcaaagcagctgaggaaacttgcgggaaagcaaaaatagcaaacactaacatgaggagaacagaatggtggacggaagaaatacgagagaaaataaagaacaaaaaagacaaatggaaaagatacctaagcacaaaacacccggaagattacgaagcatataaagaaaaaaggaaagaggttaaaatagcggtgaaagcaggaaaggaaaggtcatgggagatatttggacaaaaaatgacaaaaaattatagggaaaaccaaaaactcttctacggcgcattaaaacaactcagacaaaagaaagagcacacgatgccgaatataaaagacaagaatggaaacgtactaacagaagaaaaacaaataatggaaagatggagagaacatttcaaagagctaactcatgcagacacggacaacataggggagatacaagaaaggaatgaagaacaacaagtggaatccataacaagagaggaattagagaaagcaatagaaagagtaaaactgggcaaagcaccaggcaaggatcatatcaccccggaaatgataaaattcatggggacagagggaatggatagcatgaaagaactaatgaatgatatcataaatagagcagaattaccaaaggactggaagaaagacattatattaccaatacacaaaaagggagacaagagaaactgtaataattaccgaggtatcaccatatcaagtatccctgggaaggtattcgcaagaataatagagacaagaataaaaacccaaatagaaacaactatggaagacacacagtgtggattcaggaaggacagaagcacgcaagacctaatattcacattaagacaagtaagtgagaaggtaatcaagaaaatagagagatacatatgtgcttcattgacctggaaaaggcgtttgacagaatccgaagaaaggacgtttggaagacactaacagaaaggggagtcgacagacacataatagaagtaataaaggatatgtacaaaaataatacaaatacagtaagaaccaataacgaggaatccagagaattttctacaagtcaaggcgtcaaacagggatgcgtgctgagtccactgctattctcagtggtactggatgaagcgataaagaaagccaagagaagaatgagaaaactaacattaggatactggcaaatgaaacagactcaactatcggagctactatttgcagacgacatggtattgatagcagaaaacagagaagacttacagaacaatcttgaaatcctagaagaagaactatcaaacataaatatgaaaattaatacagagaaaacaaaaacaatgataatttcaaatacgaggaagacacacgcaatagaattagacgggaaacaactagagcaagtggaatattttaaatacctaggagtaataatcgaatcaaatggtaaacaagacatggaaataaacgagagaatgggacgaacaggaagcttatttaacactatgaaaacaacattttttgggaaaaaagggataccggaaaaagtaaaaacggcagtcgttaaatcagtagttagaccaacaatcatgtatagcagcgagacatggacattgacggggagacaaaaatccagagtcaatgctatggaaatgaggttcctgaggaaaatagcaaacagaaagaggacagacaaaatacgaaacgaaacaattagacaaaacctaaaactagaaccaatcaatgaaaaaatagtagaaggacaacttagatggttcgggcacgtgtgtagaatgtcgaacgagaggctaacaaaacgagtgttcgaaacgagagtgcaggggaaaaacaaaagaggaagaccaagagttatgtgggtagatgaaatcaggaaagaagtcgagaagaagggattgacattggaaagtgcaagaaacctaacgcaagatcggaaagcatggagactacaatgccaaactcaactccaccagccttacacctaaaggtagaaaggcttaggactaagtaagtaagtaaatttagaggaaagtcaaatattggaagacggagaatatcatggataaagatcttgaggaaatggtttgtatgcagtagtgcaggggtgccaggc

SEQ ID NO: 4460 - DNA, 1364 bp, Diabrotica virgifera
  SmartBlast Evalue=6E-39; Info=Reverse transcriptase family member n=1 Tax=Glycine max RepID=Q1AKH8_SOYBN
cgacagaagcacgcaagacctaatattaacattaagacaagtaagtgagtaggtaatcaagaagaatagagagatacatatatgcttatatatattgtatatatatgtgtatatatatgttgtatatatatatgtgtatatatatatgtgtatatatatatgtgtatatatataataaaggacgtatggaagacactaaaagaaaggggagtcgacagacacataatagaagtaataaaggatatgtacaaaaataatacaaatacagtaagaaccaataacgaggaatccagagaattttctacaagtcaaggcgtcaaacagggatgcgtgctgagtccactgctattctcagtggtactggatgaagcgataaagaaagccaagagaagaatgagaaaactaacattaggatactggcaaatgaaacagactcaactatcggagctactatttgcagacgacatggtattgatagcagaaaacagagaagacttacagaacaatcttgaaatcctagaagaagaactatcaaacataaatatgaaaattaatacagagaaaacaaaaacaatgataatttcaaatacgaggaagacacacgcaatagaattagacgggaaacaactagagcaagtggaatattttaaatacctaggagtaataatcgaatcaaatggtaaacaagacatggaaataaacgagagaatgggacgaacaggaagcttatttaacactatgaaaacaacattttttgggaaaaaagggataccggaaaaagtaaaaacggcagtcgttaaatcagtagttagaccaacaatcatgtatagcagcgagacatggacattgacggggagacaaaaatccagagtcaatgctatggaaatgaggttcctgaggaaaatagcaaacagaaagaggacagacaaaatacgaaacgaaacaattagacaaaacctaaaactagaaccaatcaatgaaaaaatagtagaaggacaacttagatggttcgggcacgtgtgtagaatgtcgaacgagaggctaacaaaacgagtgttcgaaacgagagtgcaggggaaaaacaaaagaggaagaccaagagttatgtgggtagatgaaatcaggaaagaagtcgagaagaagggattgacattggaaagtgcaagaaacctaacgcaagatcggaaagcatggagactacaatgccaaactcaactccaccagccttacacctaaaggtagaaaggcttaggactaagtaagtaagtaaatttagaggaaagtcaaatattggaagacggagaatatcatggataaagatcttgaggaaatggtttgtatgcagtagtgcaggggtgccaggc

SEQ ID NO: 4461 - DNA, 2902 bp, Diabrotica virgifera
  SmartBlast Evalue=2E-95; Info=Far upstream element-binding protein 1 n=1 Tax=Camponotus floridanus RepID=E2A2F8_9HYME
gcactagcatatatctattttcaaaattacaacgggaccaatcaataaaaagcaaataaaaatattgtagtcatacgttttattggaacaaaatttccaattgatgtcaactgcattgtgtaattgtatgaacagaaaacaaaaaagtcttaaatctataatgaaatatttaaatatctaataattactgaatatctggtatagcgtgagtgtgaaacttctagttcaggaaacaaacactgcgattataaaatatacctgatgtaatgttctttaaaatattcttaaggtctaagaaatgttttctctggaagttcttagtagacaattgcggccatactctaaaattttcttgattaatcctgagattgtggcggtgcttgctgttggcctccgtaaccgtaagatgggaaaccatagccgccttggggtactcctccagggactggagctgattggggttgaccgccataatagccaccagctgcagcttgcggttggtaacctccataaggtgcttgggcttgggagtatccaccaggttgagttcctggtgcagctggcgtctgtccagtcgctgctccacccgccgctcctggcattggccctttagttttcatctgtgcttcaatagcttcagcttccttatgtttacccatactcctgtaatattcggcccactgggcactataatcagcctgagacgagggattagcactttgggtggacgcagccggctgggctggagtaggagccgtttgcatagatcctcctgcagttttcgccttcgcctgttgttcaatcatttcggcttctctgtgcatacctaaagatctataatactctgcccactgcatggaataatctggttggcctgtcgatgggtttacttgtactttgttgggttgacctggttgtgaatcagcaccttgtggttgacctccccactgttgctgttgttgataaccaccagcccctgcaactccaccaccaccaccacctccttgcattccccaattattctgaggattgtaattctgtggagtcatgcctgggtatgctgttggcatggtgctgttcatcggaggtccgccaccacctccgccgctttgtgatacgaaggttaaaggcatttgtactttttcttggatgattcgttttgcagtttcaatcgaatcgggatcgcctttgatattaaatactttgtcgttcgcggtaggattctgattttgagctcgcctatctaactcgcaatatgcaccagattgttgattgatttgttttattgtttcaccgcctctaccaataataactccacatttattagccggcaccgtaaacgaaacaacgtcctgttgaccgttaccttgtccacctggtccgccgccaccgcctcgtctatcttcccactgattaccgccaccaccgaagtccccaccaccgccgtttcgatcgcccctatcgaaaccgccttggccgccaccaccacgtccaccgtgatggccgcctcgtccaccgcgaccgccgccacggcctccgcgcataccgcctcccataggagcacccataccaccaccgtcaccgtcacgctgtagcacactgtctatgagttcgtctatcctctgacgggcctgttcaacttgtttgggatttcccgacaagtaacaccttctgtcaccggggccttcatcgcgagcctgttggaactgtactttcgcacctgtttcggcttggattttcttaatcatgtctccaccttttcctattacaacaccaacggccggtcgtggtactaagacttccatctgttcgccaccaccgcctccaccgccataatcattattgccataaccacctccatcgttttgtccctggttctgacgtcctcttgggccgcctctgttgaaactcttcatctccttttcagccatcaggtcatatactagctgtttggcatgctctaccttttgaggttcaccgctgattaccaggggcttctcgtgttcttgattgggaccgtcttgaattacgaccattttcgcgccacttttttcttgcagctgtttgatggtctcacctcctttgccgatgatcagtcctacttttggtccgggaagcatgatttcgatggaattgcggccgccggggcctgggccgccaccagggcctcctggaccgcccatattggtgattccttgaaaatcggaatggttgttttgatatgacatttcatcgtcgctaacaccgggaggtccacccctgtgccgaataatatcaatgatgagttgtttggctctttctacggcatctttgggaccggacaatgaacaaattcggtctgacataccctgagaatcaggcgccatttgtatcttacaaccagtctcagattgcaatcttgttatctgttcacctccacgacctattattaagccaaccattttatctggaactttaatgtcttcgctcatttgctgcatgccaggggggcctccaccacccattccttggttctgtggaggtcttcccataccagggggaactagttgtgaagataacaaagaagctggtccttttttcgcatccggttctacatcaaactcatctgccacttcctctaaaggtcgtttcggcctactatcgttgccggtggttcctggattaattttagccgcaatctgtttagcacgttgaacagccgctgcgaatgctgtagattgattaaaattttgtggtggcggagcaaccgcagaataatcactcattttcttataacattaacgtttaataattacacaaaacatacaattaacctttttggttcaacaacaaaatggaggatgtgcttataaacagcgaacaaaaaggaaaggaggaagcgtttttctgatttacgtgtcga

SEQ ID NO: 4462 - DNA, 2668 bp, Diabrotica virgifera
  SmartBlast Evalue=5E-57; Info=Far upstream element-binding protein 1 n=1 Tax=Harpegnathos saltator RepID=E2B9Y0_9HYME
gcactagcatatatctattttcaaaattacaacgggaccaatcaataaaaagcaaataaaaatattgtagtcatacgttttattggaacaaaatttccaattgatgtcaactgcattgtgtaattgtatgaacagaaaacaaaaaagtcttaaatctataatgaaatatttaaatatctaataattactgaatatctggtatagcgtgagtgtgaaacttctagttcaggaaacaaacactgcgattataaaatatacctgatgtaatgttctttaaaatattcttaaggtctaagaaatgttttctctggaagttcttagtagacaattgcggccatactctaaaattttcttgattaatcctgagattgtggcggtgcttgctgttggcctccgtaaccgtaagatgggaaaccatagccgccttggggtactcctccagggactggagctgattggggttgaccgccataatagccaccagctgcagcttgcggttggtaacctccataaggtgcttgggcttgggagtatccaccaggttgagttcctggtgcagctggcgtctgtccagtcgctgctccacccgccgctcctggcattggccctttagttttcatctgtgcttcaatagcttcagcttccttatgtttacccatactcctgtaatattcggcccactgggcactataatcagcctgagacgagggattagcactttgggtggacgcagccggctgggctggagtaggagccgtttgcatagatcctcctgcagttttcgccttcgcctgttgttcaatcatttcggcttctctgtgcatacctaaagatctataatactctgcccactgcatggaataatctggttggcctgtcgatgggtttacttgtactttgttgggttgacctggttgtgaatcagcaccttgtggttgacctccccactgttgctgttgttgataaccaccagcccctgcaactccaccaccaccaccacctccttgcattccccaattattctgaggattgtaattctgtggagtcatgcctgggtatgctgttggcatggtgctgttcatcggaggtccgccaccacctccgccgctttgtgatacgaaggttaaaggcatttgtactttttcttggatgattcgttttgcagtttcaatcgaatcgggatcgcctttgatattaaatactttgtcgttcgcggtaggattctgattttgagctcgcctatctaactcgcaatatgcaccagattgttgattgatttgttttattgtttcaccgcctctaccaataataactccacatttattagccggcaccgtaaacgaaacaacgtcctgttgaccgttaccttgtccacctggtccgccgccaccgcctcgtctatcttcccactgattaccgccaccaccgaagtccccaccaccgccgtttcgatcgcccctatcgaaaccgccttggccgccaccaccacgtccaccgtgatggccgcctcgtccaccgcgaccgccgccacggcctccgcgcataccgcctcccataggagcacccataccaccaccgtcaccgtcacgctgtagcacactgtctatgagttcgtctatcctctgacgggcctgttcaacttgtttgggatttcccgacaagtaacaccttctgtcaccggggccttcatcgcgagcctgttggaactgtactttcgcacctgtttcggcttggattttcttaatcatgtctccaccttttcctattacaacaccaacggccggtcgtggtactaagacttccatctgttcgccaccaccgcctccaccgccataatcattattgccataaccacctccatcgttttgtccctggttctgacgtcctcttgggccgcctctgttgaaactcttcatctccttttcagccatcaggtcatatactagctgtttggcatgctctaccttttgaggttcaccgctgattaccaggggcttctcgtgttcttgattgggaccgtcttgaattacgaccattttcgcgccacttttttcttgcagctgtttgatggtctcacctcctttgccgatgatcagtcctacttttggtccgggaagcatgatttcgatggaattgcggccgccggggcctgggccgccaccagggcctcctggaccgcccatattggtgattcttaagccaaccattttatctggaactttaatgtcttcgctcatttgctgcatgccaggggggcctccaccacccattccttggttctgtggaggtcttcccataccagggggaactagttgtgaagataacaaagaagctggtccttttttcgcatccggttctacatcaaactcatctgccacttcctctaaaggtcgtttcggcctactatcgttgccggtggttcctggattaattttagccgcaatctgtttagcacgttgaacagccgctgcgaatgctgtagattgattaaaattttgtggtggcggagcaaccgcagaataatcactcattttcttataacattaacgtttaataattacacaaaacatacaattaacctttttggttcaacaacaaaatggaggatgtgcttataaacagcgaacaaaaaggaaaggaggaagcgtttttctgatttacgtgtcga

SEQ ID NO: 4463 - DNA, 3361 bp, Diabrotica virgifera
  SmartBlast Evalue=7E-16; Info=Endonuclease-reverse transcriptase n=1 Tax=Bombyx mori RepID=D7F170_BOMMO
aaatggactttaaaaaatatgtgattattttggccgcgtccgtattataaagatggccgtaaatagcaggtcataaataaggaaatataaatataattggtttggggaactttgaaaccggccgtaaatacaggtggtcggtaacacaggttttactgtaatcagtataacaccactcacactcactgattaattttattggcttttaagataactaatttttcaaagtttcatcagttcttcagagcatttctttgggggctattaattattatggcataagagaataggcgttttcttgactttgcgaatggactgatactgaaaacagcgttttgtgtgttgctattaatttgctgtcccacatgcagcgacaagtttagacttgcaaaaagtactcggaaaatgtacctcttaataaacgcgggtaccgggtattttaccgatacgctacgggtacgagtaccgagtactttattgaaaatgtactcgggtactgggtactgagtacccaaaatgtacttagagtacaaaattcgggtacttgtacccggataccgcccagctctgtatgcaactacatatttgtgttgaggagtgggctatagttcctttaattccgctggccttaattgttccttctactactctgttgaactgtgtggttgagagggaatcgccctgtcgcactcctgtttctattgcaattgattttgtacttctttcttctgtcgttacttttgctagagatttgattaattttgctggtatatctttattttttatttcaataaataatttatttcttccaatacatacaaagacttgtctgaagtctacgaagaggatgtggagttctatgttgtgttcgttgcatttttcgatagtttgtgtaattatgtggatcgcatctgtagtggatctgccttctctgagtccttgctggtagtccccaattttttttctgtaaattgagtgagtttctatctgatgagggctgttagaattttatatgttgtactcagtagagatattcctctatagtggttacattatgttatttctctattctgctcgatatttattggaaaattctaatcgatagtttctgtagaataagactgatgtggcctttccttacctttccaacccattgagcctcttgggcgctctggagcacttttgccggtttcattccactgccttccgttctttttgttctctggtgtgtattagtggatccaggttttatcaacagttaccaatcggttccaaaagtcagaaggattgagcttcttaaggttcacacacaccgctaagaagctatcacacgatcatgttttttgtcaatagtcactacttttacgctaacgttttccaacgcatgactattgacttactctgcaacttaaaaatgaattggtcggctgtttgtatgaccgaaatttagtagggcgttcccatagacaacttagtagtagaaaatctctataaaaaaactttgtttcaccactttaggccaccttttcaacatttcttccttttgtagtccactttaaatagttctgcagtactgcattcaaataatttcttcaaatttttaaactaacccacagttcgatttactagaattttactcagtcctagattacaaattttgaaaatttcaaaacgccttaaaacattttcgttaacaaaaattttcactatttgtctttatttctaggacttctatatgtatacagggtgatcaatttaacttcctgagatgagttctttatctccgacgtcaggagagctacagaaaaaaaaatgttataaaaaaattgtgggcgccaccatatttcatattttaatggcccctggccactagtaagattgtctatcgaaatttctaagggaatttatattgctattataatgttgtagttgtagtatacaaatataatatattttaaatttgaaattttaaaatataatatattttgaatttaaaattttttattttaaattctagtttaaataataatggaaaagaatttccatccctaccaattaataataataataaatctcggtccgactcggccaactgtagaaataaaaagatctcaatttttgactcaattaaactctaatataaataattcaaatgaacactcaggaaagaaaagaaaagcaaattcacctattttagaatcaacatctcataaaccgatgttccccttcacttttggaccgtctcaacctttgccaactaattcttattcaccgaatactaatatcgaaaataaaactgaactagctaaatctgtagcaacatttataataaactttttaaaaatattcatacagtagaagacataaacaccttggacaacaaaataattataaaagaagtagaacagttcataactaattcataatgtcaatacaacataatttaaaaataagtcggtggaattccagatctgttatatcaaacaaaggtagtttaatgtattatttaaataataaaagtatagacatcctcctaattagtgaaacatggttcaaaaaagatattagctatcattttaaaaattataatttggttctaaaagacagaaatgatggcttcggtggtgtagctattctcatccacaattcaattacttttagtgaattaaatttaaactctaattttaatacggaaatagaagtttgtgatgtaacaattaaatataaaacaaatgatctgaatattttatctatatatagaccacctaaaagcaaaagttcagtaaattattggacaaacatcttctcgcaagttaataattcaggaattatagagaagattttaatgctcgccatactatttggggatctagttacaatgacacagttgtaacacagcttattaatacggatattaataaggatgatctcaaccttatcgtaataaataacggtgagcctactgttctaactcgaccaaatcaaaacagttcagcaattgatgtagtacaaatatagagtacaaaggattataaggaacaaagaggagagatagatcaagcgagcgatgtaggtcatcggtagaaagctgtagcgaaaactagaggagacgaggcgaattgtggaagagcaccaagattattgcatcgaggaggatgatgtgatggtgacatgtacagagtgatagcacaagtagtacgattgctattctatggagatagtacattttcgtcgctaactctgacgtatttgcttctagaactatttgttacgtattacaacttatataaacgcgaggtaaaaattctgtcgataaacaaagtagaaattgatcacgctgtatacgtgatattattatatt

SEQ ID NO: 4464 - DNA, 2179 bp, Diabrotica virgifera
  SmartBlast Evalue=0; Info=Actin-related protein 2 n=17 Tax= Endopterygota RepID=ARP2_DROME
aaatggactttaaaaaatatgtgattattttggccgcgtccgtattataaagatggccgtaaatagcaggtcataaataaggaaatataaatataattggtttggggaactttgaaaccggccgtaaatacaggtggtcggtaacacaggttttactgtaatcagtataacaccactcacactcactgattaattttattggcttttaagataactaatttttcaaagtttcatcagttcttcagagcatttctttgggggctattaattattatggcataagagaataggcgttttcttgactttgcgaatggactgatactgaaaacagcgttttgtgtgttgctattaatttgctgtcccacatgcagcgacaagtttagacttgcaaaaagtactcggaaaatgtacctcttaataaacgcgggtaccgggtattttaccgatacgctacgggtacgagtaccgagtactttattgaaaatgtactcgagtactgagtaccaaaaatgtacttagagtacaaaattcgggtacttgtacccagctactgcccagctctgcgtggtactctgtgatcgaaaaatcggtgaagggttgaaaggaaagatatacaggagtgtgctgagtcctgcgttggtgtacagtgatgaatgaatgaataccaaaacgacattttgtaaagaatattaaaaaaactcaaatacttcttgatgatacatcattgtaacttgtccgttaccatatatggggttacgaactgtcgcgttacgagatgtcatgcaaccaactttttaatacaggcatcaaactgacagttaaaaatctataaacatattgattatcagctggttcaaatccattatttagatcaacgaacgacaattaccattttatttactcttttaacatcattcataccgctctggctcccaatttctttaatatcttcaatccttgttcttcatattcttgtttagatagccaaaacgcatctctgtctttcataacttcggctaaaacggctccgcctatgaacaccatgtctttccttctaggagggtcttctattctaattttgaatttgttgagcttttcaatgtcgtttttaagtacccgctctatatataactgttttatttctcgttctaatctagaaggaagcccgggatacattgtggaacctcccgacaggacgatgtgcttgtacagttccggtcgcatatctatatctgcagcctgtatagtattaaatactaattcggcgatgccttgtccttcaacgttgatcaaatgcggttgaaagagggcttccggagcctcaaatcgttctcctcctactttgatgattcttccgtccggtaaagtatatggctctactaaaaccgttgtttctaaagctagacgctgttcagtttctatgtcgtaacctatataacacagcttttctttcatcattcgcacggtttcaaaatccgcagaatggttaaatgcgtatcctctgagcaataacaatttaataagataacgggttatatcccgtccagcgatgtccagtctcctagtgaggtgaggcagtgcgtattcttcataaactggacatatatgggtcactccatccccagaatcaactacaacacctgataataaaccttgggcataaagagtcaacacagcttgaatggcaacataagcaccggcaaatccatacttttcaaacataacttcaatcattttttccctatttttggtagggttcataggaggttcagtcagtagtattttggtatctcttggattcaagtccatctttttaggaccaaacgtatagtcccagacatggcacatatcttcccaatttcggacgacgccattttccattgggtaattgacttctaaaagtgatctaagagccgaagcttcatctcctaccatgagatccttaacttcaatatcacctattttgttgactgctctaattatgggccttcctaccattgaagggaatatataagcagggaagttactgccggcatacccacacttaacgaacccagtaccattatcacatacaattacttttctaccttcactatccattttaattaatactaagaaaaacaactatctacttatttatttctattatcaacattaaaattagtcaacaccacacctc

SEQ ID NO: 4465 - DNA, 2736 bp, Diabrotica virgifera
  SmartBlast Evalue=0; Info="NADPH--cytochrome P450, putative n=1 Tax=Pediculus humanus corporis RepID=E0VCY6_PEDHC"
cttatgaataatttatttgaattaaataaagagcatataaacaaaaataaattttgtataatacttaacataaattacaattaaaataacaatttttcacctaaaatttgacagttcttagaggaacagccacacattacaaaaccaaattccttggcgtataaacagcgataaaaatcctatatcaaacatgtaaaaagttatacgttacaatctgcctattgtaactttgaataattagaacaagaaaagtccttgacggagaagcatgaaagacttgacgtgttaaaaatttcaaataacttgtttaaaggcactcgactggaatgaatctacacatctaaaaacttcacaattttgttgcatttagtatttatatacaatataggcaccaatttatcagcttacaattgtcacaaaaatatacaagaataattttattatccaccgaaaagacaataggtcggtgcagctatgttagatgtcttaatagaatttaaaaaaaaattgctaagggggcagattttattagctccatacgtcggcggatagacgtttctgcgtttccatcttcttcaggtatgcggtagcttgttcttcggtcaaggagcctttttcttgcagaattttagttaggatagcacggacgtcggtggccatggatttggcatcaccacaaatgtagatatgtccgttattctctccaataatcttccatacttcgtcggcttgttgttctaatagatgcgtgacgtaaaccttcttggcttgatccctagaaaaggctaagtgcagtgtaagtagaccgttcttatggtattcaactaattcttcttcgtaaatgtaatcttcagcagcctttctacagccgaaatagagcactgtgtcccctacaggttttccttcttctttacaaagattcctatcctggataaatcctctgaacggagcaaaaccagttccaggtccgatcataatgataggagtttgtggcttagtgggcaatctgaattgagatttacgaacgaatattggaactgtgggaagttctttctcgggatccggcatcttagttttcaaccatgtggtagcaacacccttattgtggcgaccagttggagtgtcatactcgactaagaccgctgtgatgtgaactgtgttgggatacaacttgggtgacgaggaaatcgaataatatctgggctgtagtctgggcatcaattcacaaagatggtccaaagcaggttgacatgatttcatatcttccaaaatatgaacgatgttcctgttgtcctcgatgatccatttctggtaaagtgcttttccttctggagtggtcgtggacatggattttaacttttctttttcggctggatcagtgcagtattcagccaattcttttagtacgtgagttcttggattttgcgttatgtccacatagtgcatcaaagcagtcctgtacgagcaaggacacgggaaggggtgtttcttgctggagtcttcgtcggtattgatcaagctgaagatggtgttaagatccttgccgcagtattttccaagcttctcgaccagttctacgtcgttgataggatagacggcaagatggtcgccagcatcgtatcgcattttggaaccttcgatgtcgaattcgatgtgcatgcaggatctgtcgccgtttttgtggagctctctgttgattttgaccttcgagaggaagggatttttggcgtcgtagggtggtctttggttcttgagggactgcaacctagccatttctccagtaaatactctgtctggagtctcctcgaactcttcaagtctgtattgacgcatgttgatgtcttctccggtcgattcgataccgaagtgttcgcaaacagcgggccagaacttgtctttccacgtaatgaagtcgtcttcaatgttcgcatcatcatctccaagaccaaggtcgtagagtctggtggctcctaattcctcaagtcgtttatctacataaatggcgactttgttgtaatgctcgtacgtcttatttcctaatccaaatacagcatagttaagtccagtgagatcagcatctccgttttggagccactcgtagaattccatggcgttatcagtaggatcaccctcgccgtatgtggccagacagaatactgctaatgagtttggcagagtttttaaattgactaattcttccatatcacattcttcgggatcggcgaccatccccttcatccgatatcgaactccctctttggcgagccgaccggcaaattcttcaccggttccggtttggcttccatagaagaccacgagactcctacctgaagactggagtttctttatgaaggagttgtctgttgatgtttggaggttgatggaggtaggttgtattgaatatgatctaccatttgctatcgttttggttttcttatgtttattgacgagataccaactaattcctcctacgatgagtgctaataaaactatgtctagggtgccgaagaggctctcactcgcctctggtatctgttgggtaccaatgttggcttctgcttcgctcattattgtgccctattatgtttttttcaaatcccagaaactgacttttaatccctgaggaagataaagcacattatacgaaacgaactcagaggtcgcgattgatggagatacgtctcaaaagccgacgaacaaaaactgaatcgacatcgacatcgaccagcgaagcca

SEQ ID NO: 4466 - DNA, 2700 bp, Diabrotica virgifera
  SmartBlast Evalue=0; Info="NADPH--cytochrome P450, putative n=1 Tax=Pediculus humanus corporis RepID=E0VCY6_PEDHC"
cttatgaataatttatttgaattaaataaagagcatataaacaaaaataaattttgtataatacttaacataaattacaattaaaataacaatttttcacctaaaatttgacagttcttagaggaacagccacacattacaaaaccaaattccttggcgtataaacagcgataaaaatcctatatcaaacatgtaaaaagttatacgttacaatctgcctattgtaactttgaataattagaacaagaaaagtccttgacggagaagcatgaaagacttgacgtgttaaaaatttcaaataacttgtttaaaggcactcgactggaatgaatctacacatctaaaaacttcacaattttgttgcatttagtatttatatacaatataggcaccaatttatcagcttacaattgtcacaaaaatatacaagaataattttattatccaccgaaaagacaataggtcggtgcagctatgttagatgtcttaatagaatttaaaaaaaaattgctaagggggcagattttattagctccatacgtcggcggatagacgtttctgcgtttccatcttcttcaggtatgcggtagcttgttcttcggtcaaggagcctttttcttgcagaattttagttaggatagcacggacgtcggtggccatggatttggcatcaccacaaatgtagatatgtccgttattctctccaataatcttccatacttcgtcggcttgttgttctaatagatgcgtgacgtaaaccttcttggcttgatccctagaaaaggctaagtgcagtgtaagtagaccgttcttatggtattcaactaattcttcttcgtaaatgtaatcttcagcagcctttctacagccgaaatagagcactgtgtcccctacaggttttccttcttctttacaaagattcctatcctggataaatcctctgaacggagcaaaaccagttccaggtccgatcataatgataggagtttgtggcttagtgggcaatctgaattgagatttacgaacgaatattggaactgtgggaagttctttctcgggatccggcatcttagttttcaaccatgtggtagcaacacccttattgtggcgaccagttggagtgtcatactcgactaagaccgctgtgatgtgaactgtgttgggatacaacttgggtgacgaggaaatcgaataatatctgggctgtagtctgggcatcaattcacaaagatggtccaaagcaggttgacatgatttcatatcttccaaaatatgaacgatgttcctgttgtcctcgatgatccatttctggtaaagtgcttttccttctggagtggtcgtggacatggattttaacttttctttttcggctggatcagtgcagtattcagccaattcttttagtacgtgagttcttggattttgcgttatgtccacatagtgcatcaaagcagtcctgtacgagcaaggacacgggaaggggtgtttcttgctggagtcttcgtcggtattgatcaagctgaagatggtgttaagatccttgccgcagtattttccaagcttctcgaccagttctacgtcgttgataggatagacggcaagatggtcgccagcatcgtatcgcattttggaaccttcgatgtcgaattcgatgtgcatgcaggatctgtcgccgtttttgtggagctctctgttgattttgaccttcgagaggaagggatttttggcgtcgtagggtggtctttggttcttgagggactgcaacctagccatttctccagtaaatactctgtctggagtctcctcgaactcttcaagtctgtattgacgcatgttgatgtcttctccggtcgattcgataccgaagtgttcgcaaacagcgggccagaacttgtctttccacgtaatgaagtcgtcttcaatgttcgcatcatcatctccaagaccaaggtcgtagagtctggtggctcctaattcctcaagtcgtttatctacataaatggcgactttgttgtaatgctcgtacgtcttatttcctaatccaaatacagcatagttaagtccagtgagatcagcatctccgttttggagccactcgtagaattccatggcgttatcagtaggatcaccctcgccgtatgtggccagacagaatactgctaatgagtttggcagagtttttaaattgactaattcttccatatcacattcttcgggatcggcgaccatccccttcatccgatatcgaactccctctttggcgagccgaccggcaaattcttcaccggttccggtttggcttccatagaagaccacgagactcctacctgaagactggagtttctttatgaaggagttgtctgttgatgtttggaggttgatggaggtaggttgtattgaatatgatctaccatttgctatcgttttggttttcttatgtttattgacgagataccaactaattcctcctacgatgagtgctaataaaactatgtctagggtgccgaagaggctctcactcgcctctggtatctgttgggtaccaatgttggcttctgcttcgctcattattgtgccctaatgtttattgttgcagctattagttgtaaattcactaattgttattaataattacacataaaattagtccagacagaaacgtgcgacgtgatatcgatataagataatttcaccgattcg

SEQ ID NO: 4467 - DNA, 2850 bp, Diabrotica virgifera
  SmartBlast Evalue=1E-55; Info=Endonuclease-reverse transcriptase n=1 Tax=Bombyx mori RepID=D7F170_BOMMO
ccagacatctatctgcttgggcattataatttcaatatgtacttgcaaaatcattacaagtactgtgtaagagataattattgttttaaatgtacctatattatattgtgctgtcagacattacaaaatgcggtaaagttatgaattaaggcacagtataagggaaagcgcgttgaaaaaatatacgtacaagctttgcgaaattcataactgctttaacaatcttacattgatagtagagtcctttttatgagcatttttcagtgcgtgacaaatgtgttaaaaaacaaacaatagttaaatctaacagttgtcacattttatttgcaatttggcataaaaataaatcgattgtgtttattgcatttataaaatggtattttctttgatttgtatagtcttataaatcgtacagattatattcgtagatatattgtataattcgtaaatttttttgttcgattatagcgccatctatcgacacctagaataaatgttataaatgtctgtaatcacggacgtgcctttttctgtcacatacaatttaatgcgttagagagaaatcgaaaaactgtgacgcactgaaagatgttcatgagaaaaagaatacgtgagccgttttcaattccatcgattaactacacagtaaaatattattttcaatccaaaaatcgatccatcctttgattaaagataagtgaataacactcactatatcaatacagtaactcaaactgtgtatattttacattatttaatatttaaattcagtctaattgatttaagcactaattatattataatttatagttaatagtataataaaatcaactgcaaaatgctggaagaaaacattgtgctcttgcaaattatattgggaagaattgtaatatcagcgccaaaaaataaacgacaatctaatcattttctgaaccaaaactctccgtggtgtccattttagttcgatatacctacttgatttttgttcacagtatttatcgccgatacaaaaatgatattacacaaattatttgttaaaaatggatttttattatagtaactgcgtattaaaacaaactataccattataatgtctctgctataatataattcgtgagaaaatattgtttcttcaatttttgttaatacatagtttataaacgaattattatttttttttggtagaatttggaagacaacactaaaaaataaagttattcctacggcctaagacgtatctgtctacagaagttcgcgcaacttctaatgagtcaccagtcgctagggttaatactctaatacgaaagttgccaaagcgctcgaaagacacgtacagtcgaaccagaatacgaatagacgtgaacatactgtgcgcactagtagatttcaaattacgacacatttgatcgagaacagcttagctgtttccatggatagtttgtagaagctagcgacgttcgcaaattttatgtaaaatataaatttttaataatagtagttttgaatgttgtaattattcatttaatttaaaaatggatcaacagtataaattcaagcgaacaattttgaatgctcaagctagtgaaataatacactgagtgttaaaattctcttaatgagaagcagctgcaaatagtgactacaaaattgcaagagcgtgtggatagtatgacagataatttgataaatattctaataaaaataatagtaaataatctaagcttttttggttgcattttcaggagtttctatgtgtagcgtcaaaaatattgaaaaagagagccgcgaaattgaagcagaaaatatatccggatttgtcactactaatagacggaaacaatattcaacaataaaattataaacagttgaacaaggtctattacgtcgacagattattaattttcatataactgaaaaataagagttgtcgaagaatttaattataatttaaagaaaggcaaagaaaatcatcatcatcataagtggctcgacaatccgttgtggatcttggcctgctcacaaagaagtcgccattcctgtcgatttctggcaacttccctccatcttctgacccctagaatctttaggtcttcttcaacatcatcaatccatcttcttcgtggtcgtcctctaccttgtgccctctggttttgaaaagttaatctcttcgtgtattcgtgatctgacatcctagcaatgtgtccagcccatctaagtctctgcactttaacgaatttcacaatatctggatcggtgtataactgatacagttcaaagttgtatcttcgacgccatagcccattttcatttactgccccaaaaatctttctaagaatttttctctcaaaaataccaagaagtctttcatcactttgagatagggtccacgtttcagctccatatatcaaaaccggtcttattaaggtcttgtatatattgagctttactgcacgttttatatttttattttttaaatgtttatggagaccgttaacagttctgtttgctattgctatgcgacttgtcgtgtttattgagtttactagcgatccaagatatgtaattccttgacttgctcaaaggtgtgattgttaatttgaattctctgttggatatttcgggagtttttagagaccaacatatatttggttttttcctcgtttaccacaagtcctaattcacttgccgcgtccgcaagccttgtaaaacactgcaccatgtctctcatacttctgcccactataactatatcgtcagcgaatgcgagaatttgcgtcgatctattaaaaatagttccattcatttaatatttaattttctgactgccttttccaaggcaatattaaagag

SEQ ID NO: 4468 - DNA, 2543 bp, Diabrotica virgifera
  SmartBlast Evalue=9E-37; Info=Endonuclease-reverse transcriptase n=1 Tax=Bombyx mori RepID=D7F170_BOMMO
ccagacatctatctgcttgggcattataatttcaatatgtacttgcaaaatcattacaagtactgtgtaagagataattattgttttaaatgtacctatattatattgtgctgtcagacattacaaaatgcggtaaagttatgaattaaggcacagtataagggaaagcgcgttgaaaaaatatacgtacaagctttgcgaaattcataactgctttaacaatcttacattgatagtagagtcctttttatgagcatttttcagtgcgtgacaaatgtgttaaaaaacaaacaatagttaaatctaacagttgtcacattttatttgcaatttggcataaaaataaatcgattgtgtttattgcatttataaaatggtattttctttgatttgtatagtcttataaatcgtacagattatattcgtagatatattgtataattcgtaaatttttttgttcgattatagcgccatctatcgacacctagaataaatgttataaatgtctgtaatcacggacgtgcctttttctgtcacatacaatttaatgcgttagagagaaatcgaaaaactgtgacgcactgaaagatgttcatgagaaaaagaatacgtgagccgttttcaattccatcgattaactacacagtaaaatattattttcaatccaaaaatcgatccatcctttgattaaagataagtgaataacactcactatatcaatacagtaactcaaactgtgtatattttacattatttaatatttaaattcagtctaattgatttaagcactaattatattataatttatagttaatagtataataaaatcaactgcaaaatgctggaagaaaacattgtgctcttgcaaattatattgggaagaattgtaatatcagcgccaaaaaataaacgacaatctaatcattttctgaaccaaaactctccgtggtgtccattttagttcgatatacctacttgatttttgttcacagtatttatcgccgatacaaaaatgatattacacaaattatttgttaaaaatggatttttattatagtaactgcgtattaaaacaaactataccattataatgtctctgctataatataattcgtgagaaaatattgtttcttcaatttttgttaatacatagtttataaacgaattattatttttttttggtagaatttggaagacaacactaaaaaataaagttattcctacggcctaagacgtatctgtctacagaagttcgcgcaacttctaatgagtcaccagtcgctagggttaatactctaatacgaaagttgccaaagcgctcgaaagacacgtacagtcgaaccagaatacgaatagacgtgaacatactgtgcgcactagtagatttcaaattacgacacatttgatcgagaacagcttagctgtttccatggatagtttgtagaagctagcgacgttcgcaaattttatgtaaaatataaatttttaataatagtagttttgaatgttgtaattattcatttaatttaaaaatggatcaacagtataaattcaagcgaacaattttgaatgctcaagctagtgaaataatacactgagtgttaaaattctcttaatgagaagcagctgcaaatagtgactacaaaattgcaagagcgtgtggatagtatgacagataatttgataaatattctaataaaaataatagtaaataatctaagcttttttggttgcattttcaggagtttctatgtgtagcgtcaaaaatattgaaaaagagagccgcgaaattgaagcagaaaatatatccggatttgtcactactaatagacggaaacaatattcaacaataaaattataaacagttgaacaaggtctattacgtcgacagattattaattttcatataactgaaaaataagagttgtcgaagaatttaattataatttaaagaaaggcaaagaaaatcatcatcatcataagtggctcgacaatccgttgtggatcttggcctgctcacaaagaagtcgccattcctgtcgatttctggcaacttccctccatcttctgacccctagaatctttaggtcttcttcaacatcatcaatccatcttcttcgtggtcgtcctctaccttgtgccctctggttttgaaaagttaatctcttcgtgtattcgtgatctgacatcctagcaatgtgtccagcccatctaagtctctgcactttaacgaatttcacaatatctggatcggtgtataactgatacagttcaaagttgtatcttcgacgccatagcccattttcatttactgccccaaaaatctttctaagaatttttctctcaaaaataccaagaagtctttcatcactttgagatagggtccacgtttcagctccatatatcaaaaccggtctaggcaaagaaaatacgtgtttgaaaattaggaatatcagattctgttggaaaacgaaaatagaaaataatcgaaaacttttaatggaaaaacatgacataagacgacgaaatgtgcaaatcacaat

SEQ ID NO: 4469 - DNA, 2727 bp, Diabrotica virgifera
  SmartBlast Evalue=1E-102; Info="Lipoyltransferase 1, mitochondrial n=1 Tax=Harpegnathos saltator RepID=E2C613_9HYME"
ataactttaatgtaataaaagcattttggcaaaattgcgggacgcgggctaggccactgttgctctgagcgcctcgttttattttctacctgtgctggaaacttaaccacaccactaaaattcaaatcactttgtagtaagcttaagaatgaggttttctgcaataacttgatggcaactgtgcactaaaaataattgtattaatataaatgatatgattaattcttgttcaccggtagtacggagcgttttcttaaactaaattgtctaaatattaaactatataaaatctgaaaatcataacagcaactatatcgaaacgttcataaaatacatacagaatccttaaggtaaagcttaaacattaagcattaaaactttggtagtcaatcacacttgcaaaaatttgttagttaatttggtaactttggtaattgcaaatcacacttgcaaaaattacttcactattaactaaaatgtctgttgaggtttctgggtgaaaaatataccagtccatattgagcaaactatcagaaataagaatggcacattcaatatatatatattttttaattacactatgccaccttctatgtactaattctatggtatttttggttgaaaacttaaattatattaaaaataaaaatttataaaatattatcctctttggtacttatttgaatattgtataaataactggtatgttttttccacctatgtattctgattagatcagaaagaattcatcacttgctttaaatgttctgagccaaatcttagtttctcattgaccaatccattaatcatcatttcgaggtcatgaactgcatcttctgagtatgtgtggcctatgagactagtaataacgttagcatttcctgagaaaccttgagaggatagacctggtggcacgtagaggctaatatcactaatttttccattctctacaaccatattaacctttaggtcctcattaataccatagttttcagctagggtatcatgaaccttgaaggacttagttatgttgaattttggagttttttcatattgccaattccaactgagaagctgttccttaatttcagtcaaacctgggaaccatccttctgtaggattcaccagctggaagccattttgtttattagcatgctccatacccccatcaaccagtttaagtggatgcatcctcatgtattcccatcctatggatgttatcagattttttacattaaccattggattctcttcgcataagttcatgatttttgatctcactgactgtgtagcgttagttttaatgtcagcttcgggtttttgtaaagccatactcagatccactttattaacatttactaaaagtgtacaatggtggtacgcattagttcttcctaattttgcagcagttccagatatctgtttcaaatttcttatcgtcaaatcttctctgggggaaatatccactttcatgttgtaatttctgaaaaggcttctactaataatttccaggttgtattttctattatactgatctctaggtgtaaagaatgtaagatttagatttccgttatcatggtacacagtgcctcctccactatttcttctagcaagttgaactccttgttcgccaatatatggcaactcgttgacatttgcttcaagccaaggattttgatgtctgccgataactacacaaggatcattttgccacaacatcaagacgtggtgatttttaaaatcaaaattacgatacaaccaatcttctaatgctaagtttgtataaatgtccttagattgggaaacgaacacagattttttaatgttttggtctgacgatgttgagtaggatttgttatttcttgaaatcaaagcaattgctcttgtgtaggtacgttggaataatgccattttgaaatatgtatatatagtatgagagtatttacgaatattaattttgtagatgttgtgcctttaaaaagtaccttaatgtgttaagaagttgatgtaacacacgtttttagaagctgatgtaagggcagtgagatagtcgtgaagggcgatagtttgatgcaaccacttccaagtttggtgtaaggagttaatacggattctaagtgccaggcagtccttggtagttctcagcattccttcctttgctgccagatcgaacaaaaaaattcactaaattaaaatagtcaaaaacacgttaaaacaaaacactacaaacaatgaaagatattttttgaacaaaaataatgctagattattatcactgtaaccaacgaatattatattggttgctgtaactgtatcactgacaataagtaactactattatgaatttgatgttgaattaccagtttatatagacatcgttccgcaggggggtcatttatctctagagaggtcatccttaagttatcagcgcttcaaaagaaaaataaactcagttaatcctacttccacatatcattatcatgtgatttattcataaaaatagatatttagccaccagtggttgcgtaaaagtgtacaaagcgtgaaccagtacaaatgtggaatgctctatgcgctctgtcaaatcagataattttatcatggttatattataaatatgtaataaaacatatgcattttttgaataatacactctatgtctatacaaaaaattatccatacacgaattacgaatttaaaatcatcttgattttgattacattttga

SEQ ID NO: 4470 - DNA, 2526 bp, Diabrotica virgifera
  SmartBlast Evalue=1E-102; Info="Lipoyltransferase 1, mitochondrial n=1 Tax=Harpegnathos saltator RepID=E2C613_9HYME"
ataactttaatgtaataaaagcattttggcaaaattgcgggacgcgggctaggccactgttgctctgagcgcctcgttttattttctacctgtgctggaaacttaaccacaccactaaaattcaaatcactttgtagtaagcttaagaatgaggttttctgcaataacttgatggcaactgtgcactaaaaataattgtattaatataaatgatatgattaattcttgttcaccggtagtacggagcgttttcttaaactaaattgtctaaatattaaactatataaaatctgaaaatcataacagcaactatatcgaaacgttcataaaatacatacagaatccttaaggtaaagcttaaacattaagcattaaaactttggtagtcaatcacacttgcaaaaatttgttagttaatttggtaactttggtaattgcaaatcacacttgcaaaaattacttcactattaactaaaatgtctgttgaggtttctgggtgaaaaatataccagtccatattgagcaaactatcagaaataagaatggcacattcaatatatatatattttttaattacactatgccaccttctatgtactaattctatggtatttttggttgaaaacttaaattatattaaaaataaaaatttataaaatattatcctctttggtacttatttgaatattgtataaataactggtatgttttttccacctatgtattctgattagatcagaaagaattcatcacttgctttaaatgttctgagccaaatcttagtttctcattgaccaatccattaatcatcatttcgaggtcatgaactgcatcttctgagtatgtgtggcctatgagactagtaataacgttagcatttcctgagaaaccttgagaggatagacctggtggcacgtagaggctaatatcactaatttttccattctctacaaccatattaacctttaggtcctcattaataccatagttttcagctagggtatcatgaaccttgaaggacttagttatgttgaattttggagttttttcatattgccaattccaactgagaagctgttccttaatttcagtcaaacctgggaaccatccttctgtaggattcaccagctggaagccattttgtttattagcatgctccatacccccatcaaccagtttaagtggatgcatcctcatgtattcccatcctatggatgttatcagattttttacattaaccattggattctcttcgcataagttcatgatttttgatctcactgactgtgtagcgttagttttaatgtcagcttcgggtttttgtaaagccatactcagatccactttattaacatttactaaaagtgtacaatggtggtacgcattagttcttcctaattttgcagcagttccagatatctgtttcaaatttcttatcgtcaaatcttctctgggggaaatatccactttcatgttgtaatttctgaaaaggcttctactaataatttccaggttgtattttctattatactgatctctaggtgtaaagaatgtaagatttagatttccgttatcatggtacacagtgcctcctccactatttcttctagcaagttgaactccttgttcgccaatatatggcaactcgttgacatttgcttcaagccaaggattttgatgtctgccgataactacacaaggatcattttgccacaacatcaagacgtggtgatttttaaaatcaaaattacgatacaaccaatcttctaatgctaagtttgtataaatgtccttagattgggaaacgaacacagattttttaatgttttggtctgacgatgttgagtaggatttgttatttcttgaaatcaaagcaattgctcttgtgtaggtacgttggaataatgccattttgaaatatgtatatatagtatgagagtatttacgaatattaattttgtagatgttgtgcctttaaaaagtaccttaatgtgttaagaagttgatgtaacacacgtttttagaagctgatgtaagggcagtgagatagtcgtgaagggcgatagtttgatgcaaccacttccaagtttggtgtaaggagttaatacggattctaagtgccaggcagtccttggtagttctcagcattccttcctttgcagtttatatagacatcgttccgcaggggggtcatttatctctagagaggtcatccttaagttatcagcgcttcaaaagaaaaataaactcagttaatcctacttccacatatcattatcatgtgatttattcataaaaatagatatttagccaccagtggttgcgtaaaagtgtacaaagcgtgaaccagtacaaatgtggaatgctctatgcgctctgtcaaatcagataattttatcatggttatattataaatatgtaataaaacatatgcattttttgaataatacactctatgtctatacaaaaaattatccatacacgaattacgaatttaaaatcatcttgattttgattacattttga

SEQ ID NO: 4471 - DNA, 4140 bp, Diabrotica virgifera
  SmartBlast Evalue=0; Info=Probable multidrug resistance- associated protein lethal(2)03659 n=1 Tax=Harpegnathos saltator RepID=E2B3S7_9HYME
caacactttataaagtactctccatcatatcacaaacatacacttctcacttcaattaggtatcaattattttatgtgataaaaaatcgttttgttttgttcaagtgctttacttaaaactactttatgtcctgatgttcctgatatttcctggcttgtaggcactgaatttagagctaaaattacaaaatggaggaatcaaaaggccagactgcagaacaaaaacttaatccaatagatcgatcaagttatttctccaatttattattttgttggttacttccttacttcgttaaaggctacaaacgagaactaaccgaagatgatatgtacagacaccgaagtgaacatgattccagtaagcttggagataggctagaggaaaggtggatcaaacacatagctaagaacaagaatcccgcatattataaggtgttaataggaacatttatttgggaaatatttgttctcaatgttcttgttgtattaatagaggcgataagaatgacccaaccatttataatatcaaaactactaaccatttatgaaaaggatcccaaagaaaacatcaatgatgtttatttgtactcaggattgatagtagcgacttcacttgtcaacgtaatcctgctccataaattcaatttggcaatgatgcaagttggtatgaagatgagaatagcttcgtgttctttgatatataggaaagctttaagacttagcaaatctgctctagcagaaactaccattgggcagatggtaaatttactttctaatgatgtaggaagatttgatcaagctgcacatcatcttcattacttctatatcgctccaatacaggcacttattgtgatggtgtttttatatctctttgctggatggacagcacttcttggaactatatttttgttactctctatacccttacaatcatggttgggcaagaaaacttcgcagttcagattgaaaactgcaactcgtaccgatgaaagggtaaggctaatgaatgaaatcatatctgggattcaagtaatcaaaatgtacacttgggaatacccatttgccaagttagtggagttagttagagggaatgaagtaaagttcatcaggaaaacatccgtcatccgtgcaattttgatgtccttggccaggactgtaaacgacgtagctgttgccatatgcttggtaacatttgttttgacaggaaatcctctaacagcttcctatgccttcacagttacttcgtattaccgtctgatgggcacattgacttacttcttccctacggccgtttctcaaggctccgagatgtacatatcgatgaagagaatccagaaattcttgcagtatgatgagctcaagactgacgctcatttcattcctgaaaactctctaaacggtaacaaaaacggcaaacttgctatgaaagaattacctagttccgataagggaagcatccatattagaaacgcgtctgctaaatggttaaagtcgcaacccgagaacaatttagaagacattgacatggatgtaacacctggtaatctagcagctgtggttggatctgtaggaagtggaaagacaaccttactgcacataataatgaaggagctcgagctccaacgtggatctgttactgtaagtggtaaaatttcttatgcatctcaagaaccttggctgtttggaggtagcgtaaggcaaaatattctatttggagaaaaatacgaccaagttaaatacaacgaagtagtacgagtgtgtgccttacaaagagattttactctatttcctcatggagatagaaccttggcgggtgaacgaggagttactttaagtggaggacaaagagctagaatcaacttagctagagctgtttacaaagaagctgatatttacttactagatgatcccctatccgctgttgatactcatgttggtaaacagatatttgaagaatgtatctgtggataccttggaagcaaatgcgtcgtcttggtgacgcatcagctacaatatttaaagaaaataccgaatatatttttattaaagaatggtcaagtagctgtttctggatcatatgatgacataagaaactccaatacagactacagtaaagttttggcaaatatagaagaggaagaggaggaaataagaaggaagtccagaattgttcaaacaaaacaagagaaagatgaagaagaagaagaagtgcaggtgttacaaagagaagctaagagtactggtaatatttctggacgtgtatatctaaaatacgctcaagcaggtgggcatctgtttaaggctttctgtttaatatttctgtttgtaatgggccaagctttgttgagtatgtgccaatatttcgttactttctgggtcaatattcaacaatggaaagcttcacaaaatagtgtatccccaacagtacctgcgtctttagaaaatatgactgcaccgttagacattaccagtccttctcctcaaccagttgatcatacaggatttgcagactggtggctaaccccattgtttataagcgaaaacactgtaatatactttagcgctctgaacattcttatggtcgttataatgaacattagatcgtcttcattctacgcatggtctataactgcctcaacaaaaatgcacaataccatgttcgagaacatagtttatagtcccatgaggtttttcactataaatccttctggaagaatacttaataggttttccaaagatatcggtgccttagatgaagttttaccaatgactttcatggatactgttcaaattggtctcgaggtaggtgcaatctgtttcgtgataagcagtttgacatattggatcatgatacccactatctgcatgggtatattgttttatgtgatcaggatcatatttttagaaaccagtcgagacgttaaaagggtggaatccgtaacacgaagtcccatctacactcatttaacagcatcgctgcaaggactgactactatcagagcattcaaagctgaagatatactcaaaactgaatttgataaataccaaaatactcacagcgctgcatttttcatgtatctaggagctaatagaacctttggattctgggtggactttatatgtgtaatatacattgccttagttatattgtcgctgatttttgttgaaagcgaaacatttggaggaaacatgggtcttgctcttactcaaaccttgggtctgacgggaatgttccaatggggcatgcgacaatggtctgaactcgaaaaccaaatgacatcagtggaaagggtacaagaatatgctgacttaaaacacgaagaagacaaccacactgtagaaccagataagacgtggccagatcaaggaaaagtagaatttaaaaatatgtctcttcagtattcaccagacgatcccccagttcttaagaatctcagttttgttatccaaccttctgagaaagtgggtatagtgggaagaacaggtgcaggaaagtcttcgttaattcaagctgtttttcggttgactcatatcgatggtagcatacttattgatgatattgatacaaaatctgtggctttgaagaagctcagatctaaaatttccattattcctcaagagccagtcctattctctggaacattgagaaataatttggatcctttcgatgagtataaagatgaggtgttatggaatgccctggaacaagttgaactcaagagtgcagtggacgacttaccagccggtctggacagcaaaatggcagaaggtggctctaacttcagtgtaggtcaaaggcaattggtctgcttagcgagagctgtaatcagaaataacaaaatactagtattagacgaagccacagccaacgttgatccatatactgacggtttgattcaaacaacaataagaaaaaatttcgacaagtgcacagtattaaccatagctcacagattaaatacaattatggattcggataaagttctggtcatggatgcaggaagagctgtggaattcgatcatccacatacgcttttacaaaatcaaaatggtattttccattcgctggttatgcagacaggaaaagctacagctaaaacgttgatgacaattgcagaagaaaacaaaagaatgaaggac

SEQ ID NO: 4472 - DNA, 1085 bp, Diabrotica virgifera
  SmartBlast Evalue=1E-121; Info=Multidrug resistance-associated protein 1 n=1 Tax=Culex quinquefasciatus RepID=B0WL13_CULQU
atagcgcagcatttttcatgtaccttgcatcgactagaacctttggtttctggctggactttatatgtgttatatacactgccttagtactattgtcgttgattttcattgaaagtgaaacatttggaggaaatatgggtcttgccctcacgcaaaccttgggtctgacgggaatgttccaatggggcatgcgacaatggtctgaactcgaaaaccaaatgacatcagtggaaagggtacaagaatatgctgacttaaaacacgaagaagacaaccacactgtagaaccagataagacgtggccagatcaaggaaaagtagaatttaaaaatatgtctcttcagtattcaccagacgatcccccagttcttaagaatctcagttttgttatccaaccttctgagaaagtgggtatagtgggaagaacaggtgcaggaaagtcttcgttaattcaagctgtttttcggttgactcatatcgatggtagcatacttattgatgatattgatacaaaatctgtggctttgaagaagctcagatctaaaatttccattattcctcaagagccagtcctattctctggaacattgagaaataatttggatcctttcgatgagtataaagatgaggtgttatggaatgccctggaacaagttgaactcaagagtgcagtggacgacttaccagccggtctggacagcaaaatggcagaaggtggctctaacttcagtgtaggtcaaaggcaattggtctgcttagcgagagctgtaatcagaaataacaaaatactagtattagacgaagccacagccaacgttgatccatatactgacggtttgattcaaacaacaataagaaaaaatttcgacaagtgcacagtattaaccatagctcacagattaaatacaattatggattcggataaagttctggtcatggatgcaggaagagctgtggaattcgatcatccacatacgcttttacaaaatcaaaatggtattttccattcgctggttatgcagacaggaaaagctacagctaaaacgttgatgacaattgcagaagaaaacaaaagaatgaaggac

SEQ ID NO: 4473 - DNA, 3155 bp, Diabrotica virgifera
  SmartBlast Evalue=1E-106; Info=Solute carrier family 2 n=1 Tax= Culex quinquefasciatus RepID=B0X8T3_CULQU
agcattagtgataggacaatattattagctgcaagtaagtcaatttaaaggttccaaatcaaccaacttcacacaaaaaaaaattaaatggcagatagtggccaagcaaaaacctttccccaatacattgcggctctgtccgtatgtctgggagctgtagcagctggtgctgtattgggctggacatcaaacatttcgaaagacctacagaagggaggattaaatgaccttgtcataagcgatgaccaattaggatggattggttcctttgtgactctaggagctttgctgatgtgttttccaatcggctacatttgcgatttaatcggaagaaaatggggatgtcttctaacacttataccgtttaccgttggctggcttttagtgatattttcttccagtgttagtgtaatttacgtcggaagatttttgacaggtttagcaggaggatctttctgtgtagctgctcccatatatagtgcggaaattgcacaagccagtataagaggagccctaggaagctatttccagttactcttgacagttggaattctcatagtatatattggtggagcttggatgcatccaaaggtccttgctatactctctgccgtgataccaatcgtttttgcagtagtcttcttctttcaacctgaaacacctatctatttaatgaagaaaaatcgaccagaggaagctaaaaaggcgttgcaacgattacgtggaaacgcatacgattgcgatgcggaactaaaagaaatacagctgagctttgaacaaggctcatcagaaaaatctttcatgacagttctaaaaactaaagctgccattaaggctagcttgattacgtttggccttatgtttttccagcaaatgagcggtgtaaacgctgttattttttacactggaaagatatttgaagcttctggttcaagtttggatcctgccgtaggaaccataattgtaggaattcttcaaacatcagcaacatttggatcatctttgattgtcgacaagtttggacgaaaaattttattattgatttctattgcatttatggcgctttctgagtttgttctggggatgttctttacatttaaagagagaagtgttttagatgacgatcagcttaaagccattggatttttaccgattgtctgtttaggtattttcattgtaatgttttcggttggttttggaccgattccatggatgatctctgccgaactaatgcctgaagaaattaagtctacgatggtttcagctgcagctaccttcaattggtttttggccttcatagtgaccaaattttatgtaaatctaaagacaagtatcggaggggatgtgacattttatattttctctggaatatgtattggtggagtagctttcgtgattttctgcgtaccagagactaaaggcaagtctgttgctgaagtccaggctcttcttagcggtgataagacggccccagtttcaaacgaaaaagagggtattgataatcctacattcgataaaaactaggttaggttttaatatttgtacctgaattttgtactagaaaaattttaattactgactttcttcaacatttttgttatctcgtatattataaattttcccaaacaactatagaatatgacaagtggtagttgtcgattttttatcaaaaacccttaggctgcaagtgtacagttgatggtattttcttaaagaggactacataatatggactgtaaatattttatgattttacgacctcttaaagacaatattatcatttataaaatgtgagcgttttggttggaaactttaaaatgtctacattaggttaggtaatgttaggattttattttcaataatcattataataatgacgtaataatgacatgatgatgtcatccaatgtttttattacaggtcgccagaaatatctgaaactgctaaggtcagacagatcgaaaactttggttacgcgacgttgtcagatctcacagtaaaattaatttctgctttctcctgcgtaaattttaaaacattgtgtatcatgtcacgggattgtgcacttagtgttctatttttcacggcactgataatattcatgtttattaaaaaatgttttttaaattgtattttaaatacaattactcgacgattttatttggcaatttcataaaaccagtgatttcgtacacatcatcattcaatcttcgattgtacactgctggacatagatcttcctcataattttccatatatttcgatcttgtgtctcttgcattcaattcctatgaaaaggacgacctatgcttcggtaggcatcatctctttgtctccattccagtatccgctttgtctatttattattatctgtcattcgagccacgtgacctgcccagttccatttcagtattgctactatctatactgcatcagccactcctgttctttctggtggtttgggatcttgtctcgtaatgaaacgcaaacgcccaacatagcacgctccatcgctctttgagacacacggatcttttgcactgttctccttgtcatggtcaacgtttccgcaccggaagtcaacactggcgaaacacactgattaaaggtttttcttaaggcatactgatatgtccgatttaaaactatggttcagcttgccgaaggctgctcaagtcagtcttatacgacggagaagctcaacggtttggctatcttttcctatgcaaatctcatgacctaggtatttataggccatacctagtctatggatcttattcctacgcatatatcttagctgactacaagatttgtcatcatctgaggggtttagatatatttattttcaatcccccttctagcgaggaaaggtagagctgatttaaaagttctttggcttcatctatccatccgaataagcgaaaacaattgaatggcgttatcgctgcaaacattattgaaaataaaagcaaatttatattttaaatttttgacgcgtttcagcatcatgtttcaagcttatgtcaactgaatactttaaagtttccaacctaaatacccacactgtatatagttccacatatattttattatattttatatttgtttatgtatgccatgtttgatattattcattgcttaatttattattttat

SEQ ID NO: 4474 - DNA, 2078 bp, Diabrotica virgifera
  SmartBlast Evalue=1E-106; Info=Solute carrier family 2 n=1 Tax= Culex quinquefasciatus RepID=B0X8T3_CULQU
agcattagtgataggacaatattattagctgcaagtaagtcaatttaaaggttccaaatcaaccaacttcacacaaaaaaaaattaaatggcagatagtggccaagcaaaaacctttccccaatacattgcggctctgtccgtatgtctgggagctgtagcagctggtgctgtattgggctggacatcaaacatttcgaaagacctacagaagggaggattaaatgaccttgtcataagcgatgaccaattaggatggattggttcctttgtgactctaggagctttgctgatgtgttttccaatcggctacatttgcgatttaatcggaagaaaatggggatgtcttctaacacttataccgtttaccgttggctggcttttagtgatattttcttccagtgttagtgtaatttacgtcggaagatttttgacaggtttagcaggaggatctttctgtgtagctgctcccatatatagtgcggaaattgcacaagccagtataagaggagccctaggaagctatttccagttactcttgacagttggaattctcatagtatatattggtggagcttggatgcatccaaaggtccttgctatactctctgccgtgataccaatcgtttttgcagtagtcttcttctttcaacctgaaacacctatctatttaatgaagaaaaatcgaccagaggaagctaaaaaggcgttgcaacgattacgtggaaacgcatacgattgcgatgcggaactaaaagaaatacagctgagctttgaacaaggctcatcagaaaaatctttcatgacagttctaaaaactaaagctgccattaaggctagcttgattacgtttggccttatgtttttccagcaaatgagcggtgtaaacgctgttattttttacactggaaagatatttgaagcttctggttcaagtttggatcctgccgtaggaaccataattgtaggaattcttcaaacatcagcaacatttggatcatctttgattgtcgacaagtttggacgaaaaattttattattgatttctattgcatttatggcgctttctgagtttgttctggggatgttctttacatttaaagagagaagtgttttagatgacgatcagcttaaagccattggatttttaccgattgtctgtttaggtattttcattgtaatgttttcggttggttttggaccgattccatggatgatctctgccgaactaatgcctgaagaaattaagtctacgatggtttcagctgcagctaccttcaattggtttttggccttcatagtgaccaaattttatgtaaatctaaagacaagtatcggaggggatgtgacattttatattttctctggaatatgtattggtggagtagctttcgtgattttctgcgtaccagagactaaaggcaagtctgttgctgaagtccaggctcttcttagcggtgataagacggccccagtttcaaacgaaaaagagggtattgataatcctacattcgataaaaactaggttaggttttaatatttgtacctgaattttgtactagaaaaattttaattactgactttcttcaacatttttgttatctcgtatattataaattttcccaaacaactatagaatatgacaagtggtagttgtcgattttttatcaaaaacccttaggctgcaagtgtacagttgatggtattttcttaaagaggactacataatatggactgtaaatattttatgattttacgacctcttaaagacaatattatcatttataaaatgtgagcgttttggttggaaactttaaaatgtctacattaggttaggtaatgttaggattttattttcaataatcattataataatgacgtaataatgatatgatgatgccatccaatatttttattaatagcccatttcatcatctgacgagcgcatgcgcagccgccatgcttttcccgcattaagggtatgttgaacataaccatgttgggtgctgtattctttggtcatatacacatgttcaacaaatttctcttaatttcttgataacaatttccggactgcaa

SEQ ID NO: 4475 - DNA, 2590 bp, Diabrotica virgifera
  SmartBlast Evalue=1E-176; Info=Endonuclease-reverse transcriptase n=1 Tax=Bombyx mori RepID=D5LB38_BOMMO
accttatggtcttggaacaaggaacgaaagggtgaccgacttgtacaattttgtcaggaagaaaacatgagagttaccaacacatgtttccaactccacccccgtcgcctttatacttggaaatctccaaccgatagagctcagaacataataagaaatcagatagacttcattctcatcaacggtagattcagcacaactgtcaaaagagcttgcacatatcctggagcagatgtgccttctgaccatgtactattagtggccgtcataaagatcgctctttcatgcaacaacaagcctgaaactcaacaacagatcgcattggataaactgaaagatccaatgatacaagcagaaataagtaatgaaataaacacacaaattcaaatattgacgacaaacattaccgaagatctaacaccaacatggaatacgattacaagtgctgtaacagacatcatgaaaagcaacttggggtacaaaccaaagaacaagaagcaaaaatggatgacagaagaaatactattactaatggatgaacgacgacgacacaagaatgacccagatggcagcaatatgtataaaacattaacaggcaaataaaagcaaagataagaatagcaaaaaatgaatggcttaagcaacaatgtatcgatctagaacatttacaacgacagcacgacgatcggaatttacataaaaagcttaaggagactgctggaatatacagaaaacgaagaccaactattatagttaatcaggataaccaggtagtgctaggtgaaaaagagaaaattcatatatgggaaaactatattcaggagctctttcatgacgaaagacccatgagtgaagtttatacagacgaccagctgactggcccttcaattactaaagaggaaatagaaaaggcaatattatattcaaaaaacaataaggcacctggacctgatgaaatcccttcagaaatactcaaactactagatgaaaggggaatttcagcactacataaaatatttaattttatttatgaaactggttgctatcctcagcagtggttgctctctacatttattcccctacccaaaaaagtcaatgcaaaaagatgtgaggatcacagactcattagcctgatgagtcacactttaataatattcttaaaatactacatcaaagattatacaaaaaatgtgaatgggacatcagtgattctcagtttgggtttaggcaaggtttgggaacaagagaagcaatagtagcaacacaggtgttggtccaaaattgttacgatcagaggaaggacgtattcctgtgctttttagactacgagaaagcgtttgatcgtgtccaacatcacaagttaatgcagatcctcaagaagcttgatatagaccaaaaagacataagatgcattgaaaacttgtactggtatcaggcagcacaattaaaaatagacaattctatatccaaatccatacatataagaaggggtgttcggcagggatgtgtgctttcccctcttttatttaacatttattcggaagccatatttcaagagtctttggaagatgcagagatgggaatcaaagtgaatggagtattgatcaacaacatacgatatgctgatgatgctgtcttaatttgtgacaacatagcagatcttcaacaacttgtcactataatcggagaatacagtaagcgaatgggattagagattaataccaaaaagaccaaattcatgatcatctccagaaacttggatgcatttgaaaactccaccataacactgaatactaagtccattgaaagagtgagcaaatttaaatacctgggaacgtggcttttgaagactgggcatcggacagggaagtaaaatgtcgcattgagcaagctcgacaagctttcgtaaaattcaggaaggtactgacctgctcagagttcgacttacactgagactaaggtttactaaatgctacgtgtggtcggtgctgctatatggcatagagggctggacactcaaaacgagggatataaacagattagaagccttcgaaatgtggctttatcgccgtatcctaaagataccatggacggcgaaagtcacaaatgtggatgtccttaaaagaatcaaccaagaacgtcagcttttcgaaaacatcaagaaaagaaaaacggcgtatttgggtcacatcatgcgaaacgaaaaataccagttccttcaacttataatccagggtaaaattgaaggcaagagaggaataggacgcaagaaaatgtcctggctccgaaacataaggcaatggacagggattaccgacatacaatcactgatacacattgcaagaaacagagagttaatggaaaatgtgatcgccaacatccattagtggatttgcatttgaagaagaagaagaatgttttcttagcctcttgacaaaatttcaaaatatggatctagcaggttttgatcctataggcctcaattcttttagcttacacacattccaatataactatagattagtgccaggcaagtaagtatccaaatgaaattatttccgcctattatattatatatacaccgttatta

SEQ ID NO: 4476 - DNA, 2553 bp, Diabrotica virgifera
  SmartBlast Evalue=1E-176; Info=Endonuclease-reverse transcriptase n=1 Tax=Bombyx mori RepID=D5LB38_BOMMO
accttatggtcttggaacaaggaacgaaagggtgaccgacttgtacaattttgtcaggaagaaaacatgagagttaccaacacatgtttccaactccacccccgtcgcctttatacttggaaatctccaaccgatagagctcagaacataataagaaatcagatagacttcattctcatcaacggtagattcagcacaactgtcaaaagagcttgcacatatcctggagcagatgtgccttctgaccatgtactattagtggccgtcataaagatcgctctttcatgcaacaacaagcctgaaactcaacaacagatcgcattggataaactgaaagatccaatgatacaagcagaaataagtaatgaaataaacacacaaattcaaatattgacgacaaacattaccgaagatctaacaccaacatggaatacgattacaagtgctgtaacagacatcatgaaaagcaacttggggtacaaaccaaagaacaagaagcaaaaatggatgacagaagaaatactattactaatggatgaacgacgacgacacaagaatgacccagatggcagcaatatgtataaaacattaacaggcaaataaaagcaaagataagaatagcaaaaaatgaatggcttaagcaacaatgtatcgatctagaacatttacaacgacagcacgacgatcggaatttacataaaaagcttaaggagactgctggaatatacagaaaacgaagaccaactattatagttaatcaggataaccaggtagtgctaggtgaaaaagagaaaattcatatatgggaaaactatattcaggagctctttcatgacgaaagacccatgagtgaagtttatacagacgaccagctgactggcccttcaattactaaagaggaaatagaaaaggcaatattatattcaaaaaacaataaggcacctggacctgatgaaatcccttcagaaatactcaaactactagatgaaaggggaatttcagcactacataaaatatttaattttatttatgaaactggttgctatcctcagcagtggttgctctctacatttattcccctacccaaaaaagtcaatgcaaaaagatgtgaggatcacagactcattagcctgatgagtcacactttaataatattcttaaaatactacatcaaagattatacaaaaaatgtgaatgggacatcagtgattctcagtttgggtttaggcaaggtttgggaacaagagaagcaatagtagcaacacaggtgttggtccaaaattgttacgatcagaggaaggacgtattcctgtgctttttagactacgagaaagcgtttgatcgtgtccaacatcacaagttaatgcagatcctcaagaagcttgatatagaccaaaaagacataagatgcattgaaaacttgtactggtatcaggcagcacaattaaaaatagacaattctatatccaaatccatacatataagaaggggtgttcggcagggatgtgtgctttcccctcttttatttaacatttattcggaagccatatttcaagagtctttggaagatgcagagatgggaatcaaagtgaatggagtattgatcaacaacatacgatatgctgatgatgctgtcttaatttgtgacaacatagcagatcttcaacaacttgtcactataatcggagaatacagtaagcgaatgggattagagattaataccaaaaagaccaaattcatgatcatctccagaaacttggatgcatttgaaaactccaccataacactgaatactaagtccattgaaagagtgagcaaatttaaatacctgggaacgtggcttttgaagactgggcatcggacagggaagtaaaatgtcgcattgagcaagctcgacaagctttcgtaaaattcaggaaggtactgacctgctcagagttcgacttacactgagactaaggtttactaaatgctacgtgtggtcggtgctgctatatggcatagagggctggacactcaaaacgagggatataaacagattagaagccttcgaaatgtggctttatcgccgtatcctaaagataccatggacggcgaaagtcacaaatgtggatgtccttaaaagaatcaaccaagaacgtcagcttttcgaaaacatcaagaaaagaaaaacggcgtatttgggtcacatcatgcgaaacgaaaaataccagttccttcaacttataatccagggtaaaattgaaggcaagagaggaataggacgcaagaaaatgtcctggctccgaaacataaggcaatggacagggattaccgacatacaatcactgatacacattgcaagaaacagagagttaatggaaaatgtgatcgccaacatccattagtggatttgcatttgaagaagaagaagaaaatgctattattaatctgtttttgtcctttctccccactataaaacttataacttataaccctaagcatatatagaaaaggcccaagaagttttttgaggacaaattcgcctgttcagaagaagaatgacgcaaccgc

SEQ ID NO: 4477 - DNA, 3802 bp, Diabrotica virgifera
ggaaaatgctatatatatttattgaaatgaaataaacagaaaatataacataatgtatttctttaattaaataatgtacatactaaataatgaaatggtacgaaatattgttaacaaactcctacaagtgctaactagcaacagtcgtgtcaagtcgtctcaataatatacaaaaatatatgacctttctaatgatttaaaaactttaattcattcggcagttaaacaaaatataccaaaaaataagaaagtcatacttatctactgttatatatttataatacaaatgtacagagtacaaacttttaattatcacattgtttatatttattaaatatttggaccgatatcaaaattatctacttcatatctatgatgaatatttggaaaatgtttaaattattattttgttgaatttatttattgcagcttcagctttctggatgaaaggtctacttttgttctgcgagcctagcaaagaaataagtatgtgcttgtctagctaggacgcgcctgcgtagaccctgatttttgttgagcttcgatcccaacggtggtcgggttgagtcgaacacgaaagtgtttatactacattatcaaccacttatcggtaacatcgaccagccgatgatgaaatgactttatgcaatttgaaaagggagatcctaagaagattctacagagcaccaagagagcgatggtacctacattcagaacttgggaagaacttgtgtcttgccatgtaagatgtatatgtattttacgtattggattttgtggattggaggagatagtgcaggagaccagagttctacaaaagcggtagcacccaatggtaaagtaagtacttaaaaataacgccattggaatatctataaactagtaatctgtacatactaggaaaaaacagatccagaaaacagtaggtaccaaattttgtgtatgattttaaatacggagatattttggattccaaactcaaaataccaataaaacgaaaataatagtggtattcgttattattagattaactggatacaaagataaatgggaagtagaatagaaatagcaagattgacgttcaccagaaagtaaatcgaaaatcttttctggaaatattttgaataaagatagttgaagcatttgaaatgttcttgctcataagactactgaaaatatctcgtcatattaattttagcaccttacagaatctttacaagtatatttctcaaataacatcacagactagagtagatacactcatggaccaaaatttgttatgacctacacataaatttgaaaaaatagttatgtagtaaaaaacctaacggtattattgatcgcattgatgcattttataataagcaagttatctatttataggcgatataaaaaaatgtgtacaatctgtttagaatttgatatcagttcattttgcggtatgctccacatttatgtagtggcaataaaagttttccttaaataaactgaacagaaatattaaccaatacaaccatgtagaaaagaataaagtaatgagttgtcaatttagtgatataaactcctctaaacccaaattcgtttcactgaataccccaataatcacacatacaccaagtactggacgttttgtagagggttcttcaggattttgacatatagtttcattgaagataaacaatcactatacaaagcttcttatctgataaggtacttcggattgtttattggattattttattccgcattatttatttcagactctatattttatgttcctttatatttcttcagtgtatgaccatttgtctttcaacaccagcctcttttattctcacctcttgggccacttgcctgtggatttctgttgctatatttgaagtatatccctcaattttattcggactaattctataccctgtatatatattgtttaagtaatttagtaaaagtcctacatggttacatttatatattaattttaacaaaatatatcacaatatgcgagaaaaacattacttgttgcgagatttaaacgcacccatgcaaataaatttaactgcattctacacatgtaccaaaccaatcaataagtttctggactaacatatagatgacgccacgatcacaaattcatgtttttaaaaggtcttatccctcaaatgatacctaccaaaatttgagctaataaatcggagcagtagtttacaagttacagtggtttatgttttcttttttcactttcgcgtgttgatagaacattgttttcgacttttaaggttaaggtttcccgaatactctggtcttctaaattcggcagttctcgcggaaaatattctggaagctcacaaaatcgatttacccgattgtaaattgaagaaacagaagcggtgaagatatcaaaagataattagtccagggcgcatctgttttgagatggacgttgagaagtagctcatattgttttgccgaaattgcttgaaatcaactgatataataataattgagttatcctcccactcaaaaatgtgcggaacatggcttaaataatcaaaacgtcaaaaaatgaaagaatgattataactttaaaaatatgcattttcgagaaaagttacaccaacataaaagttgcgtaattaaaccttctacaatataggaccagtcaaaaattccaaaaattgtcacccttgctgcaaaatagcaataattacgaaataaccataaaaaaacaagtaagtattcgcattttacgcttttcaaccatctatgctagaattaggaccttcatattttacccagaaaaactttatgatataataaaacaacactgcaaattccattaagatcggtttaatagattttgcaatcagatttcgcaaaaaaattcatttcttcaaaatgttgcaggactaaaaataaagcagatagcaaattgaaaatttttttacatatagaagaatactgcacctttcattttcaatctgcaaaattaaaatcggtcaaccaccacggcgtcagtaacttttttttaaacaaacattaatttttcgcaggacagcggtgttcgattcacacaagttgatttccaccaaaatttcttccaatctttatctaatatattattttcttactctatattttgttgtattttaatattttaattccacaaaaatcaaactaatttgattattgtttgtgaaatattgtttaaacaattgcatatgtttaaaaataataaacttttattctctaagttaaaatatatgaacaaagaaagtttttgctaaaaaagtgttatttcaaaggatagagtatgtgtttttattttgcaataaacaaatttatttatttatatcgaaatgtaataaaaattaaaatttatcaatcattatcaaaggtcattggaatgcccaatcagagcaaacgtatccgctgtcctgcgcgtagaaccaaaaattaatgtttatttaaaaaaatcctgacgtcgcggtagtaactaattttaaccttgcagactgcaaataaaaggtacggtattcctccatatgtataaaaaaactaacttgatgtctgcttcattttcagacctgcaacattttgaaaaaataatttttttttgcgaaagctggattgcaaaatttactttacaaaacctattaaaccgatcataattaaatttacagcattgtttaactagatcataaagtccctctgggcgaaatacgaaggccctaagtgtagcataaatgattgaaaaacataaaatgcgaatacttgtttttcatggtcttcgcaattattg

SEQ ID NO: 4478 - DNA, 1220 bp, Diabrotica virgifera
cagaaaagatgtactgacatgagagttgcgtgattaagttttctacaatatagagttggttgaaagttggggggtggtcacacttgttgcaaaatagcaataattgcgaaagaaaccatacaaagacaagtattcgcattttacgtttttgaactatttatgctacaattataaccttcatatttcacccagaaaaactttatgatacagtaaaataatactgtgaatttcattaagattggttcaatggattttgcagggtaaattttgcaatccagctttcgcaaaaacaattcattttttcaaaatgttacagaactgaaaatgaagcagatagcaagttgaaattttttttgcttatagaagtgtactgtgcctttcatttgcagtttgcagggattaaaatcgattggctaccacggcgttaggaatttttttgaataaacattaattattggtgctgcgcgcaggacagcggtgttcgattcacatgaagttgatttccaccaaaatttcttccaatcttcatctaatatattattttcttactctatattttgttgtattttaatattttaattccacaaaaatcaaactaattttattattgtttgtgaaatattgtttaaacaattgcatatgtttaaaaataataaacttttattctctaagttaaaatatatgaacaaagaaagtttttgctaaaaaagtgttatttcaaaggatagagtatgtgtttttattttgcaataaacaaatttatttatttatatcgaaatgtaataaaaattaaaatttatcaatcattatcaaaggtcattggaatgcccaatcagagcaaacgtatccgctgtcctgcgcgtagaaccaaaaattaatgtttatttaaaaaaatcctgacgtcgcggtagtaactaattttaaccttgcagactgcaaataaaaggtacggtattcctccatatgtataaaaaaactaacttgatgtctgcttcattttcagacctgcaacattttgaaaaaataatttttttttgcgaaagctggattgcaaaatttactttacaaaacctattaaaccgatcataattaaatttacagcattgtttaactagatcataaagtccctctgggcgaaatacgaaggccctaagtgtagcataaatgattgaaaaacataaaatgcgaatacttgtttttcatggtcttcgcaattattg

SEQ ID NO: 4479 - DNA, 2915 bp, Diabrotica virgifera
gaattattttgtgatctaaggttttaataatacgatgtattatttattttttcaatttaacactcaaagtgagatcaaaatccatacataccaaagatgttatgtcgggtaataagaataaatactgaaaaataaaaagaaaacgtaaagtaaaaataattaaaggcatttctttttgagttatacgtagtttagacactgctaaaattttaaggaagaactaaatactataatttcggaactaggattatgtttaacatttttgtttgttttatatttctataatatttcataattttcaaagatgaaatcaaactttgtcttgaaaaactccactttttgtatacaaagaacttcaatacattgacaaattgaattttttcactacaactttaattttcaatattaattttttcttttaactaaaataagcaataaagaaaaatgtaagttagcagattatttactgtcccttgtataatcactgaagcattataaacaccgtcgtctcttcgaacttcatatttgtaaaactttctcattttgcacagctcgtttccacttcagaacttcataaaatcagctacacgttaccaataagtatgtagacaaacttaagaacagcttctgaagacagttattaaataatattaaaattaagtaaaatgtgatgcaagaaattatgtagagcaataactatgaaacatcctactccagtagtctggaatgctgaatttcgctaggaatgttaattgcgggaccccaaaaaagatgcaaaaaagtttgccactactactcccgggctttccccctaaaatcctcgtatggggggatgagggggaaacattgatatacaaagtatctgtacgccatagaaaaaatgtttcaaacaagaaatgtgtgtatgtattgtaacactagcgaatgggcaccagggcgccattttgtagcagtcccagaaatggacgctatttgtataacaccaatattattaacacggtaaatgccaaattaaacaaaatgtaaaaatatacttggtgctacttaactttttgatatacctcggtagctctaagtcttcagagaactaggggtgtggattcttaatagatgttaaataaaattgaaactcaaatgctcgggggcgccataattaaaaaagaaaatataatatttgcttacttataaaaaaatataatactaagaatgtcggttacttgaaatatctgtacttaccgtagactactttcatgagcttagtaggagagatctttactttataagaagtatagagattggtaaagaaaatctaataattaaacacaattcttactttattgatacaaataaaatttagtaaagttgtcatcaaaaaaagtctttaattattttaccaattggcgagaaaacgtaagagttcaacaattaaaaatagcgcaagtaccttgttgtgttctttatccgtgggtgatccatagtccatccatgcggcagttaaggtgttaaacattgtcctgatgttacggcacatttgttgtcacggcacataacgatactcattttgacagataaagtacagctattaattatattaaagatgaaattaaattgttcgtttattgtatgcaacatttggatactattattattattattgttattgattaaatttaattaaaagaaacgaagaacttttcgacaaaagaaaaccaatggatctgtttaatccatcactagaaacacaaaatacggtcgagaatttacactctacgaccacagcagccacttaggcctacttcggctctggaacaaaaactgaactgtactaaatacaaacaactatctccattgaactattattaacaattttctccgtcagcaaggcaaagagcctgctgacggaaaggcaccagcttcttactctagactaccagaactgatctcgagtatctccagaactctctcacaacccaaaactcattccatctccccacttttctatcctactcaaccatgtccggttttaccaataaaaaattcgacaatttccactactaatttcaaaacgaatagaaaagatttaagcaaatttcaaccacgccttcaaaggtagtaactctttctctcgcaaagaggattaaaccaaatgaaatcctgataactatatctcagctaaataccttctcacgtgttcggctgatttagcttttcgcacagttagcccactagataccaacaaatatattatataaacaactcagagccacttaatctctataagataaatattttccagtcctgctgtcggtaaaaacaatttgctgaaagattttcgactgtgattcttttggtggtatgaaacatatcgaggtccctcagatacaagagatatgaatatcatgagaatcgagaacgaattacgcaataccatagatttgtgagaaccgacaattctttgaaacacaaacttggttttaacgaatttaaaatacagagtggagcaacgatgtcagtgattcgaagatactagtgactttcgcaccgttacagtataagcgatggtcctacagcttctgccgcttccccgtttcgattgccatatttttctatctctccaggtgtcttcatcaagggctctgtatttcatgctttccataacatcttgttacaggccaaagatcactcgggcgccccagaatgcgatggagagataatatccaagcagatctcccgaaaaatgaacattccatttgaccctaggttgatggaagaccgaacaaattggaaaaacgttctacagtcagccaggacccacccagggttgtagcgctacgtgatgatgatgatgataacatcttgtatctaagacttggctggccttcctagtttccttctattacttggattatatattc

SEQ ID NO: 4480 - DNA, 2100 bp, Diabrotica virgifera
gaattattttgtgatctaaggttttaataatacgatgtattatttattttttcaatttaacactcaaagtgagatcaaaatccatacataccaaagatgttatgtcgggtaataagaataaatactgaaaaataaaaagaaaacgtaaagtaaaaataattaaaggcatttctttttgagttatacgtagtttagacactgctaaaattttaaggaagaactaaatactataatttcggaactaggattatgtttaacatttttgtttgttttatatttctataatatttcataattttcaaagatgaaatcaaactttgtcttgaaaaactccactttttgtatacaaagaacttcaatacattgacaaattgaattttttcactacaactttaattttcaatattaattttttcttttaactaaaataagcaataaagaaaaatgtaagttagcagattatttactgtcccttgtataatcactgaagcattataaacaccgtcgtctcttcgaacttcatatttgtaaaactttctcattttgcacagctcgtttccacttcagaacttcataaaatcagctacacgttaccaataagtatgtagacaaacttaagaacagcttctgaagacagttattaaataatattaaaattaagtaaaatgtgatgcaagaaattatgtagagcaataactatgaaacatcctactccagtagtctggaatgctgaatttcgctaggaatgttaattgcgggaccccaaaaaagatgcaaaaaagtttgccactactactcccgggctttccccctaaaatcctcgtatggggggatgagggggaaacattgatatacaaagtatctgtacgccatagaaaaaatgtttcaaacaagaaatgtgtgtatgtattgtaacactagcgaatgggcaccagggcgccattttgtagcagtcccagaaatggacgctatttgtataacaccaatattattaacacggtaaatgccaaattaaacaaaatgtaaaaatatacttggtgctacttaactttttgatatacctcggtagctctaagtcttcagagaactaggggtgtggattcttaatagatgttaaataaaattgaaactcaaatgctcgggggcgccataattaaaaaagaaaatataatatttgcttacttataaaaaaatataatactaagaatgtcggttacttgaaatatctgtacttaccgtagactactttcatgagcttagtaggagagatctttactttataagaagtatagagattggtaaagaaaatctaataattaaacacaattcttactttattgatacaaataaaatttagtaaagttgtcatcaaaaaaagtctttaattattttaccaattggcgagaaaacgtaagagttcaacaattaaaaatagcgcaagtaccttgttgtgttctttatccgtgggtgatccatagtccatccatgcggcagttaaggtgttaaacattgtcctgatgttacggcacatttgttgtcacggcacataacgatactcattttgacagataaagtacagctattaattatattaaagatgaaattaaattgttcgtttattgtatgcaacatttggatactattattattattattgttattgattaaatttaattaaaagaaacgaagaacttttcgacaaaagaaaaccaatggatctgtttaatccatcactagaaacacaaaatacggtcgagaatttacactctacgaccacagcagccacttaggcctacttcggctctggaacaaaaactgaactgtactaaatacaaacaactatctccattgaactattattaacaattttctccatcagcaaggcaaagagcctgctgacggaaaagcaccagctttttactctaaactaccagaactgatctcgaatatcttagaactctctcacaaccccaaaactcattacatctccccatttttctatcctactcaaccatgtccggttttaccaatcaaaaaattagtcaatttccactcttcatttcaaaacgaatagaaaagatttaagcaaatttcaaccac

SEQ ID NO: 4481 - DNA, 2811 bp, Diabrotica virgifera
  SmartBlast Evalue=0; Info=Sodium-and chloride-dependent GABA transporter ine n=1 Tax=Harpegnathos saltator RepID=E2BGZ3_9HYME
aaataatacagttggttatgaaaactaaaaatttattaacaatgtgactttcgaatcaaaagacgttcatataaagcttcaatttgcttgcttatcagactgcggtaatctttaattattacacttgttcattcgtttttttctcctcttgcacgttatcatattcgctaaggctttcactaggcttcacatcgtccgcttcggtttgttgtggaatatttggagtactgacagcggtaaaaagtggaacttctttgttatcgttttgaatgggtttaatatcagcgttggttttgactatgagcatcggaccagtttcgctgtcgtctacgcagtcgcagtccagatcgctgcacttcggacagtgatcgatgagatcagattttattgaatttttaaatttctcaatataagtagatcctggagcatttaaaaatacaattaccatcgttatgggtatacaaagaatcgaaaatgcacagataatccatcctagaactattgcccaagtgggataatggtaagttttattgttatatgtgggcggttcataatcaattatcaaaaatacccataaagcgaaaatcatgagtggggttgcaatcaaccaacaaaacttgatgaaatagccaggatgccttcctgtcatagttttaacgtttttgcttagcctccatgcgccatagaaccaagctactcctatcacctcgaagaatgcgagatacataatggatatggaggctgcgtaatggtctatcagctgaaagaagtatattcctcccttagtaacgttgggtatgccacataaaaacgaaacaacgcagatgactagtacgagaacctcatggcatgtcaaatttctagaaatccatcctggaaatccgtcttgaattgacgtcaccacaacctccacaatagcgaattggctattcagcgctaggcaaatcagcatgaaaaagaagaacacggcccagagttgggaggctggcatctttgctatggcttgaggatacacgacgaatattaggccaggtccgtcatcaataacatcctcaatactcgttccttgttcggtagcgatatttccaattgtagcaaaagcgaaaattcctacgattaaactagttacactatttaaaagccagactgctacagtattaggtaaaatactattattgtacttattataacttgcgaaacagatcattgatccaaaagcacaacccattgagttgaaagtttgactagctgcatttacccacacctccgcattcagaagaagctcgaatttcggtttgaagaaatacctcattcccacatcagctccttccaatgtcaaagatttgattaataatatgatgatgatgatgaatgggaatgtcgctgtgaaataacgcactttcgctgatgatttgatgctcttccatatggcaaaataaataaggatccaggcgcacaataaacaggctacaagttcccatctaagattgtgagagtcttctatacctttacctatttgaagaacctttaagtcataaaactcttcagccggcgattgagtatatctaggttttgaatggtttagcctctgcttcacttggtcccagcaatgctgcgtattccatcgatgtgagcagtcgtcccatggttgatttactcgaaatgaagtgaaaaaataaaatattccatacgcgatgataacactatagtacgttgacataagaaatgatattactacacttgcaataccagttcctttgaataatggacataggtgtcccaatgcacctatcggacctcgtcctgtaaattgacctattgctaattccatatataacatgggccccccaataaatatcataattattgcatatggaatgagaaaaacggctcctccacttttgtaacaaaggtagggaaacctccaaattgagcctagtccgacactgtatccaatacaagccagcacgaactgtaacttattggaccactgttgtcttcttggtttcccatattcgtcgttgtcttcgtcacctgtttcatcgtctgtatcattttctaacgtgtacgcttctggtggtgttggaggattaacaatattaaacaactccaccggtgatgtgggaactctcctaacaatcatctttttgccatcagtcgaccccatatacaccgatgaccatgacctgagtgacgcggcgtcagaagacttagaaacaatccctgactcactactaggaggtttctgacccaaatcacccaataaatgatggtaattcttcagagacctaacgctattgtttctcctaaagttagggctactttggtgcgaggaaatcgagttaaaactatacataggaatgtcttggtgagttttgggcgctttattgaacgaaccagctgacgatggtaacttatgttctacaggctccttaatttctttaatttgtttaggttctaggggttctataggttctatatcacagtcgttttcttctgtctcttcaacagctggtatgacttccacctcgtgtttcaacagtctttttatcggcatgttgttggattttatttccttcataaccaatccaacgtcttccattttcgaatgtttatgatgaatgttgttttcgtacattttttgtgtttctaaaccaaattacgatttcatattctcggttgtactttccaattgcatgatatcactcgagtgtagataagattgtgagttataacctagatttgtgttcaacaatcgcgcacatcgctctcactgaacgttatgagttgtcacggcgcgctgtgtaccgt

SEQ ID NO: 4482 - DNA, 2186 bp, Diabrotica virgifera
  SmartBlast Evalue=0; Info=Inebriated-like protein n=1 Tax=Aedes aegypti RepID=Q7YZC7_AEDAE
aaataatacagttggttatgaaaactaaaaatttattaacaatgtgactttcgaatcaaaagacgttcatataaagcttcaatttgcttgcttatcagactgcggtaatctttaattattacacttgttcattcgtttttttctcctcttgcacgttatcatattcgctaaggctttcactaggcttcacatcgtccgcttcggtttgttgtggaatatttggagtactgacagcggtaaaaagtggaacttctttgttatcgttttgaatgggtttaatatcagcgttggttttgactatgagcatcggaccagtttcgctgtcgtctacgcagtcgcagtccagatcgctgcacttcggacagtgatcgatgagatcagattttattgaatttttaaatttctcaatataagtagatcctggagcatttaaaaatacaattaccatcgttatgggtatacaaagaatcgaaaatgcacagataatccatcctagaactattgcccaagtgggataatggtaagttttattgttatatgtgggcggttcataatcaattatcaaaaatacccataaagcgaaaatcatgagtggggttgcaatcaaccaacaaaacttgatgaaatagccaggatgccttcctgtcatagttttaacgtttttgcttagcctccatgcgccatagaaccaagctactcctatcacctcgaagaatgcgagatacataatggatatggaggctgcgtaatggtctatcagctgaaagaagtatattcctcccttagtaacgttgggtatgccacataaaaacgaaacaacgcagatgactagtacgagaacctcatggcatgtcaaatttctagaaatccatcctggaaatccgtcttgaattgacgtcaccacaacctccacaatagcgaattggctattcagcgctaggcaaatcagcatgaaaaagaagaacacggcccagagttgggaggctggcatctttgctatggcttgaggatacacgacgaatattaggccaggtccgtcatcaataacatcctcaatactcgttccttgttcggtagcgatatttccaattgtagcaaaagcgaaaattcctacgattaaactagttacactatttaaaagccagactgctacagtattaggtaaaatactattattgtacttattataacttgcgaaacagatcattgatccaaaagcacaacccattgagttgaaagtttgactagctgcatttacccacacctccgcattcagaagaagctcgaatttcggtttgaagaaatacctcattcccacatcagctccttccaatgtcaaagatttgattaataatatgatgatgatgatgaatgggaatgtcgctgtgaaataacgcactttcgctgatgatttgatgctcttccatatggcaaaataaataaggatccaggcgcacaataaacaggctacaagttcccatctaagattgtgagagtcttctatacctttacctatttgaagaacctttaagtcataaaactcttcagccggcgattgagtatatctaggttttgaatggtttagcctctgcttcacttggtcccagcaatgctgcgtattccatcgatgtgagcagtcgtcccatggttgatttactcgaaatgaagtgaaaaaataaaatattccatacgcgatgataacactatagtacgttgacataagaaatgatattactacacttgcaataccagttcctttgaataatggacataggtgtcccaatgcacctatcggacctcgtcctgtaaattgacctattgctaattccatatataacatgggccccccaataaatatcataattattgcatatggaatgagaaaaacggctcctccacttttgtaacaaaggtagggaaacctccaaattgagcctagtccgacactgtatccaatacaagccagcacgaactgtaacttattggaccactgttgtcttcttggtttcccatattcgtcgttgtcttcgtcacctgtttcatcgtctgtatcattttctaacgtgtacgcttctggtggtgttttaatgttggaaaaacaaaggtatgtccttgctttggtctctttggtaaaatatacaccatatttttccgcaagttatccatcaacctactgagttaagaat

SEQ ID NO: 4483 - DNA, 2504 bp, Diabrotica virgifera
tggcggttatattaaattggtgcagcatactacgttgtaaatcatcttcattttgagagattagtattgcatcgtctgcatagcacattctttttagttcttactttttttaatatttcatccatgatcaggttgaagaataaagaactcagagaattgccacattcaattgggttagttagttcttctcatttttttacttttattgtgttgttctggtagatacattgttattttgtaataagtaattccaggcatggcgttttggtaagattcaaatgagcgatatttgaaacaacacagctttaaaaaagatgaaatggttgtactttgcagaaagatattgaaagcaaaaaatagggcgggcacattatacgaatgtgaaacaataaaaaatctctcgtctctggacgttttcttacatctgttgaaaatgtgcaagactgtgattattggttcagtatttagtttgagattcaatttaatgataatcacttttttgtacagcacatcttttggatttttttcattattagtacgtcgatactaatttaatatcttgagacaacattaagacaggtacagaaatttttattagcgtgtggatatgtagtttttaacatgtatgaataaaatagaaaatagtttatgataaaataaaatattaacaaaagttttataatttgaatcgatatataaaccatttttgatgaatcagtcgaattctctggatgtgctataaagcttaccatcttatattgtgacaaaaaacgaaaattattgctataatatacgagaagaataatatttcgtgtaaaaattaaactgacaaagagagagatttaaatcaattaaagtatgtcacaatgattggatggttggcaaaaaaattaagcaaattttgataaaaaaatttgtaaaattaccgaaattgttaaactaagctcaatataatgtatcaacaacaaccgtaacgaaaagtaaataactcaaagggccaccagaggaaaatatcaagtttttgtattcgataaaaaatggaagccaaaatagtttattatagatcttcctcctccattccctttttataatttacgtaattaaaaaactgaattgtaataatcgtaaaaaaataagcataagcaaaaaaatgatatcaaaaaagcatgtagagggtcttaaagaaaaaccgcattaaagaaacgctaaggagtagctaaatctatatctatgttaagtatagaataagtgaacgttcatactaggggcatgcaatgataatgttatatgttaggaaaaattattctaaggttaagctatatacggactaataataataataatatagcagtgggtatattaatatgtaatattttctgacttgtgcctctcacaaaacgcacagccgccattgtaccaaaaaaacatatcaggaagggcaggaagtctagctatgtcaatatctaaaaacaaaccccttttgactttcatgtgtacaagataaaattgaaaattttaatatttagaattggttacgttagttaaacagaattactgtcttgatactgttgtattgcaacttcatttactgtaagatttgtcataaccaaactctatcttccacgtgatactcactacacgttttgtgaggaacataaaatcagaaacagcaaggggcacgatttcataggcgtatacagaagggcgcaagttaatcgattttttatatttaatacgcaaattatccatgtcaaaacgtgtagcccgatattttctgcgtaggcccatgtatgagttgcacaacccaacagaagagctaatctagcaaccgatgcaaatgcactataagcaaagcagagaaccgtgctctgataatgtggaagctctcactctatttcttggtattaaagggaaagactccaggaaaaacattggtccaaaacattcatccaatatatccgagaaaaatctctatcttagactgagacatattttaaacagttgaaagactgataaattttgtacacacttgaatgaatcaaggaagtgaaagaatcgtctgtaaaaagcatttatttccttagctaagtgctttcgaccaaattctcatcatcggatataatgctacaatcaaaaaggaatcttctaagaaaaggatgtataagtacaaaattttttgttaacttacgtgaatagaagataaaaaataccactacaagttcatgtggatgagcatcccaacaatatccagctgcaccacaatacacaatcatgcatacgtatgcactatagttgtattccatacaacccacacacagaaaaaacaggaaaaaaaacgaccacgcaaacggtacaaacacattaaatctttttgaagttatacatctttacgatcgagagtgaaattttataatgcagggcgcatgcgcacacagacagtatgtagttcgttgctaatcttttaaaatatgtatgtatcagcgctgtcagcgcaaataagtcat

SEQ ID NO: 4484 - DNA, 2484 bp, Diabrotica virgifera
tggcggttatattaaattggtgcagcatactacgttgtaaatcatcttcattttgagagattagtattgcatcgtctgcatagcacattctttttagttcttactttttttaatatttcatccatgatcaggttgaagaataaagaactcagagaattgccacattcaattgggttagttagttcttctcatttttttacttttattgtgttgttctggtagatacattgttattttgtaataagtaattccaggcatggcgttttggtaagattcaaatgagcgatatttgaaacaacacagctttaaaaaagatgaaatggttgtactttgcagaaagatattgaaagcaaaaaatagggcgggcacattatacgaatgtgaaacaataaaaaatctctcgtctctggacgttttcttacatctgttgaaaatgtgcaagactgtgattattggttcagtatttagtttgagattcaatttaatgataatcttttggatttttttcattattagtacgtcgatactaatttaatatcttgagacaacattaagacaggtacagaaatttttattagcgtgtggatatgtagtttttaacatgtatgaataaaatagaaaatagtttatgataaaataaaatattaacaaaagttttataatttgaatcgatatataaaccatttttgatgaatcagtcgaattctctggatgtgctataaagcttaccatcttatattgtgacaaaaaacgaaaattattgctataatatacgagaagaataatatttcgtgtaaaaattaaactgacaaagagagagatttaaatcaattaaagtatgtcacaatgattggatggttggcaaaaaaattaagcaaattttgataaaaaaatttgtaaaattaccgaaattgttaaactaagctcaatataatgtatcaacaacaaccgtaacgaaaagtaaataactcaaagggccaccagaggaaaatatcaagtttttgtattcgataaaaaatggaagccaaaatagtttattatagatcttcctcctccattccctttttataatttacgtaattaaaaaactgaattgtaataatcgtaaaaaaataagcataagcaaaaaaatgatatcaaaaaagcatgtagagggtcttaaagaaaaaccgcattaaagaaacgctaaggagtagctaaatctatatctatgttaagtatagaataagtgaacgttcatactaggggcatgcaatgataatgttatatgttaggaaaaattattctaaggttaagctatatacggactaataataataataatatagcagtgggtatattaatatgtaatattttctgacttgtgcctctcacaaaacgcacagccgccattgtaccaaaaaaacatatcaggaagggcaggaagtctagctatgtcaatatctaaaaacaaaccccttttgactttcatgtgtacaagataaaattgaaaattttaatatttagaattggttacgttagttaaacagaattactgtcttgatactgttgtattgcaacttcatttactgtaagatttgtcataaccaaactctatcttccacgtgatactcactacacgttttgtgaggaacataaaatcagaaacagcaaggggcacgatttcataggcgtatacagaagggcgcaagttaatcgattttttatatttaatacgcaaattatccatgtcaaaacgtgtagcccgatattttctgcgtaggcccatgtatgagttgcacaacccaacagaagagctaatctagcaaccgatgcaaatgcactataagcaaagcagagaaccgtgctctgataatgtggaagctctcactctatttcttggtattaaagggaaagactccaggaaaaacattggtccaaaacattcatccaatatatccgagaaaaatctctatcttagactgagacatattttaaacagttgaaagactgataaattttgtacacacttgaatgaatcaaggaagtgaaagaatcgtctgtaaaaagcatttatttccttagctaagtgctttcgaccaaattctcatcatcggatataatgctacaatcaaaaaggaatcttctaagaaaaggatgtataagtacaaaattttttgttaacttacgtgaatagaagataaaaaataccactacaagttcatgtggatgagcatcccaacaatatccagctgcaccacaatacacaatcatgcatacgtatgcactatagttgtattccatacaacccacacacagaaaaaacaggaaaaaaaacgaccacgcaaacggtacaaacacattaaatctttttgaagttatacatctttacgatcgagagtgaaattttataatgcagggcgcatgcgcacacagacagtatgtagttcgttgctaatcttttaaaatatgtatgtatcagcgctgtcagcgcaaataagtcat

SEQ ID NO: 4485 - DNA, 2532 bp, Diabrotica virgifera
  SmartBlast Evalue=0; Info="Glucose transporter 1, isoform D n=1 Tax=Drosophila melanogaster RepID=A8JNH6_DROME"
ggtgcagttacctactgcaagtgtgttgatacctcattatttagtttattatttggccaccaaaacatttatgtagactactgtttaacacttaatttgtgtttgttgttttaattttgaaattactgtgattttacaagtgtcagttctaagtgagattctgtttgtgtgccatcttaaagtcaaaaaccttaaaaccagtggtgttgtgttgaaggaaatccagttcgtgcaataagaaggccagttgaaagtacctccagttttcaatatcgtacactgaacgaaaaagatttagatccatttcaaaatcaatacctcaaatagattacgcaagctagaatggaagtttttggtctcaagggtttaacgttattcctaacctacgccataatggcggcggtgttggggatgttccagttcgggtacaatacgggagtgatcaacgcaccccagggcaacatcgaaaacttcatgaagactctgtacaaggagaggtacaagcaggacttggctaacgagaaggccgaaatgctgtattcgatagctgtgtcgatatttgccatcggcggcatgttgggaggcttcggaggcggaatggtggcaaacaagtttggaaggaaaggaggcttgctgctcaacaacgtcttgggtataaccggagggtgcctaatgtggtgtacaaaaatagcgaaatcctacgaaatgctatttgtaggaagatttattataggggtcaattgtgggctgaatacttccctcgtaccaatgtatatatcggaaatatcacctttaaatcttcggggaggccttggtaccgttaaccaactggctgttacaatcggtcttctactatcgcaagtcttaggtatagaacaaatattaggaaccaacgaaggatggcctcttctactaggtctcgctgtggtaccagcagtgttacaactggtcctacttcctgtgtgtcctgaaagtccccgttatctcctcataacgaaacaatgggaagaggaagcgcgaaaagcattacgaaggttaagggctagcaacgcagtagaggaagatatcgaagagatgcgagcagaagaaagggctcaacaatcagaggcgtctatcagcatgatggaattgatattctccccaacgctgagggctcccctcattattggtattgtgatgcagctaagtcaacagttttcgggtatcaatgcggtgttctattactctactagtttattcgttagctccggtctaccagaggaaagtgccaagtttgcaaccatcggtattggttgcatcatggtcgttatgacactaatatccataccactcatggacagaatgggaagaagaacgttgcacctgtacggtttaggaggaatgttcatcttctctatatttattacaatttcatttttgataaaggagatgatcgattggatgtcgtacctctcagtagtatcaaccctcttcttcgtcaaatttttcgcggttgggcccggaagtataccctggatgatcactgccgaactgttctcgcaagggcctagacctgccgccatgtcaattgccgtgctagtcaactggacttcaaatttcgtggtgggtctcggatttccttcattgaggaacgccctagataactataccttcctgccgttcagcgtcttcctagcaatcttctggatattcacgtataagaaagttccagagacgaaaaacaaaacatttgaagaaatagcagccttatttagggaaggaaatggaagtgcaaccgatggtgttattatgaaagaaacttacgaaaaaaacagagaaattataaaatattcagaagaaaaccaccctaatacagattaagacaatattattttgtacacttttgtattatcacatatttacataaaaaggaaaacttattgccatattttttttgttttctacaatcataataatttaatcctgaaatttgattactgtatatatataatactgtatcgtgattatttgctaaagtaaaacgaataataataattttatatttagattgcaattttgacattaaaatttttaaatttgaattccaaacaacttaaatggaatggaatggtgtaaatatccacagcatcagacacaccgatgatacggtgttgattgcggattccgacttaagtctataaggactcatcgacaggactaactcggtctatgaaaaacttggtatgaaaataaacattaagaaaccaaagtgatgcgaaaaacgggttagaactggtcaacaagttcaagtacctgggatgttggatcccagttacttgaaaacaaatttaaaaacacgaaatttgactacgtttagcaaaatctgcgtctagtcgactcttctctatgcagacgaaacgtgtattatagtccagggcgcatctgttttgagatggacgttgagaggtgactcaaatttttttgcagaggttgcttgagagtagctcagatagtggtatttgagttgtcctcccgctcaaagtggtccggaac

SEQ ID NO: 4486 - DNA, 2457 bp, Diabrotica virgifera
  SmartBlast Evalue=0; Info="Glucose transporter 1, isoform D n=1 Tax=Drosophila melanogaster RepID=A8JNH6_DROME"
ggtgcagttacctactgcaagtgtgttgatacctcattatttagtttattatttggccaccaaaacatttatgtagactactgtttaacacttaatttgtgtttgttgttttaattttgaaattactgtgattttacaagtgtcagttctaagtgagattctgtttgtgtgccatcttaaagtcaaaaaccttaaaaccagtggtgttgtgttgaagatttagatccatttcaaaatcaatacctcaaatagattacgcaagctagaatggaagtttttggtctcaagggtttaacgttattcctaacctacgccataatggcggcggtgttggggatgttccagttcgggtacaatacgggagtgatcaacgcaccccagggcaacatcgaaaacttcatgaagactctgtacaaggagaggtacaagcaggacttggctaacgagaaggccgaaatgctgtattcgatagctgtgtcgatatttgccatcggcggcatgttgggaggcttcggaggcggaatggtggcaaacaagtttggaaggaaaggaggcttgctgctcaacaacgtcttgggtataaccggagggtgcctaatgtggtgtacaaaaatagcgaaatcctacgaaatgctatttgtaggaagatttattataggggtcaattgtgggctgaatacttccctcgtaccaatgtatatatcggaaatatcacctttaaatcttcggggaggccttggtaccgttaaccaactggctgttacaatcggtcttctactatcgcaagtcttaggtatagaacaaatattaggaaccaacgaaggatggcctcttctactaggtctcgctgtggtaccagcagtgttacaactggtcctacttcctgtgtgtcctgaaagtccccgttatctcctcataacgaaacaatgggaagaggaagcgcgaaaagcattacgaaggttaagggctagcaacgcagtagaggaagatatcgaagagatgcgagcagaagaaagggctcaacaatcagaggcgtctatcagcatgatggaattgatattctccccaacgctgagggctcccctcattattggtattgtgatgcagctaagtcaacagttttcgggtatcaatgcggtgttctattactctactagtttattcgttagctccggtctaccagaggaaagtgccaagtttgcaaccatcggtattggttgcatcatggtcgttatgacactaatatccataccactcatggacagaatgggaagaagaacgttgcacctgtacggtttaggaggaatgttcatcttctctatatttattacaatttcatttttgataaaggagatgatcgattggatgtcgtacctctcagtagtatcaaccctcttcttcgtcaaatttttcgcggttgggcccggaagtataccctggatgatcactgccgaactgttctcgcaagggcctagacctgccgccatgtcaattgccgtgctagtcaactggacttcaaatttcgtggtgggtctcggatttccttcattgaggaacgccctagataactataccttcctgccgttcagcgtcttcctagcaatcttctggatattcacgtataagaaagttccagagacgaaaaacaaaacatttgaagaaatagcagccttatttagggaaggaaatggaagtgcaaccgatggtgttattatgaaagaaacttacgaaaaaaacagagaaattataaaatattcagaagaaaaccaccctaatacagattaagacaatattattttgtacacttttgtattatcacatatttacataaaaaggaaaacttattgccatattttttttgttttctacaatcataataatttaatcctgaaatttgattactgtatatatataatactgtatcgtgattatttgctaaagtaaaacgaataataataattttatatttagattgcaattttgacattaaaatttttaaatttgaattccaaacaacttaaatggaatggaatggtgtaaatatccacagcatcagacacaccgatgatacggtgttgattgcggattccgacttaagtctataaggactcatcgacaggactaactcggtctatgaaaaacttggtatgaaaataaacattaagaaaccaaagtgatgcgaaaaacgggttagaactggtcaacaagttcaagtacctgggatgttggatcccagttacttgaaaacaaatttaaaaacacgaaatttgactacgtttagcaaaatctgcgtctagtcgactcttctctatgcagacgaaacgtgtattatagtccagggcgcatctgttttgagatggacgttgagaggtgactcaaatttttttgcagaggttgcttgagagtagctcagatagtggtatttgagttgtcctcccgctcaaagtggtccggaac

SEQ ID NO: 4487 - DNA, 2807 bp, Diabrotica virgifera
  SmartBlast Evalue=1E-145; Info=CG4164 n=4 Tax=melanogaster subgroup RepID=Q9VPQ2_DROME
aaattagatcatatggcaaatagtacttcaatcgaaagctcttgtgttactcactatactcctaccctgttactaataaaccaagtattaaagttataccgagaataaatcaggtatgggcaaaatcactaccaataaacatggaataacttagatatatgttatacgtggtataagaatttagtccaagtttataccgacccacacccttgtttaagtctggtttaacctattttatgactgtcaatgtcatcagaggcaaaaatatattatcttttgatttgttttgtgagtaattatgtaataaaaaaatgtgtttaaggggtgttgcggctgtcgaagaagttgataatttaattaacatgatagaaaatacacgaaaaaggaaacttttcaaagatagaataaatcccttttcacaatacaccgattaagaattcagaattaaatatcggttttctaaagatgatgtaaggtttttagaaaacttaataggtgattcacttatttgcatttgatattgcatgaaaaggtgagtcaaacagtccatataatgtacaaaaaatttcaagatgatgattcgtcaattagtttaaattttattcaatttgtttacccctaggaaattattttttgcaatgttattgttcagaaaataataatgatccagcaattctgtggaaaccatattaaaagaagaatactggtattttaaacgtatttaaaaaatcaataaaaactcatttttatcattccgaaaactttttgcctaggttaatttggtttgttagttacagagaaaaattaaaattgacatatttgacacaatatatcgttgttctatgtatttgtgcagatgattgcgacgttgccaaactattaattcggaataaagtgggaatacttatatctaacttataccaagtttattagtatcgaattattttcgtactatatctaccttatatttaggataactattctagatataaatacggaataaccttagaatacgagtgttttattagtaacagtgctagacttttgtgcgctgcttcgaaatgtcgactgtctgtcatttgaatgatctcaccactaaaacattgtaaaaacaatgtgctgatgtccacaatttattaatttacgttatagtgttcagaaaattgtatgagatacaacggactttagttgaacacattatatcaaacataaactaatatatttaagtgtaagcttgtccttgtggctgaaaatatttggctgttaattccaaagcactaatagcaatgaattcactaaacaggatcaatttaacagtatatgtgattcaccaatttcaagtttatcttgatttgactgttgattacttcattaccatattctgtctcttcccatatacatgtatgtaattgatattgacttaacacacgtgggtttttagataaaatattgtccatagataccactggtatatttcaaaaaattccttttgtatatacacaattctcttcacttaaataaataggaatcaaaaataaattaagtaaaatggaaaccgaatttaaatactttatacagaggtcccaaaaatgtagagggatatgtatcctaatagccgcggagaccattgtacactttgttgtttgagctttggttgaggatcttcttgagggcttctttatcctcttcagtcagttcttgtttaggaaattccacatcaaaggtgataaaaagtataccatgtagattattgttgtcataattgggcataccttcgcccttcttacgaatgcgtgcacctggccatgtgattttatctctaacaatactgactttgtgtccatccaaatgaggtatttccatcgtgaaaccagtgagagcatcctgtaaactaatggttatatttgtatacaagtcatctccccttctttcaaaaactttgtgaggctgtgtcttaatcttcaaaattaaatccccaggttccccatccaaatgtggctctccttccgctataaacttagtttcctgtccatctatcataccttgctcaacttccatctctaataatctctcctcattgactaacttaacatttggacactcatcacatacagtttgctgcatcatttggaatcgtcctggacctaaacttttggtgatcatttcttgtctgcaattacacttccgtgtacccctcgagggttttaaaactggtttgttcctggtgatttcaatgaaagtaccagtgtagagatcttctagagttacgtatacatccataactaagtcagctcctctgggagtttcatgtttttgttcgccgcctccaaaatggaagccaaagtctccaaagaagcttgcaaaaggatccatacctccatccatcataccatccttctgtaagcaatcttcaccacatctatcatacttcttccttttgtcctcgtccgataggacttcgtaagctgcccctaaatcttggaatttctgcgaagaattgggatcgtcttggtttttatcgggatgtaattctttggctaatttcctataagcttttttaatgtcatgtaaactagctgacttgtctacacctaagatttgatagaagtctcttccagccgaaactacggcgatggaaactacacttaacagcaagaaagtctggaggaattcaagattcatgatgaatataactatcactatcctatttctttgagaaatttgttacttttagtacatattattatcacaggttcacttaaaaaacagccctaaacactcatcacatcttccaaaacgacttgtca

SEQ ID NO: 4488 - DNA, 2166 bp, Diabrotica virgifera
  SmartBlast Evalue=1E-145; Info=CG4164 n=4 Tax=melanogaster subgroup RepID=Q9VPQ2_DROME
agtattttcactaatatattacaaaaagtattcgcaaatttacttgcaaaacaaatttaatataaattgaaaataaaatatttacaattcatcaaatcatattcttttttgaaaagttgactaaattcacagacagctgaggttcaaacatacttaaaatataccagaagtttcatttctatcttataaatcgaaaaatttacatgtgggcgccctgaaaactgtattctgaagtataaaacgaaagttaataaattttgagtgctggcacaatgtttttacgatgttttagtgatgagttatgcaaacgggcatcatttcgaacaaatattttaaattagatcatatggcaaatagtacttcaatcgaaagctcttgtgttactcactatactcctagacttttgtgagctgcttcgaaatgtcgactgtctgtcatttgaatgatctcaccactaaaacattgtaaaaacaatgtgctgatgtccacaatttattaatttacgttatagtgttcagaaaattgtatgagatacaacggactttagttgaacacattatatcaaacataaactaatatatttaagtgtaagcttgtccttgtggctgaaaatatttggctgttaattccaaagcactaatagcaatgaattcactaaacaggatcaatttaacagtatatgtgattcaccaatttcaagtttatcttgatttgactgttgattacttcattaccatattctgtctcttcccatatacatgtatgtaattgatattgacttaacacacgtgggtttttagataaaatattgtccatagataccactggtatatttcaaaaaattccttttgtatatacacaattctcttcacttaaataaataggaatcaaaaataaattaagtaaaatggaaaccgaatttaaatactttatacagaggtcccaaaaatgtagagggatatgtatcctaatagccgcggagaccattgtacactttgttgtttgagctttggttgaggatcttcttgagggcttctttatcctcttcagtcagttcttgtttaggaaattccacatcaaaggtgataaaaagtataccatgtagattattgttgtcataattgggcataccttcgcccttcttacgaatgcgtgcacctggccatgtgattttatctctaacaatactgactttgtgtccatccaaatgaggtatttccatcgtgaaaccagtgagagcatcctgtaaactaatggttatatttgtatacaagtcatctccccttctttcaaaaactttgtgaggctgtgtcttaatcttcaaaattaaatccccaggttccccatccaaatgtggctctccttccgctataaacttagtttcctgtccatctatcataccttgctcaacttccatctctaataatctctcctcattgactaacttaacatttggacactcatcacatacagtttgctgcatcatttggaatcgtcctggacctaaacttttggtgatcatttcttgtctgcaattacacttccgtgtacccctcgagggttttaaaactggtttgttcctggtgatttcaatgaaagtaccagtgtagagatcttctagagttacgtatacatccataactaagtcagctcctctgggagtttcatgtttttgttcgccgcctccaaaatggaagccaaagtctccaaagaagcttgcaaaaggatccatacctccatccatcataccatccttctgtaagcaatcttcaccacatctatcatacttcttccttttgtcctcgtccgataggacttcgtaagctgcccctaaatcttggaatttctgcgaagaattgggatcgtcttggtttttatcgggatgtaattctttggctaatttcctataagcttttttaatgtcatgtaaactagctgacttgtctacacctaagatttgatagaagtctcttccagccgaaactacggcgatggaaactacacttaacagcaagaaagtctggaggaattcaagattcatgatgaatataactatcactatcctatttctttgagaaatttgttacttttagtacatattattatcacaggttcacttaaaaaacagccctaaacactcatcacatcttccaaaacgacttgtca

SEQ ID NO: 4489 - DNA, 2858 bp, Diabrotica virgifera
  SmartBlast Evalue=0; Info=Relish n=1 Tax=Tribolium castaneum RepID=D6X3U8_TRICA
ataaatcttttattaaaaataacactagataataaaggtacgttgatatctagaaaaataaaattaatttaaaccatttatgtacatcaataatgagttatgtcttatttttaagttcaaaaaccattttgtccataacttcaacagcttcgatctcgtccaagttttccaaaaagttacgtaacgcaaatatacaggttggatttgtccaatcgtggttggcctcgattgcatgagtcaaaattgctttcgcttcggatttgatcataccactatcaactaaatgttccatttccaataattgagccagatttttccaattatcgtgtatgtccaaaatacttgaaactgtgtccaaacactgcggtgttaaactgtggataccctcgtaaagttcctccagttcttctggtgaaaactctcgcttttctgttttgacttcaacgtcctgaaattcgacgtccatttcatcatcggtctcttctggttcttctttgatatccaacacaatattatttgatttcatatagttttcaataatacgtcgaatttcttcattttccgttttcataataccggcaacgagtggtgaaatattagtaaaatctttaatagtggggtctgtttgttcaagagaaagtaaatatcgaattatatccgtatgttgcttctcaattgctattcttaatggtacaaaaccattcttcggctgttttttatttacatctgcatttttgaagcacaaaagcttgacataagctaatttatttgcctcgacagccatcatcaatgcggtatttccatctaggtttaccatgtcaataaagcctttcacctgatccacggaagtatatctcgagggccttaaaagagtttcgaaaatctcaattggaacattggattttatcgctatgtgtaagacagtgtttaaattactatctgtaacagacagtttagaattgcataatactaatgccttagtcaaatccttattatgacacataactgcgatatgtaaggctgttaagttttggtcgttggttttatctaataaatgaaacactctatagactgctattactttcagtaacagcatagccgaatcattatctcgaagagctgcacaaacgtgaagcgcattggtacaattatctgcattaaaatacttgtttaatatcgttatggcatttgctgctgtatgtgtagtccttataaaacttctcaattcacttactaccattatcgccattctcttgtcttcgttcgaaacttccattttgatcggttcttgaatttgtatgtcacgtcgttgttttcttaccggcatagagttagcgttaactccatcagtagccaaattctctagtagtgtaagatattcatcagcgtgagcgtcatgtagttgttggaactcatcagagttcatatcagtcagagctctttttatctcgtcacttaaaccgcttggaatgttattaaaggacatgtgagagtcctgtccaatttgaagcgtattgattacagctggtaattcttcgcttcctacattggaactatcgtagctggaagacgagtaataatcgtatcgggcacgcttttgcccaggtttggccatatttttatttggtacgtatctaaattctcttgcttctgagcgagcttggtccgacggtcgtaccaattcaacgaagacattgactggagaagtgatgttttcatctctatatttgggtgtcttaaatacgattgcgtattggtgatggacatccaaatcattaaattggccccaaccttcccaaacaacgttttcgtcatcgtcaagttcatagaatcggattttaatatttttttttcgtgactctttcaaccaatatgaagacttctttatttcctttcgctgggctaacgacatgatctagcctaacaattttaagatcacccgttaaggcgctcttcaaattgttgatactatgtgaaaaaataggctcacaaagaggaaataatataccattctttttaatataagcgtcaaaccttagacaaactatgttcagattaattgatttactttcgctctcagccaaccccttaatctctactacttccttctgggtcaatcctcttctgttttccgttctggcaacatgttcctcttgcagttgaaccttttttcttaccaattcagttaccagatttctctttgcggtgtgaataattcccattccttgaaatacggctctaaagccatcttcatgcccaacctccacatcatgaggatcgtcgaactcttcacgccctcttttcatcatcaatctgtgagcatgaggataaaaacctttagggtttgcatttgcttgatatattgaacatcttataacaactttgtcgtgattgccacaatttcttagttctactgtgggatatgttggtttcctcgatttgtcggaattaataccagtaagacttccatgggttcccgccatttctgacttatagcgaaatctaaaccgatctgttggttgttctacaaagtgtagtgttgcagagggtgttgttggaccttccatttttaccgtgagtaaattaggatctacaatgacagtaggctttgggtagataataggttgtacaggagcatactcataattgtcatattcaaatgtattagaactaggtgatgccactaaataagttgaatgtggagaatcttcagaacttgaaggtggtgttaacatatttggataagacatattactcttttcaagggaagtataatcactaaaataattttctgtcaacataattaaagtataaaaatgcactaaataacactgataattatatcttaactgaacagc

SEQ ID NO: 4490 - DNA, 2067 bp, Diabrotica virgifera
  SmartBlast Evalue=1E-123; Info=Relish n=1 Tax=Tribolium castaneum RepID=D6X3U8_TRICA
ataaatcttttattaaaaataacactagataataaaggtacgttgatatctagaaaaataaaattaatttaaaccatttatgtacatcaataatgagttatgtcttatttttaagttcaaaaaccattttgtccataacttcaacagcttcgatctcgtccaagttttccaaaaagttacgtaacgcaaatatacaggttggatttgtccaatcgtggttggcctcgattgcatgagtcaaaattgctttcgcttcggatttgatcataccactatcaactaaatgttccatttccaataattgagccagatttttccaattatcgtgtatgtccaaaatacttgaaactgtgtccaaacactgcggtgttaaactgtggataccctcgtaaagttcctccagttcttctggtgaaaactctcgcttttctgttttgacttcaacgtcctgaaattcgacgtccatttcatcatcggtctcttctggttcttctttgatatccaacacaatattatttgatttcatatagttttcaataatacgtcgaatttcttcattttccgttttcataataccggcaacgagtggtgaaatattagtaaaatctttaatagtggggtctgtttgttcaagagaaagtaaatatcgaattatatccgtatgttgcttctcaattgctattcttaatggtacaaaaccattcttcggctgttttttatttacatctgcatttttgaagcacaaaagcttgacataagctaatttatttgcctcgacagccatcatcaatgcggtatttccatctaggtttaccatgtcaataaagcctttcacctgatccacggaagtatatctcgagggccttaaaagagtttcgaaaatctcaattggaacattggattttatcgctatgtgtaagacagtgtttaaattactatctgtaacagacagtttagaattgcataatactaatgccttagtcaaatccttattatgacacataactgcgatatgtaaggctgttaagttttggtcgttggttttatctaataaatgaaacactctatagactgctattactttcagtaacagcatagccgaatcattatctcgaagagctgcacaaacgtgaagcgcattggtacaattatctgcattaaaatacttgtttaatatcgttatggcatttgctgctgtatgtgtagtccttataaaacttctcaattcacttactaccattatcgccattctcttgtcttcgttcgaaacttccattttgatcggttcttgaatttgtatgtcacgtcgttgttttcttaccggcatagagttagcgttaactccatcagtagccaaattctctagtagtgtaagatattcatcagcgtgagcgtcatgtagttgttggaactcatcagagttcatatcagtcagagctctttttatctcgtcacttaaaccgcttggaatgttattaaaggacatgtgagagtcctgtccaatttgaagcgtattgattacagctggtaattcttcgcttcctacattggaactatcgtagctggaagacgagtaataatcgtatcgggcacgcttttgcccaggtttggccatatttttatttggtacgtatctaaattctcttgcttctgagcgagcttggtccgacggtcgtaccaattcaacgaagacattgactggagaagtgatgttttcatctctatatttgggtgtcttaaatacgattgcgtattggtgatggacatccaaatcattaaattggccccaaccttcccaaacaacgttttcgtcatcgtcaagttcatagaatcggattttaatatttttttttcgtgactctttcaaccaatatgaagacttctttatttcctttcgctgggctaacgacatgatctagcctaacaattttaagatcacccgttaaggcgctctcttcgtccccacagttgggacaccacaggcccatggtcatttttaaacttttttatgtctcagtaacagtaaatatcaaagagaaacacatccaatttcacacggaaacagag

SEQ ID NO: 4491 - DNA, 2487 bp, Diabrotica virgifera
  SmartBlast Evalue=0; Info=Oxysterol binding protein n=1 Tax= Culex quinquefasciatus RepID=B0WDS0_CULQU
catttccatagagtatgtatatactaaaaatatttgatgtggaactgtagacatgttaaaaatttcaatagtaatgtagcttttactaaaatatatcaggacactgcgaccagtcttgcttagctttactttcccagtacgttcctttataaacatgatgaataacatctgagtcatcttctttcatttgttcaaaccacaatggtttatatgggggatatggacgaccttcggcagcagctttttcagcttctgcctctcgctgtcttctggaagctctctgtttttcttccaaacgaatcttctctttattggattcctcccacaagccttcttccattaacctctgatcaggcctcaatctggagtcagttggagctacaccttcttccggttcattaagctgggcagccaacaaggtaaaattgtaaaacttttcagaatccggcggtggtggtcttcgcttccaagcaacaactgatggaccagtttcatagacagcatttccattggtacctgtattaccagtaactggtgctatctcgacttgatcgtcccatgtaccattaatgatccatttgacattgccttctgcatccattactacacctttgactcgtctttgagaatctcgagtaaaataggaataaggaatatattttagtacacattttataccctccgtaggaccttttcccacaatttccatatcaccatgttgatctacccacaattttcctacaataatattatgtatagttgtagttacttttctccaagaatatttgtttccatttttgaattctacttgtgcataccctaatggaataatttgcaaatatttccctctaaatttagatgtcatggtaaattcctgaaaacacacccaagatctaccttcgcaatattgtgctaccatcggaggatgatgtgatacttgttcattaattacacgccaacccaaatcatcagtcctatccaattcatatgtttcacctaataatggattaaatggtttaccagttctaatgcttgtggacgcataggaagaaattgtaaaagcagctatatatgctaattgttcacaaggatcggtacattttgcagctacatcaagaacatcagcatattcaaggtcttctgtgatgcgctgcatcatagaaagtggttcattaaaattaacaggcattggtatcttggaaagatcctttcctatgcaatttttcataatgctccacaaattaagggggtaattaggtttgtccggcacccgagtacgccgctgacgtttcgcaccattggattttggagatgcattagcagatgaaccactaggtgtttctggtcgtcttacgttgttgtgtttacccgttactacgaccacttgtttcgtctgggtttcctccgtttcactagagctatccgaactatttcttctatgtcctgtagcagttcgaatattcaacgtaaaatgtttatctccatctgtaacctgtcctgaagaatgtccctcctcagctaacgcatcataaaactcattatcatcctcatcttcattatcgtttgcaccaattgctgaaagatgcgaatgtgcattagctgcccgttctaatttagaatgttgttgagcaagagtttcgaccatctcttgcaagcgacctctttgttccttttcgtgttgcagggctcttactagcttatgaccatggttttgagcgaactttaaataatcattacatgagttaaccatcgcattagaagcaatcctgaacaacgtagctctttcacaaacttctttatttttcccttgtaacaattcatggtcagaattggtctccatctcacctaaagactttgctaaatgcttccaatgcttagctaatacatcaccacacgtttgtaaatcattcaattgtgattctaattttctaactaccccagaccagtcttcaaaatcaccagattcatcgatttcctcgtcttcctcagattccatacttctaatagctttggcttttgctaattccaatgcagtaacccattgttgtctttctacctctgaagcagcctttatgtgaaatgtctgagttcctccgtttgaaataacaaaagtgcaagcatcgactgtgtatatcaaggcaccatgaagggatatactaccgcgacaagtgtgagccatctcagcttggttcccctgtcgaaacctccttcgtctccttattgtcaatgtgggaacaccgccattgttttcggccctgtaataggacaaatgtccactttgtagtacaaaccatcttctctgatatcctttaagatagtttgtccatttaaatagccatcccttcatagcaggctcattctgggacgaatttgacttgatattcatgctgtcactcattttcatggcaattatgttgactacttatttgttgttaattgtaaacgaaacaccagtgaagttacacgtcgtccatatttacaacgtga

SEQ ID NO: 4492 - DNA, 2424 bp, Diabrotica virgifera
  SmartBlast Evalue=0; Info=Oxysterol binding protein n=1 Tax= Culex quinquefasciatus RepID=B0WDS0_CULQU
catttccatagagtatgtatatactaaaaatatttgatgtggaactgtagacatgttaaaaatttcaatagtaatgtagcttttactaaaatatatcaggacactgcgaccagtcttgcttagctttactttcccagtacgttcctttataaacatgatgaataacatctgagtcatcttctttcatttgttcaaaccacaatggtttatatgggggatatggacgaccttcggcagcagctttttcagcttctgcctctcgctgtcttctggaagctctctgtttttcttccaaacgaatcttctctttattggattcctcccacaagccttcttccattaacctctgatcaggcctcaatctggagtcagttggagctacaccttcttccggttcattaagctgggcagccaacaaggtaaaattgtaaaacttttcagaatccggcggtggtggtcttcgcttccaagcaacaactgatggaccagtttcatagacagcatttccattggtacctgtattaccagtaactggtgctatctcgacttgatcgtcccatgtaccattaatgatccatttgacattgccttctgcatccattactacacctttgactcgtctttgagaatctcgagtaaaataggaataaggaatatattttagtacacattttataccctccgtaggaccttttcccacaatttccatatcaccatgttgatctacccacaattttcctacaataatattatgtatagttgtagttacttttctccaagaatatttgtttccatttttgaattctacttgtgcataccctaatggaataatttgcaaatatttccctctaaatttagatgtcatggtaaattcctgaaaacacacccaagatctaccttcgcaatattgtgctaccatcggaggatgatgtgatacttgttcattaattacacgccaacccaaatcatcagtcctatccaattcatatgtttcacctaataatggattaaatggtttaccagttctaatgcttgtggacgcataggaagaaattgtaaaagcagctatatatgctaattgttcacaaggatcggtacattttgcagctacatcaagaacatcagcatattcaaggtcttctgtgatgcgctgcatcatagaaagtggttcattaaaattaacaggcattggtatcttggaaagatcctttcctatgcaatttttcataatgctccacaaattaagggggtaattaggtttgtccggcacccgagtacgccgctgacgtttcgcaccattggattttggagatgcattagcagatgaaccactaggtgtttctggtcgtcttacgttgttgtgtttacccgttactacgaccacttgtttcgtctgggtttcctccgtttcactagagctatccgaactatttcttctatgtcctgtagcagttcgaatattcaacgtaaaatgtttatctccatctgtaacctgtcctgaagaatgtccctcctcagctaacgcatcataaaactcattatcatcctcatcttcattatcgtttgcaccaattgctgaaagatgcgaatgtgcattagctgcccgttctaatttagaatgttgttgagcaagagtttcgaccatctcttgcaagcgacctctttgttccttttcgtgttgcagggctcttactagcttatgaccatggttttgagcgaactttaaataatcattacatgagttaaccatcgcattagaagcaatcctgaacaacgtagctctttcacaaacttctttatttttcccttgtaacaattcatggtcagaattggtctccatctcacctaaagactttgctaaatgcttccaatgcttagctaatacatcaccacacgtttgtaaatcattcaattgtgattctaattttctaactaccccagaccagtcttcaaaatcaccagattcatcgatttcctcgtcttcctcagattccatacttctaatagctttggcttttgctaattccaatgcagtaacccattgttgtctttctacctctgaagcagcctttatgtgaaatgtctgagttcctccgtttgaaataacaaaagtgcaagcatcgactgtgtatatcaaggcaccatgaagggatatactaccgcgacaagtgtgagccatctcagcttggttcctgtaataggacaaatgtccactttgtagtacaaaccatcttctctgatatcctttaagatagtttgtccatttaaatagccatcccttcatagcaggctcattctgggacgaatttgacttgatattcatgctgtcactcattttcatggcaattatgttgactacttatttgttgttaattgtaaacgaaacaccagtgaagttacacgtcgtccatatttacaacgtga

SEQ ID NO: 4493 - DNA, 2449 bp, Diabrotica virgifera
  SmartBlast Evalue=0; Info=Trehalose 6-phosphate synthase n=1 Tax=Harmonia axyridis RepID=B8Y997_HARAX
gctaaacggtgagatattgtttgtcgtgaaattatcattgaacttcctaagctatttaaatatatagtgcgctaaaccgcctgaattgtatttttcacaaaacgttaaaaggaccgtcaagtcatgcggatgatacttagtaaagatgtggttgcctcgtcaggatgtatgatagtggtgtccaatcggttgccgttcgttctacagcgagataaggatggagcactttttaggaaagccagtgccggtggtctggttacagctgtagctcctgtagtaataaatggagggggattatgggtaggatggccaggtatacatttagatgatcctaatgaacccattccagagtctgaccctaatgatattactcccacagcaggattaaaatcagaaaaggtagttgctgtgcatgttgatcccacaattttcgacgcctactataatggatgctgtaatgctactttttggcctctattccactccatgccagacagagcgtcgtttaaagctgaatattggagagcatatttgaaagccaatgaagcatttgcggaatgtacattaaaagcattaaaaaccttgcctaaaacttcgactgaaataccattgatctgggtgcacgattaccatctcatgttggcagctaactggataagacaggcagctgatgaacaagaaataaaagtgaaattgggattcttcttacacattcccttccctccttgggatatatacagactgttcccatgggcagacgaaatacttcaaggtatgctcggctgtgatctggtgggattccatataactgactattgtataaattttgttgactgttgccaaagaagcttgggatgtcgagttgacaggaagaacctcttggttgaacatggtggcagaactgttcgagtaaggcctctgcctatcggcattcctttcgagaggttcgttgaattagctgaaaaagcaccaaaagtgatctcaactaaccagaaaattatactcggagtagatagattagattacacgaagggacttgtacatagactgaaagcttttgaaaagctgttggaaaatcatcccgaacataaagaaaaggtatcactacttcaaatttcggtgccctcgcggacagacgtaaaagaataccaagatcttaaagaagaaatggaccaacttgtaggaagaataaacggaaggtttacgacacctaactggtcacccataagatatatttacggctgtgtaagccaagacgaactagcagctttctacagggacgcagctgtaggattagtaacacctctaagggacggaatgaatctcgtagccaaagaattcgtagcctgtcaaataaacataccacctggagtactcatcgtatctccgtttgctggtgccggtgagacgatgcacgaagctctgatctcgaatccgtatgaaatagacgaagcttcagaagtcattcacagagctctgaccatgccagaggatgaaagaatattgcgtatgaactatttgcgacgaagggagaagctgaatgatgttaattattggacaaagtcgttcctctcggcgatgggctcgcttttgacacaagaggaccatgacgatattggttctacaaatatgccggccgttactttagatgattttgatgaatatttatcaaaatacattggaaacacgcataaactggcattactcctcgattacgatggtacacttgccccaatagcaccacatcctgatctcgctattattcctgccgaaacgaaaaatgttttgcaaagattatcaaatatgtcggactgctacatcgccattgtcagtggaagaaatgttaacaacgtaagagatatggttggaatcgatggtattacttacgccggaaaccacggtttagagattttacatccagatggaacgaagttcgtacacccgatgccaaccgagtttcacgataaagtaggggatctaatgcgacagttacaagaaaaggtgtgcagagaaggggcttgggtcgaaaataaaggagcattactgactttccatttcagagaaactccagtgcaaataagagcatcattggaaaaagaagctaaaatattaattgaatctgctggattcatcgctgatcacgtacattgcgccattgaggcaaggcccctgtacaatggaacaaaggtagagcctcaatatacatactcaggaccgcttttggagtggattggagtgaaagaatcagaatcatatacgtcggtgatgatcaaactgatgaagatgctatgcaggctctgaaaggtatggcagctacatttagagtaacatcctcccaaataacgaaaacatcagctgaacgtcgtcttccatccacagacgcagtcttaacgatgttaaaatgggtggaaagacatctaggaagaaggaagccaagtttggacggggg

SEQ ID NO: 4494 - DNA, 2419 bp, Diabrotica virgifera
  SmartBlast Evalue=0; Info=Trehalose 6-phosphate synthase n=1 Tax=Harmonia axyridis RepID=B8Y997_HARAX
atgtgaacaaaaggtttttttgagttaatagtgttattttttaagttttttaaaattatgacacttactagaaggattagacaagttagttttaggtttggttttattaatgaggatgtggttgcctcgtcaggatgtatgatagtggtgtccaatcggttgccgttcgttctacagcgagataaggatggagcactttttaggaaagccagtgccggtggtctggttacagctgtagctcctgtagtaataaatggagggggattatgggtaggatggccaggtatacatttagatgatcctaatgaacccattccagagtctgaccctaatgatattactcccacagcaggattaaaatcagaaaaggtagttgctgtgcatgttgatcccacaattttcgacgcctactataatggatgctgtaatgctactttttggcctctattccactccatgccagacagagcgtcgtttaaagctgaatattggagagcatatttgaaagccaatgaagcatttgcggaatgtacattaaaagcattaaaaaccttgcctaaaacttcgactgaaataccattgatctgggtgcacgattaccatctcatgttggcagctaactggataagacaggcagctgatgaacaagaaataaaagtgaaattgggattcttcttacacattcccttccctccttgggatatatacagactgttcccatgggcagacgaaatacttcaaggtatgctcggctgtgatctggtgggattccatataactgactattgtataaattttgttgactgttgccaaagaagcttgggatgtcgagttgacaggaagaacctcttggttgaacatggtggcagaactgttcgagtaaggcctctgcctatcggcattcctttcgagaggttcgttgaattagctgaaaaagcaccaaaagtgatctcaactaaccagaaaattatactcggagtagatagattagattacacgaagggacttgtacatagactgaaagcttttgaaaagctgttggaaaatcatcccgaacataaagaaaaggtatcactacttcaaatttcggtgccctcgcggacagacgtaaaagaataccaagatcttaaagaagaaatggaccaacttgtaggaagaataaacggaaggtttacgacacctaactggtcacccataagatatatttacggctgtgtaagccaagacgaactagcagctttctacagggacgcagctgtaggattagtaacacctctaagggacggaatgaatctcgtagccaaagaattcgtagcctgtcaaataaacataccacctggagtactcatcgtatctccgtttgctggtgccggtgagacgatgcacgaagctctgatctcgaatccgtatgaaatagacgaagcttcagaagtcattcacagagctctgaccatgccagaggatgaaagaatattgcgtatgaactatttgcgacgaagggagaagctgaatgatgttaattattggacaaagtcgttcctctcggcgatgggctcgcttttgacacaagaggaccatgacgatattggttctacaaatatgccggccgttactttagatgattttgatgaatatttatcaaaatacattggaaacacgcataaactggcattactcctcgattacgatggtacacttgccccaatagcaccacatcctgatctcgctattattcctgccgaaacgaaaaatgttttgcaaagattatcaaatatgtcggactgctacatcgccattgtcagtggaagaaatgttaacaacgtaagagatatggttggaatcgatggtattacttacgccggaaaccacggtttagagattttacatccagatggaacgaagttcgtacacccgatgccaaccgagtttcacgataaagtaggggatctaatgcgacagttacaagaaaaggtgtgcagagaaggggcttgggtcgaaaataaaggagcattactgactttccatttcagagaaactccagtgcaaataagagcatcattggaaaaagaagctaaaatattaattgaatctgctggattcatcgctgatcacgtacattgcgccattgaggcaaggcccctgtacaatggaacaaaggtagagcctcaatatacatactcaggaccgcttttggagtggattggagtgaaagaatcagaatcatatacgtcggtgatgatcaaactgatgaagatgctatgcaggctctgaaaggtatggcagctacatttagagtaacatcctcccaaataacgaaaacatcagctgaacgtcgtcttccatccacagacgcagtcttaacgatgttaaaatgggtggaaagacatctaggaagaaggaagccaagtttggacggggg

SEQ ID NO: 4495 - DNA, 4253 bp, Diabrotica virgifera
actgataataataaaatatatttgtccagaaatctacaataaaaaagtgaatgttaatgtgatcaatgactgtaatgtacttataaaatataatttacaattttagtagcagtattatgtgaaccatcggaatttagtaccaaacaatactaattcaaaaataaaccaaacgtggtttagtgttctttagtactaaatccagagttttttgtaacgaatacagataaacagaagctgctttaataacatagtagacgaatcagaaaaaactaaatatgatatagtagttatacttgtcaaaatcatcactaaataactttggaagaaagttataacaactttaaaattaacaccacacaaaaattatcgaatttcttgcatttatgtcgcagaacgttgctaaatgtcaaagttacatttgagatatttgtagtatagttttgctttgaagattcattataggtttttaattatgattaatgaaatgatggaactatcgaacaattagaatctgtatatctttaggcaaatctgtaaataatcattgtagttattcttggaactagtttgcaactaagaaatataatttaagactttttgaacacagtcaaaagaccatgactatcacagatgtggattagtaccactttaaatttgttaataaaacatagaatttatagaatagtttccccgttttataccgcatatgcgactttaggattatagcaggctgtcatctctagggctacggtatacaagaaagataacagggccagtgctacgcttcaaccgcctattattacccctggttttagccaaggaactcattttattcaggctgagtcgacctggggcctatttaaaaatgtctagttgttcttgccggcgctgggtctcgaacccaggtctaccagcaagcgagtcagacatcctaccgctgaactacgccggcccatacgtagagtttataattatcttatatataataaaggaatttgattaaaaaaggtaaaaatacattgtattgggttgcttaggcctaaatacatatctcttcctattagtaagttacaaaatggtgagattcgatcatttttgtgggatatgtagttgatgaattaagtagtaagtagtagttgaatacacgttacattttctcaacattgattaatacatttatttttttccaaaataagaaaaatttagctactaaaaaaatatatgctaaatattgtttatcatcagctaaaagttaggagatctgttaaatcctataaaatatgaaaacaatgaaatgtgttgtttcggtaagtacatagtttgcagacaactggacgatacaagggatctaataacttttagcaattgataaattgaacgaaaaaatcacaatgtttaatcaaaagctcaaacacaagaacacaaagtttttatgatgttaaataaatgaagactttctaccgttcacacgaaaggcgcttatcctgatctggttacattttcttaagataaaaccgtgggtacataatatacacaatcaaacttatatggaatcaccatgtatttcaaaccaatatttatttcttttgaaaaaaacttgttaccaggcgcggatacaggggagggtcaaggggtctatagacccccctattgtatttagtctataagaatttttttattatttattatttttttctgtcaactctaaactttaagccaccagtagaacactaaaattaaacgacaaccacttccaaagaattattgaaagaagcaataaaatctaataaaaccagccttttctgaaaaataaattgaagccgcatttgtttgggtaccgatggagccataaacaactgaaatatttttctcaattcaaagaataacagaaatgatatcttaaaatgcaaatacattacactgggtataaaccttacctcatgaaaagtcacgtttcaaatttgcggtaggtataataaagatataaaaatttggattttattagataatccaggggcgcttacctactcattgacggtagaaacgataatctttacacctccagttggaaaaaagtgaccagtgagattaatagtcgtgaattgtgtttgctagcgttgactaataattattaatagtgaatatgtccaaacgaaatattcaaaccgacataatgcagttcataaactgtattgtataattgtatatttatatttattttattgcattacattttattaactgcattttgtgcgaatctgtttttattagatatcattattattctgtcattcaaggttaattcattgtttttgtaccattctaacgtacataatattcatttatgccatcatttgacgaattccaaattcgtctctatcttctgcttttcttaaaagcgcctgtgtgttaaacccggtccagccgcgaatgtttttagccaggacatttgtcgtctgctaggacccatttttccttctatgctacccttcataattagctataacaaatcgtatttatcatttctaagtatgtgcccaaaatatgctgttttcctccttttaatggtggtcaaaggttctctgtctcctccggtttttgcaacaccatttcgttcgtaatatgatcagtccatggtattttcaaaatttttctaagaaaacacatctcaaatctcaaaagtctccaactttataattatgtcaacattagcagtccaagcttcagtaccttaaaagaagaatagagtagagtggacattttaccactcgatataggagttgcaatttgagtttttggttactcatacttagtaatttccttatcttcaaaaaggctgcttttgattggtctattcttgattaaatttgattgcatatttagattttccttaatccagactcctaagtatttcattttgtccatttgttcaatatcttcattctttatctggattcttgttatgacttcacatttcttactgataaccgtaagttttcttagataaactaggataacttagttttgttttctttatgtgtattgttaaaccaagttgttcccagtatcacaaattgtgtttagtagggtatgtattgctttccgtaaatctggtttatagttactttattcacaacttgtagaaaccattatattaatatatttgtctttattgttatattattcccgaccttagataaagatatttgtcacttcatatttaaaattatgtatattaataatgatttaatattaaatgtatttatgatacttccgttttattttacttgcaactacggcttgataatacggaaagaatcccatcagagctcaatctttttgatactgtaggtatctgggattataaatatagtgtattttatcgttagagtaagtgtgagtcgtaggtatggctaaatttagaaaatataatattggaggtaagtttgacccccctattatgaatttctagatccgcgcctgcttgttactgttgcgaataataaagatttttgcaaatgttgccaaaaagcaacaacggctcaccaagatcgtttcattgtccaaacagctaagctaaaagagacccaacaatttctcatctacagcaccaaaggcagtttttggaagatacaggggtaagtgtttcagtgaaaacaataaaaaaggattcgtgcccaagatttcgaatatgtggaagaccagaaaggacggagactaccagatctgtccacacatataaatgaggaagtgtcatattctgggacggtattatgatctgtaaaaaaatttaattttcatccaatcaattttaacaactcgcaggtatggtgatttggttctcgaacatatagttaggttctggagaggagcaatcgagaaaatttaattttcatgcatgatactgcacctccatataccagcagattgactacacactttcttgaagcagaagctatcactgttatggagtggcctgattgctcacccgaccttaaccctatacagcatttgtgggatacgcttaaggtactagtacactttagaagaccaaaaataataatttttcaagaatttctttctcagaaccttaatcaaaaatgaacctaaaacttattacatattaatatctaactcttagagagtacaaaaagtatatattccttcatccatgcacgcacaccaatattttagagggcgcaaaagtcgaggcctcgaaaaatgatggcggacagttaatctcaggattggga

SEQ ID NO: 4496 - DNA, 615 bp, Diabrotica virgifera
tgcgcggcttaatagtgtttaaaggtgacacaaggtaaaaaatccggaaaaaacttccaaaaacatttgaaaacggggtttttcgtatcagatgaagtcacacatatttctctacagctggaaatacatcatctcatgtttttcacgaatatactttgaaacgtgccattgagtcatattttaatcatatagaactaaaaaaaaaatccaaaaattgaattctgagaatgagggggacattttgcctatcttactaggggtaccgtttgtatagcgattttaatgacctatagaaatgaaaaaaataattttctgtgattaattttgttaactattatgtaaaatactctaaaaacactgttatttgtcacaatgacaataatcgattaaggtactagtacactttagaagaccaaaaataataatttttcaagaatttctttctcagaaccttaatcaaaaatgaacctaaaacttattacatattaatatctaactcttagagagtacaaaaagtatatattccttcatccatgcacgcacaccaatattttagagggcgcaaaagtcgaggcctcgaaaaatgatggcggacagttaatctcaggattggga

SEQ ID NO: 4497 - DNA, 3417 bp, Diabrotica virgifera
  SmartBlast Evalue=3E-88; Info=Transmembrane protein 165 n=2 Tax= Formicidae RepID=E2B1I9_9HYME
tttaagatatatcgcgacatatcactatattactaaaagatcacactacactctttaagatgttgctaccatcacttaggacacgttttatattatgtatccttttaataacattgcatgttctctttacttcggcagaaatagagccaaacgaagatgacaaaccgacgctgacagcgaccattgctccacctggcagcacagcaaactcagaaaatgtgggatttactcatgcatttgtggctagtcttagtgtcattctggtatcagaaattggagataagaccttcttcatcgcagctattatggcaatgaagcatccaaggttaacagtatttgctggtgccattagtgctttaattctaatgacagttttatctgctgtatttggttggctagtgacggttatccctagagcgtacacctactacatcagtacagctctctttgccatattcggtttgaagatgttgtgggagggataccacatgacaaaagacgaaggaagggaggaattcgaggaagtccaaatggagcttaggcagagagaagagcaacatgaagcgactttaccggatatagaaattggtagtagcaatagaagacccaccaaatcagtatggtatgaagtctctcgaatattattgcaatcctttaccttaacctttttagccgaatggggagatagatctcagttaactactatacttttaggtgctagagaaaatgtatatggtgttattattggtggtatcctaggccattgtgcctgcactggtttggctgtgttgggtggtaggatgattgcccaaaagatttccgtgcggacagttaccatcattggaggagtggtcttcttgatcttcgccttctctgctctcttcatcgatccaaacgcgacgtaaactcaaaacaaactaggtttagcttttttatttgaatagatgtatatatggtacccaacttgtactatatagtacgagtctgtcaactatattactcaaaataattataacgtatcaacaccccaaaagatcaaccgaattttcaagtatgtacttatcgttattctgagtaatatattatgtatatttgtgtagaatcagtacttaaatattgaatcaaagataacatacaggatgctgggtttgtgtatagtttttatgtaataaaaacagcatcctctcttcattaactcaagtgataactgttaaaaatggacaatttatcgtagcgttcgaaaaatacttggataccgttgatgtaccttttcaaaagttatttaagaatcaataaatatatttttaatttgtattttatgtttcaatgtgaatttcaatgcacattttgttgatcaaatttcaaagacataatgtacttttgtagtacctacaatacattgtcctccgccttttcagtagtgaattgcgtcgggtcaaagaacatattttaagccaacatctgacattgctttgtcttttaaacatctgacattgcaatcctcagactgaactatcctttctattctattttgttcgattttccatgcctcatcacattacttccgataattattggtactatatactacttcgttgaatacaacaaactggcatatttatgtttcgttgaccttaagaaagcatttgacagggtcaaattaaagcacgttatccatttgttatacgcaagaccggtactccaggaataattaaaacgatcgaaaacatctaccagaacaagaactgaaacataatgaacgaaaacatctactagacacaattgaagctggcaatgggataagacagacggattccttgaggtctttattgttcaatctgatcatggataaaataataaaaaaaagtaagaactaaaagagaataacaaatgggagaaaaacaacttagaatgatctgctagcagacgacacaatactaatctctcaaagtgaagatgatttacaacgtatgctgcaccaatttaatataactgccagaaaatttaacatgctaattttcccaaaaaacacagaatgcatgattataacagcaaatccaataagatgttgtaccatataaccatatatttggtatatattaccttataccgattgagaaaacaatatttttttacttgtttttttctttcaaataatttgtttattatattcgtttacaataagttaaatattataattttttctactttgttattttcttttttaaatctactttggcaacgctgtgctgagaaagccctacctacgacatgaagtgggttgttcgcgctacctcgctttgccggcgtatatcttccagcccgttttaaatgtataataaatacatgtctctttgtcgctctcattaaatgcgcacaccaaccatgagaaatttctcaatcggtataccaaataaccatatacaaaacccttatacaaccagtgttgacatatggatcagaggcatggaccatctccaacgcagatgaaaaccttctgcttatatttgaacgaaggatcctgaggggaatattccgtggcatctgtgaaaatggtgtttccgaggtacaactacgaggtatggtataccacagatataaacaaaaatttggtggtaatgacgtagtatctcttataagaatagggagactaagatgggcagaacatctagcaagatcacagcagaacaaccctcctagaataatccttatatcacaacctgtgggaagtagaaataggggtaagccaaaactcagatggaaggatggtgtagatgaggatgggagacaaataggcgcagcaaactggcaacggttggcaatggatagaactgactggcgtaatagacttgggaaggtcgaagctctttcatagggctgtagcaccattgatgatgatgatccaataagattggattatttaagcttggagctggagggtgagatactagaacaagtgatggagtttaaatatctaggcatcacactatctagttacgaaaagcttgaaacagaagtggaagatcgagtgaatatagcaaacagagccggaggttgcctgaatgacacaaaatggagaaataaaaatatcggaaaagaaatgaaaggcagaatttacaaaacagtcatcagaccgataatgacatacgaggcagaaacacaacctgactcagagaggacaaaaagattgctcaaaacagccgagatgaaaatccatcgaaaaagcaatggtaagaaactatgggacagagctagaagtacagatatacgacgaagatgcaaggcggagagcattaataactgggtaagaaacagaagagtagaatggaatgaccacataagccgaatgactacaattatattggggtccggacaaaaaatccccacaaagtatccctggacaaaaaatccccggac

SEQ ID NO: 4498 - DNA, 1429 bp, Diabrotica virgifera
  SmartBlast Evalue=1E-32; Info=Endonuclease-reverse transcriptase n=1 Tax=Bombyx mori RepID=D7F170_BOMMO
aaattgtataggaatacggttttttaaagaaaattgtctctcgtttttgggtttcacccattttaaaaaaagttggtgaaaaaaggttgaattatatttgaacgttttcacattttttttaaaatggatgaaaacaatatttttttacttgtttttttctttcaaataatttgtttattatattcgtttacaataagttaaatattataattttttctactttgttattttcttttttaaatctactttggcaacgctgtgctgagaaagccctacctacgacatgaagtgggttgttcgcgctacctcgctttgccggcgtatatcttccagcccgttttaaatgtataataaatacatgtctctttgtcgctctcattaaatgcgcacaccaaccatgagaaatttctcaatcggtataccaaataaccatatacaaaacccttatacaaccagtgttgacatatggatcagaggcatggaccatctccaacgcagatgaaaaccttctgcttatatttgaacgaaggatcctgaggggaatattccgtggcatctgtgaaaatggtgtttccgaggtacaactacgaggtatggtataccacagatataaacaaaaatttggtggtaatgacgtagtatctcttataagaatagggagactaagatgggcagaacatctagcaagatcacagcagaacaaccctcctagaataatccttatatcacaacctgtgggaagtagaaataggggtaagccaaaactcagatggaaggatggtgtagatgaggatgggagacaaataggcgcagcaaactggcaacggttggcaatggatagaactgactggcgtaatagacttgggaaggtcgaagctctttcatagggctgtagcaccattgatgatgatgatccaataagattggattatttaagcttggagctggagggtgagatactagaacaagtgatggagtttaaatatctaggcatcacactatctagttacgaaaagcttgaaacagaagtggaagatcgagtgaatatagcaaacagagccggaggttgcctgaatgacacaaaatggagaaataaaaatatcggaaaagaaatgaaaggcagaatttacaaaacagtcatcagaccgataatgacatacgaggcagaaacacaacctgactcagagaggacaaaaagattgctcaaaacagccgagatgaaaatccatcgaaaaagcaatggtaagaaactatgggacagagctagaagtacagatatacgacgaagatgcaaggcggagagcattaataactgggtaagaaacagaagagtagaatggaatgaccacataagccgaatgactacaattatattggggtccggacaaaaaatccccacaaagtatccctggacaaaaaatccccggac

SEQ ID NO: 4499 - DNA, 2730 bp, Diabrotica virgifera
  SmartBlast Evalue=0; Info=WD repeat-containing protein 3 n=1 Tax=Camponotus floridanus RepID=E2B149_9HYME
tcgctctcgtgctctggtgtaggataggggtacacaaagttattggaagatacaaatacacataaacattaataagtaatattttaaggcacaggcaattatggggttgacaaaacaatatttgagatacgttccatcaggcaactttaacattattgccacccaatcctgtaatgtgtgctttataacgttggaaggacaggtcggaagatttgtggccgttggagcttgtgaacacattattatttgggatttaagattaggagaaaaggctcaaattttacctggagaaaaggctgttgtaactgcaataactgctagtcctaataaacgtcatctagctgcaggttattcaaatggaaacatacaaatttatgatttaaaatcatccgagatcatcagtatattttctggccatagatcagaaattacaactttaatttatgacagatttggccacaagttagcttctggatcaaaggataccgatgttatagtgtgggatacagttgccgaggtagggctatgtagactgactggacataagggaatggttacacaattgcagtttatgaaaggtcacccaatcttaatatcagcttcaaaagacagttttgtcaaattttgggacttagagacgcatcattgtttcaaaactttaacaggacaccaaactgaagtatggactatagcgttaatgaaagatgatgaatatcttgtaactggatgtggagatgctgaactaagagtatacaaactttcatttaaagatccagatagtgaaaataaaaatatagaatatttgtcatcaagattagaattaacgtcacttgaagaatcagaatattttacgcatcctttacaatgtcataaagtaggtgcacttcttagacgcggacggggaagggttatatcaatgtatagtgatattacaggacaaattcttggatgccacggtacagatatgcagatagaattttttcagtttttatatgaagaagatgcacagttaagacttaagaagaggcttaaaaaggaaaaaagaagaatagatgtgaagaaaatgcaaatacataccaagataaaaacttactaagtttacgagacgaagttaaaagatttcatccgttaaagctgtctgacaaacctaaaagtttccatttagttcttggtagtggaggagaacttcgtgttgccgtcaacctcaccaataatatagtcgaactgtatacaattcaatcgtcagtgaaagattcagacccgaaacttctgagatctatttcaaatcaaggacacagaacagagataagatcagtttgttttagtagtgataatttggcaatagcgtctggaagtgcggagtcagttaaaatgtggaataggccatcacaaacttgtttgaggactattaggactgagtatatattgtctactgtatttgcacctggcgacagacatcttctagctggattaaaaaatggaaaatttttgattatggacatttcaacaggcgatattttagaagaaattcaagcacatgctaccgaactatggtctgtaaatttgacacctgatttgagagggtgtgtaactggaggtggtgataatacagtcaaattttggaagtttgaacttatcgtcgatgaaaaaagtgaatcaaaggcgaaagtgttatcagttttgcatacaaggactttaaagttagaagacagtgtattgtgtgttaagatttcaccaaatggaaagtttattgctgttgggttattagattctactgtcaaaatattttttgtcgatacgctaaagttttatctatccctttatggtcacaagctaccagtattgtgtttagatatttcttcagattctacgttaatcgcaactggttctgccgataggaacatcaaaatttggggcatggacttcggtgactgtcacaaaagtatattcggtcatgatgactctgtaactggattgcagtttgttccaaagacacactacttttttacatgcggtaaagacggaaaggtgaaagaatgggatggagatacatttgagaagattactacattgcagggccatgctggagaagctagggctttggcagttagtgcggatggtcaatttgttgtgtcatgcggtgccgatagggtgttgaggatgtatgaaaaatctgaccagatattagtgttagaagacgaacaggaggaagaaagagagcaacaagaagagttagcaacaggggaacaaacagtaattcctggccaaccgggtttaaatttaccatccagaaaaaccataggaagtgaaaaagcgacggaaaatattttggaatgtttggcaatatgtgagaagtataaggaacatttagttgaacatgcagctcttcaagcagcttcaagtcagacgttgcctttaccagttcccccatctttgatgttagcactgaatgtttcaacgccaggtgatttttttctggaaacaattaaaagaatcagacctagcgatctggaagagtctatgatgattctgccgttttctgctgtatgtgaaatattacaaatattacctacattattgtctaggggcgctcaaactgaattaattgtaaaatatctatgttcttgttaaagttacattatgcacctataattgccaatcagtatttgcttggagctctagagaaattattgagacatggaaatcaacaagtgaaagaattaagagatc

SEQ ID NO: 4500 - DNA, 2037 bp, Diabrotica virgifera
  SmartBlast Evalue=1E-180; Info=WD repeat-containing protein 3 n= 1 Tax=Camponotus floridanus RepID=E2B149_9HYME
tcgctctcgtgctctggtgtaggataggggtacacaaagttattggaagatacaaatacacataaacattaataagtaatattttaaggcacaggcaattatggggttgacaaaacaatatttgagatacgttccatcaggcaactttaacattattgccacccaatcctgtaatgtgtgctttataacgttggaaggacaggtcggaagatttgtggccgttggagcttgtgaacacattattatttgggatttaagattaggagaaaaggctcaaattttacctggagaaaaggctgttgtaactgcaataactgctagtcctaataaacgtcatctagctgcaggttattcaaatggaaacatacaaatttatgatttaaaatcatccgagatcatcagtatattttctggccatagatcagaaattacaactttaatttatgacagatttggccacaagttagcttctggatcaaaggataccgatgttatagtgtgggatacagttgccgaggtagggctatgtagactgactggacataagggaatggttacacaattgcagtttatgaaaggtcacccaatcttaatatcagcttcaaaagacagttttgtcaaattttgggacttagagacgcatcattgtttcaaaactttaacaggacaccaaactgaagtatggactatagcgttaatgaaagatgatgaatatcttgtaactggatgtggagatgctgaactaagagtatacaaactttcatttaaagatccagatagtgaaaataaaaatatagaatatttgtcatcaagattagaattaacgtcacttgaagaatcagaatattttacgcatcctttacaatgtcataaagtaggtgcacttcttagacgcggacggggaagggttatatcaatgtatagtgatattacaggacaaattcttggatgccacggtacagatatgcagatagaattttttcagtttttatatgaagaagatgcacagttaagacttaagaagaggcttaaaaaggaaaaaagaagaatagatgtgaagaaaatgcaaatacataccaagataaaaacttactaagtttacgagacgaagttaaaagatttcatccgttaaagctgtctgacaaacctaaaagtttccatttagttcttggtagtggaggagaacttcgtgttgccgtcaacctcaccaataatatagtcgaactgtatacaattcaatcgtcagtgaaagattcagacccgaaacttctgagatctatttcaaatcaaggacacagaacagagataagatcagtttgttttagtagtgataatttggcaatagcgtctggaagtgcggagtcagttaaaatgtggaataggccatcacaaacttgtttgaggactattaggactgagtatatattgtctactgtatttgcacctggcgacagacatcttctagctggattaaaaaatggaaaatttttgattatggacatttcaacaggcgatattttagaagaaattcaagcacatgctaccgaactatggtctgtaaatttgacacctgatttgagagggtgtgtaactggaggtggtgataatacagtcaaattttggaagtttgaacttatcgtcgatgaaaaaagtgaatcaaaggcgaaagtgttatcagttttgcatacaaggactttaaagttagaagacagtgtattgtgtgttaagatttcaccaaatggaaagtttattgctgttgggttattagattctactgtcaaaatattttttgtcgatacgctaaagggactaaaacataacctgaccaaacctaacctagcgtcatcgaaaataatacaaaaaaagggccatgctggagaagctagggctttggcagttagtgcggatggtcaatttgttgtgtcatgcggtgccgatagggtgttgaggatgtatgaaaaatctgaccagatattagtgttagaagacgaacaggaggaagaaagagagcaacaagaagagttagcaacaggggaa

SEQ ID NO: 4501 - DNA, 2616 bp, Diabrotica virgifera
  SmartBlast Evalue=2E-91; Info=Inter-alpha (Globulin) inhibitor H4 (Plasma Kallikrein-sensitive glycoprotein) variant (Fragment) n=3 Tax=Homininae RepID=Q59FS1_HUMAN
atttttagatagtttaacatcgaagccgactacaggtgactacagggtatagtatggtgattcaaaaggaagcccttttgggcttattgttgtgtatttcaatagtaacttgtttcccacaagtaagtcaatcagacagtctggttacatcaattgcaagtgattctgttgaaaacaatggagacaattcaaacaaggaaaatgtccctgttcttcctaaaatatacgaaatgagagtcgacgctaatgtttccaatagatttgccaaatgtcaaattactagcaaggttagaaacttggacaaaaacgcacacgaagctacattttctgtagttattcctgaacaggcttatatttctgaatttattatggagattgaaggcaaacaatacaaggcttatgtacaggaaaaggaacaagctaagaacacctacactaaggctgttgaaagtggacaagctgcagctcatgtatcagtcagcgcaagagattccaatagatttacagtttctgtcaacgttgaaccgcaaaagaaagcagtcttctatttgaagtacgaagagcttttaacacgtgctaataaccagtacgaacttgtcattaatattcatccaggacaaccagtcaaaaaattagacgtagaggttcatattgacgaatctcgccctcttaaatttataaacgctccaccactaaggtctggaaatgaaattgctaagaaaggtgaatcactgaatccaaaagctgagatcgttaaggtgaatgccacgtcagccgttgtcaagtttagtccagatatagaaaaacaaaaacaatatgctaccgatttgggaaccaatgcggaaaatggtctagcaggacaattcgtcgtccaatatgatgttgaaaaggctggtcctggaggagaagttttagtcgatggaggacatttcgtccatttctttgccccaagcgatattccggcacttccaaaacaagttgtcttcattttggacaccagcggtagcatggaaggaataagaataacccaactaaaggaagctatgaagagcattctgccagaattaaagaaagaagatatatttagcattattgagtttggttctgtggtcaaagtttggaacatcgacaagtctgctgttcaatatcagtctggtatcgatgaatggggttatgaaccagaagatccagaagcgattttcaaaaataaaactcaacaaccgattcctccaccataccctgcatcggaagaaaatattaaaaaggcggaggatgttgtagaaaaactaaaagcttttggcggtactgatattaactcagccctaaccactggtcttcaaattatattaaaaaataaggaagacaaaacccaccaaccgattatagtctttctaactgacggagaagcaactgtaggagaaacgaacaatgaaaaaatcatcactactatcactgaactaaatagcggcaaaacaccgatattctctttatcatttggagatggcgccgacaagaatttcttgcaaaaattagccttgaagaacttagggtttaacagacatatttacgaagctgcggacgcatctctacagttacaagaattctataaacagatttcctcacctcttttgtctaatgttgtgtttaagtatgtcaataatgtaacagaagtgactaagcaagtctttcccatcttgtttggaggctccgagctagttgtctctgggcaaatcctcgatcccggattttctccttcaaccgtcgaaggttggggcataaatggaccagtaaagctagtaccagttctgaatcaagctgttggtagtttagaacgactttgggcttatttgacattaaaacaatatctaaaacagagagaagcagccgacaacaaaacaggaccaacccaagaagctctcaggatagcgttgaaatattcattcgttagcgatgtcacttccttggttgttgttaaaccaaataaaacggacgcagtggatactgaggatggaagtgataaacgctatccaataattgccagtggaattcctctatcagggagtagttacattcctttatcaaactttggagcaccgaactactttgcttctccagtagcagctgaatctgatgttgattcattgtcagatagaatttatggaggagctttgcctgcacccacttttagcaacaaaatatacccaagtactacatttagaccaccaaccacttatagtacgacgccctttacaccaatatgcaatacacaaactccaaaatcactacttcaaatgttgaaggagaaactaccttggctagctgccattttaggagatgatgaagtattaactctttcaaaaggtaaattcaagctaggtcttaatgaaaccgaatctagcaaacctgattgtccagaaactcctctgagtcaacctggagaatgtacattaattcaccactgtagtcaagtgtacgagaaattgactgatattcaaacgtacgaaaaatatttctgtgatttacaaggatttgccggcatctgctgccctaaacaatcctaagatacccgacaaatacattttagagtaattactgcagtattgtctaatattccgt

SEQ ID NO: 4502 - DNA, 2163 bp, Diabrotica virgifera
  SmartBlast Evalue=1E-91; Info=Inter-alpha (Globulin) inhibitor H4 (Plasma Kallikrein-sensitive glycoprotein) variant (Fragment) n=3 Tax=Homininae RepID=Q59FS1_HUMAN
atttttagatagtttaacatcgaagccgactacaggtgactacagggtatagtatggtgattcaaaaggaagcccttttgggcttattgttgtgtatttcaatagtaacttgtttcccacaagtaagtcaatcagacagtctggttacatcaattgcaagtgattctgttgaaaacaatggagacaattcaaacaaggaaaatgtccctgttcttcctaaaatatacgaaatgagagtcgacgctaatgtttccaatagatttgccaaatgtcaaattactagcaaggttagaaacttggacaaaaacgcacacgaagctacattttctgtagttattcctgaacaggcttatatttctgaatttattatggagattgaaggcaaacaatacaaggcttatgtacaggaaaaggaacaagctaagaacacctacactaaggctgttgaaagtggacaagctgcagctcatgtatcagtcagcgcaagagattccaatagatttacagtttctgtcaacgttgaaccgcaaaagaaagcagtcttctatttgaagtacgaagagcttttaacacgtgctaataaccagtacgaacttgtcattaatattcatccaggacaaccagtcaaaaaattagacgtagaggttcatattgacgaatctcgccctcttaaatttataaacgctccaccactaaggtctggaaatgaaattgctaagaaaggtgaatcactgaatccaaaagctgagatcgttaaggtgaatgccacgtcagccgttgtcaagtttagtccagatatagaaaaacaaaaacaatatgctaccgatttgggaaccaatgcggaaaatggtctagcaggacaattcgtcgtccaatatgatgttgaaaaggctggtcctggaggagaagttttagtcgatggaggacatttcgtccatttctttgccccaagcgatattccggcacttccaaaacaagttgtcttcattttggacaccagcggtagcatggaaggaataagaataacccaactaaaggaagctatgaagagcattctgccagaattaaagaaagaagatatatttagcattattgagtttggttctgtggtcaaagtttggaacatcgacaagtctgctgttcaatatcagtctggtatcgatgaatggggttatgaaccagaagatccagaagcgattttcaaaaataaaactcaacaaccgattcctccaccataccctgcatcggaagaaaatattaaaaaggcggaggatgttgtagaaaaactaaaagcttttggcggtactgatattaactcagccctaaccactggtcttcaaattatattaaaaaataaggaagacaaaacccaccaaccgattatagtctttctaactgacggagaagcaactgtaggagaaacgaacaatgaaaaaatcatcactactatcactgaactaaatagcggcaaaacaccgatattctctttatcatttggagatggcgccgacaagaatttcttgcaaaaattagccttgaagaacttagggtttaacagacatatttacgaagctgcggacgcatctctacagttacaagaattctataaacagatttcctcacctcttttgtctaatgttgtgtttaagtatgtcaataatgtaacagaagtgactaagcaagtctttcccatcttgtttggaggctccgagctagttgtctctgggcaaatcctcgatcccggattttctccttcaaccgtcgaaggttggggcataaatggaccagtaaagctagtaccagttctgaatcaagctgttggtagtttagaacgactttgggcttatttgacattaaaacaatatctaaaacagagagaagcagccgacaacaaaacaggaccaacccaagaagctctcaggatagcgttgaaatattcattcgttagcgatgtcacttccttggttgttgttaaaccaaataaaacggacgcagtggatactgaggatggaagtgataaacgctatccaataattgccagtggaattcctctatcagctttacagtccaaagcacctatgctaggctctgcagggagtagttacattcctttatcaaactttggagcaccgaactactttgcttctccagtagcagctgaat

SEQ ID NO: 4503 - DNA, 2496 bp, Diabrotica virgifera
  SmartBlast Evalue=1E-166; Info=Pol polyprotein (Fragment) n=1 Tax=Drosophila buzzatii RepID=A1BPH1_DROBU
acttaacaaaattacgttttaatacccgatcaccaacaaagaatcgcaaatctcttttcctcaaattgtattgactctgtgacttaaggtaagaagattttaacttcttcctgatgtctgcaaatattggaggcaaagtctgaatatcatctaaacgatgaagcttctcagagatctgagggagatttgtggaattgtctgaaattaaaccaaaataatcaccagacaaagcaatatttctaccaaaattcaaataagctggagaacattgagtaacttcatggaccgaagttcttatggcttgagctattgagtgaatatactggtcccaagctctgtgatctggatatgtgtatgatctaagggctgttacaatactgcggttcactcgctcactatgattagcttgcggatggtatgcagcattataaaagatcttctgaactttgtatttagttagaaggtctttaaaggccttcgatacaaactgaggaccgttgtcacatgacacaatttgaggaacaccatacaccaaaaagacttgttcctccaaatattttaaaattgctggagttgtggcctggcgaaggggacaaactaaaggaaatttagtgaaataatccacaactaccaggcaataggtattacccttgtaactccgaggataaggtccaatgagatccattgagatcatctgccaaggaaaatttatgttcctgaaggaacccataagtccagcctgtggtaggttacttggtttacaagtagcacaaaccatgcatttagaaatgtacctttttatagacttccgcataccaggccaataatataattcggcaatacggtgataagtcttataaaaaccaaaatgacccgccgtaacttcatcatgaaacatatgcagaatattttccctatttggcgtaggtacaactattttccactccgacatattggataaggactctatcggacttaagatgtgtttgtacagaatattattctctaccttaaaatcaggatatttttgtgggtcttgagtgaccctatcaatcatattctgataccacatatcaggacttaaagaggacagatctaggacattaatatcatggacacgtgaaagagcatctgcgaccactaccccgtttgcctttctatggacaatcttatatgaataggcagccagtttgcatatccatcgagaaagcctctgtgaagggtttttcatactatgaagccatactaaggaactatgatcagtaattatagtgaaattacgaccttccagataataacgaaaagcttctaacccatggatgatagctaagagttctttctccgtagttgaatagtttttctgggccttgttcaacttcttactagtgtacgctatggggtgttcggagccatctttcaactgaaataatacgccaccagaagcagtattagagcaatctgtcattagataaaaatgctcatcaaaattaggtgacatcatgaccggagcgctcgttaaagcatctttaacgcgcctaaaagcttcgtcagcctcaggagtccaagtaatggtctgtccctttttcctgttcttcaaaagatcagtaagaggtgacaacaaggtagagtatgacggtacaaaccgcgataatagccacacattcccaatatcctacggacttgggtggtggtctttggtataggaaaatttttgatagcaactattttctcaggatcagtcctcagcccctggttatccacaacataacccaagaacttaagactagggcgacaaaactgacatttatccagattgaccgttagattagcttccttaagacgtaaaaataacttatctaaaatttccatatgaagggaaaaatcaggagtgacaaccaaaatatcgtctaaataatagaaaacatagggctctaacggtggaccaatgactaaatccatcagacgacacattgtctgaggagcagaaacaagaccgaaaggcatggtgacaaactggaataatcctttaccactgacagcaaaagcagtatacttcttgctctcttcactcagtgggatctgtaggaaggccttagacaaatcaatagaagagatgtatttggcattctgaagtttgctcaaaatcacatctattctggggataggataagcatccctgttagttgtgatactgtttagttttcgaccgtcaaagcagatcctgaaggatccatccttcttcttcgttaaccagagcggagaacagtaggacgatgttgaaggttctatgatatttaaagcaagcatcgaatctacttccttttctaaatctgcctgccaggcttgaggtatgggatactgatataatctgaaaggagtgggatttcccacttcgatagtgtgagagattaacgacgtacgacctagtttgtcttttgaagaagagtagtaaatttagagatcatactctctaattgcctttgttcagagcttgat

SEQ ID NO: 4504 - DNA, 2254 bp, Diabrotica virgifera
  SmartBlast Evalue=1E-160; Info=Pol polyprotein (Fragment) n=1 Tax=Drosophila buzzatii RepID=A1BPH1_DROBU
ccaaaattcaaatatgctggagagcactgggtaacttcatggacagaagtccttatggcttgagctatggaatgaatatattgatcccaagctctgtgatcagggtaagtataggaccttagagctgtgacaatactgcgatttactctctcagtatgatttgcttgtggatggtaggcagcattataaaaggtcttttgaaccttatatttagctagaagatctttaaaggccttcgatacaaactgaggaccgttgtcacatgacacaatttgaggaacaccatacaccaaaaagacttgttcctccaaatattttaaaattgctggagttgtggcctggcgaaggggacaaactaaaggaaatttagtgaaataatccacaactaccaggcaataggtattacccttgtaactccgaggataaggtccaatgagatccattgagatcatctgccaaggaaaatttatgttcctgaaggaacccataagtccagcctgtggtaggttacttggtttacaagtagcacaaaccatgcatttagaaatgtacctttttatagacttccgcataccaggccaataatataattcggcaatacggtgataagtcttataaaaaccaaaatgacccgccgtaacttcatcatgaaacatatgcagaatattttccctatttggcgtaggtacaactattttccactccgacatattggataaggactctatcggacttaagatgtgtttgtacagaatattattctctaccttaaaatcaggatatttttgtgggtcttgagtgaccctatcaatcatattctgataccacatatcaggacttaaagaggacagatctaggacattaatatcatggacacgtgaaagagcatctgcgaccactaccccgtttgcctttctatggacaatcttatatgaataggcagccagtttgcatatccatcgagaaagcctctgtgaagggtttttcatactatgaagccatactaaggaactatgatcagtaattatagtgaaattacgaccttccagataataacgaaaagcttctaacccatggatgatagctaagagttctttctccgtagttgaatagtttttctgggccttgttcaacttcttactagtgtacgctatggggtgttcggagccatctttcaactgaaataatacgccaccagaagcagtattagagcaatctgtcattagataaaaatgctcatcaaaattaggtgacatcatgaccggagcgctcgttaaagcatctttaacgcgcctaaaagcttcgtcagcctcaggagtccaagtaatggtctgtccctttttcctgttcttcaaaagatcagtaagaggtgacaacaaggtagagtatgacggtacaaaccgcgataatagccacacattcccaatatcctacggacttgggtggtggtctttggtataggaaaatttttgatagcaactattttctcaggatcagtcctcagcccctggttatccacaacataacccaagaacttaagactagggcgacaaaactgacatttatccagattgaccgttagattagcttccttaagacgtaaaaataacttatctaaaatttccatatgaagggaaaaatcaggagtgacaaccaaaatatcgtctaaataatagaaaacatagggctctaacggtggaccaatgactaaatccatcagacgacacattgtctgaggagcagaaacaagaccgaaaggcatggtgacaaactggaataatcctttaccactgacagcaaaagcagtatacttcttgctctcttcactcagtgggatctgtaggaaggccttagacaaatcaatagaagagatgtatttggcattctgaagtttgctcaaaatcacatctattctggggataggataagcatccctgttagttgtgatactgtttagttttcgaccgtcaaagcagatcctgaaggatccatccttcttcttcgttaaccagagcggagaacagtaggacgatgttgaaggttctatgatatttaaagcaagcatcgaatctacttccttttctaaatctgcctgccaggcttgaggtatgggatactgatataatctgaaaggagtgggatttcccacttcgatagtgtgagagattaacgacgtacgacctagtttgtcttttgaagaagagtagtaaatttagagatcatactctctaattgcctttgttcagagcttgat

SEQ ID NO: 4505 - DNA, 2945 bp, Diabrotica virgifera
  SmartBlast Evalue=0; Info=Rab gdp-dissociation inhibitor n=4 Tax=Culicidae RepID=B0X6X0_CULQU
cactggcgtagtgacgtatcaatttcttcaataaaagtgggccgtatcggtattggatttgccgtcaattaggtttctttattaatttaaatagttacttcacaataatggatgaagaatatgattgcattgtcttgggcactggcctgaaagaatgtattctcagtggaatgttgtcggtgtcggggaaaaaggtcttacacgtcgatcgaaacaagtactacggtggagagtctgcttcaatttgccctttggaagaactcttctcgaaatttggggttcctcctccggatgagtcctatggcagaggtagagattggaacgttgatctgattccaaagttccttatggccaacggaatgctggttaaactgctcattcatacgggcgttacacgatatttggaattcaaatccgtagaagggagttacgtctacaaagggggcaaaatagctaaggttccagttgaccagaaagaagctttagcctctgatttgatgggaatgtttgaaaaacgtagattccgcaatttcctcatatatgttcaagatttccaagccgacgatccaaagacatggaaagactttgatcccaatactcaaaatatgcaggctctgtatgaaaaatttggcctagataaaaacacccaagattttactggacatgcgttggctttacacagagatgatgattatttaaacagaatggctgtggagactattaaccgcattaaattgtattctgattcactagccagatatggaaagtctccatatttgtatcccatgtatggattgggtgaattacctcaaggtttcgctagactatcggcaatatacggaggtacctacatgttagacaaacctattgatgaaatagtcttaggcgaaggaggtaaagtagttggggtgcgttctggcaacgaaatagctaaatgtaaacaggtttattgtgatcctacatatgtctctgataaagtacgcaagaagggaaaagtcatcagatgtatttgccttttggaccatccaattgctaatacaagagatgcactatcgactcaggttatcattcctcaaaagcaagttggtcgtagctccgacatatacgtctctgtagtgagttacactcatcaagtagctgccaaaggttggtttatagctatggtgtctacaacagtggaaaccgaaaatccagaaatcgaaattaaaccaggtttagacctcttaggtatcattcgtcaaaaattcgtctcagtgtctgactactacgagccaacagacgatggtcttcaatctcagatcttcatctcgcagtcctacgacgctaccacccacttcgagacaacctgtctggatgtattggacatcttcaagcgcggtacaggggaagaattcgatttctccaaaattaaacacgaactgggagacgaagaacaataaaaacccaaacattgcaactcaatgttacggtgcagttatctaggtaataatatatgtggaactttttttgataattgtctatttgtttaatagaaatggctatgtagtctttaaaagttcatgatactctttttttttaatctgatattcaattttttgtacccggataatcaggtagttttatttagcttttgtataacgtcacacaaaagagatattaagttttatttctattttttatgcattatttcttcgtggtatttctaaatacgagtgtcattcgtaaaaaaaggttccctgtgccgctgaagaagagtgcgacgtactgggagatatctggcagcactgccttgcacatcaactctccctctctcttactccaccactttcacgtcgctgcattgctcagtgtcggcttggcagctttcgaaggtggaggtccacgtcgatgttatcgccaatgtgaaattcatgctgtgatacgttttttaaatgcaaaattgatttcagctattgacattcaaccagttattcgaagtttatgggtaaaagcgcatatctgttcagcatgttcgcaaatggtgtagtgaatttagtgaaggccgaacggaaattcacgataaatctgaaggtttcctgaatgttgaacagatatatacttttacccataaacttcgattaactgactatgaatgtcaataggtgaaatacattttgcatttaaaaaatttcacattggcggtaacagcgaccgggatctccatattcgaaggctgccagaccgacactgagcaatgcagcaagccgaaagtggaggggtaggagagagggagagttgatgagtaaggcagtgttgccagattttctctttctcagcgtaatggggaacctttttttaccaatgacctccttaccttctaccagaaaactagcttaaaatacgaactttatatttttgtttgcaaaaaggaatttatgtaagttagacataagttgtgaaattgtatttatatgaatatatagctttatgttttagttagatgcatgtctgaatcattggtgataaggcactttaaaaaaacggtgtatctttgtgattgattatatattaccagaataaaagtgggttaaaatgtatcagcttgatgccttgatctaaataaaataattctcaaaaatattgttaaatattatatatcacagacagttttcgacatgttgactagtctgtgttttggcatgaatgttctttaccacttaattgtctctaatgaatctttcgtactcttcttactgaactattgttaagagttttttgagaattgtttatatttgggtaaagatttgataagctttagcattccatttttagacagaactcactgtttaaaagagagttctaaactcaaaactcgtgcaatcgttttcccaacatttttttgtatgctgcacaaggattgcgaatatctgaaagttcttttactgtaataatataaaataaacttt

SEQ ID NO: 4506 - DNA, 1829 bp, Diabrotica virgifera
  SmartBlast Evalue=0; Info=Rab gdp-dissociation inhibitor n=4 Tax=Culicidae RepID=B0X6X0_CULQU
cactggcgtagtgacgtatcaatttcttcaataaaagtgggccgtatcggtattggatttgccgtcaattaggtttctttattaatttaaatagttacttcacaataatggatgaagaatatgattgcattgtcttgggcactggcctgaaagaatgtattctcagtggaatgttgtcggtgtcggggaaaaaggtcttacacgtcgatcgaaacaagtactacggtggagagtctgcttcaatttgccctttggaagaactcttctcgaaatttggggttcctcctccggatgagtcctatggcagaggtagagattggaacgttgatctgattccaaagttccttatggccaacggaatgctggttaaactgctcattcatacgggcgttacacgatatttggaattcaaatccgtagaagggagttacgtctacaaagggggcaaaatagctaaggttccagttgaccagaaagaagctttagcctctgatttgatgggaatgtttgaaaaacgtagattccgcaatttcctcatatatgttcaagatttccaagccgacgatccaaagacatggaaagactttgatcccaatactcaaaatatgcaggctctgtatgaaaaatttggcctagataaaaacacccaagattttactggacatgcgttggctttacacagagatgatgattatttaaacagaatggctgtggagactattaaccgcattaaattgtattctgattcactagccagatatggaaagtctccatatttgtatcccatgtatggattgggtgaattacctcaaggtttcgctagactatcggcaatatacggaggtacctacatgttagacaaacctattgatgaaatagtcttaggcgaaggaggtaaagtagttggggtgcgttctggcaacgaaatagctaaatgtaaacaggtttattgtgatcctacatatgtctctgataaagtacgcaagaagggaaaagtcatcagatgtatttgccttttggaccatccaattgctaatacaagagatgcactatcgactcaggttatcattcctcaaaagcaagttggtcgtagctccgacatatacgtctctgtagtgagttacactcatcaagtagctgccaaaggttggtttatagctatggtgtctacaacagtggaaaccgaaaatccagaaatcgaaattaaaccaggtttagacctcttaggtatcattcgtcaaaaattcgtctcagtgtctgactactacgagccaacagacgatggtcttcaatctcagatcttcatctcgcagtcctacgacgctaccacccacttcgagacaacctgtctggatgtattggacatcttcaagcgcggtacaggggaagaattcgatttctccaaaattaaacacgaactgggagacgaagaacaataaaaacccaaacattgcaactcaatgttacggtgcagttatctaggtaataatatatgtggaactttttttgataattgtctatttgtttaatagaaatggctatgtagtctttaaaagttcatgatactctttttttttaatctgatattcaattttttgtacccggataatcaggtagttttatttagcttttgtataacgtcacacaaaagagatattaagttttatttctattttttatgcattatttcttcgtggtatttctaaatacgagtgtcattcgtaaaaaggaggttccctgtgccgctgaagaagagtgcgacgtactgggagagttgatgagtaaggcagtgttgccagattttctctttctcagcgtaatggggaacc

SEQ ID NO: 4507 - DNA, 364 bp, Diabrotica virgifera
gttttttctttctcaataaagagaccatattttcttgttttagctcctttgtcttcccatttattatatgttcatattacccaacattctgacaaaaatgttagtgatagaacattgtaagatccacaacacaagatctttctacaacaattatttatgttctcactgtgctcttgatatcaatgtactctaaactactatgtattaagatatcttgcctaatgacctgatctgaattatttgaatctcccttgtacatacttaatctgtttaaattttcttgcaaaaaatcgtagccatatacattttcttttcttctctaatgcctgcatcaattcgactgaagtatttattgttttggtag

SEQ ID NO: 4508 - DNA, 2398 bp, Diabrotica virgifera
  SmartBlast Evalue=1E-155; Info=CG9135 protein n=17 Tax= Drosophila RepID=Q9VMI5_DROME
ggtttgtatccgctttcgttgggtgattagccattttgctttttgctcaattctagagaaagccggtttcccataatttcgcatctacctcaaaatttgtatctttatcgtttaaaaatcgctttacaatttacattttagtacatttaatcattttaacactaaaataaagaactaaaggtgtgtgtaaatttgtttctggagagtaccgttgttttctcagcttaacctttatctctttgtgcagaattttaccatgtccgcatctcttaagagaaagagggctccctcgaagaaggcagctgggaagaaaaataagaaaagcttagacatggattcggatttaagtgaaggcagtggtggtgaaaataatgttcaacctgatgaagtcctcatagccggacatggggatattgatgaaacccctttgccaaaagagttgttgaataccataatcaagcctgctggacagctggtctttttcggaaatgtgaactgggacacgatgggcaaaagggaagtaaagggacagaaaattttgcctatgttgtattggccccacaggtttactgatctaaggattcgttcagttgtaagcggatgtgtggcaggtcattccatcctagtcacagaagaaggtaaagcaatgactttcggcagaaaccctcaaggtcaactaggcctggatgatactgaatccaggacaacacctactttggtacctggactggagaacatgaacattataggtgctgcatgtggtcgacatcattcattgtttttgacagacagtgggactgtatatgcatgtggagataataagtcgggccaatgtggcgtaggaaacttacaaccccaaattttagtaccaacgaggatcaattatagaggacctcctataataaaagtaggcgctggcgctgaattttctgttattcttgacataaaaggtggtctccactcattcggcttgcctgaatatggtcaacttggacataacactgatggcaaatacttcaaaaccagcaccaaactgtgcttcaactatcaaaccagtccaaagcgcattgttctatacatagagaagagtaaagatggacatgtttcagcagtggatgtcactgaaatagtagacttttcgtgtggtcagaaccacactgtcgctattgatagtaagaagagggcattttcatggggatttggaggattcggaaggctgggacatgcggagcagaaggatgagatggtaccccgtctcataaaatattttgacagccaatccagaggcgtgcgctcagttcattgtggttcaacatactcgttagccgtgacagagttcaatggtctctacatgtttggtcaaaccaaaaaaactggcgaggctaacatgtatcctaagcccatccaagatcttgctggttggaatatcaagtgtataggcaccggccaaacctccattattgtagccgctgatgaaagcgttattgcatggggagcctcaccttgctatggggaactcggcttgggcgatatgcagaagacgagtactacaccaaaagaagtcaacaaactgtctggtacaaaagtgacaagcctcaccatgggcatctgtttcacccttctcgtcgcatcagacgaaacccccgaacaaaaacaaaaactggaaacgttgaaagaatatacaccttagatcaataagaaactatgaaacacttaggtagtaagttattccatgtatttatgtcactaatgatatgaccgttagagcaatcgacagcttacactacacacttccctttttctttgaagtgagaaaaaagtatgaacggaacaccatctaagcaagtggcattagggaatcttttttgacttagctggtttagtaccgacaaaaattatgcacttcttaaatttttctgtttgatctaattcacgagaacatgaattgtggtaatactctagttggccccaatattgtttgtacgtagactcgttgaagctttaaatgatgcagattttccatcaaggagagacactatacatgtatactaatatcattctagtgcagtcttgaataacgacctctgggcttaattaaaaagtgaaacagattatttatcccttctgtatccgtcccacgtatggtaaaagtccaacaaattagtagtgttgtcaaatcctcgtatgtataattaattgccagatagaaaaaattaagtactgtaaatacatagcacagatgataatttttattggtacaaatccacttgtataagtcttgatgtacataattcaacatttcattcaataaaatattgatataattatcataaacatcaggtactagttcaacatagaaatatttttcggtattttttaacgtggtgtaaaatagtca

SEQ ID NO: 4509 - DNA, 2355 bp, Diabrotica virgifera
  SmartBlast Evalue=1E-155; Info=CG9135 protein n=17 Tax= Drosophila RepID=Q9VMI5_DROME
ggtttgtatccgctttcgttgggtgattagccattttgctttttgctcaattctagagaaagccggtttcccataatttcgcatctacctcaaaatttgtatctttatcgtttaaaaatcgctttacaatttacattttagtacatttaatcattttaacactaaaataaagaactaaagcttaacctttatctctttgtgcagaattttaccatgtccgcatctcttaagagaaagagggctccctcgaagaaggcagctgggaagaaaaataagaaaagcttagacatggattcggatttaagtgaaggcagtggtggtgaaaataatgttcaacctgatgaagtcctcatagccggacatggggatattgatgaaacccctttgccaaaagagttgttgaataccataatcaagcctgctggacagctggtctttttcggaaatgtgaactgggacacgatgggcaaaagggaagtaaagggacagaaaattttgcctatgttgtattggccccacaggtttactgatctaaggattcgttcagttgtaagcggatgtgtggcaggtcattccatcctagtcacagaagaaggtaaagcaatgactttcggcagaaaccctcaaggtcaactaggcctggatgatactgaatccaggacaacacctactttggtacctggactggagaacatgaacattataggtgctgcatgtggtcgacatcattcattgtttttgacagacagtgggactgtatatgcatgtggagataataagtcgggccaatgtggcgtaggaaacttacaaccccaaattttagtaccaacgaggatcaattatagaggacctcctataataaaagtaggcgctggcgctgaattttctgttattcttgacataaaaggtggtctccactcattcggcttgcctgaatatggtcaacttggacataacactgatggcaaatacttcaaaaccagcaccaaactgtgcttcaactatcaaaccagtccaaagcgcattgttctatacatagagaagagtaaagatggacatgtttcagcagtggatgtcactgaaatagtagacttttcgtgtggtcagaaccacactgtcgctattgatagtaagaagagggcattttcatggggatttggaggattcggaaggctgggacatgcggagcagaaggatgagatggtaccccgtctcataaaatattttgacagccaatccagaggcgtgcgctcagttcattgtggttcaacatactcgttagccgtgacagagttcaatggtctctacatgtttggtcaaaccaaaaaaactggcgaggctaacatgtatcctaagcccatccaagatcttgctggttggaatatcaagtgtataggcaccggccaaacctccattattgtagccgctgatgaaagcgttattgcatggggagcctcaccttgctatggggaactcggcttgggcgatatgcagaagacgagtactacaccaaaagaagtcaacaaactgtctggtacaaaagtgacaagcctcaccatgggcatctgtttcacccttctcgtcgcatcagacgaaacccccgaacaaaaacaaaaactggaaacgttgaaagaatatacaccttagatcaataagaaactatgaaacacttaggtagtaagttattccatgtatttatgtcactaatgatatgaccgttagagcaatcgacagcttacactacacacttccctttttctttgaagtgagaaaaaagtatgaacggaacaccatctaagcaagtggcattagggaatcttttttgacttagctggtttagtaccgacaaaaattatgcacttcttaaatttttctgtttgatctaattcacgagaacatgaattgtggtaatactctagttggccccaatattgtttgtacgtagactcgttgaagctttaaatgatgcagattttccatcaaggagagacactatacatgtatactaatatcattctagtgcagtcttgaataacgacctctgggcttaattaaaaagtgaaacagattatttatcccttctgtatccgtcccacgtatggtaaaagtccaacaaattagtagtgttgtcaaatcctcgtatgtataattaattgccagatagaaaaaattaagtactgtaaatacatagcacagatgataatttttattggtacaaatccacttgtataagtcttgatgtacataattcaacatttcattcaataaaatattgatataattatcataaacatcaggtactagttcaacatagaaatatttttcggtattttttaacgtggtgtaaaatagtca

SEQ ID NO: 4510 - DNA, 2398 bp, Diabrotica virgifera
  SmartBlast Evalue=1E-156; Info=Double-stranded RNA-specific editase Adar n=1 Tax=Camponotus floridanus RepID=E2AF18_9HYME
tgtgttgggtttttttttgaaactcagaaaaattgaatttactcacactattctagttgttcagatacttacattaaaaacacaactgtttcattcgtgacatttcaagaaaaattagtgacagtgaacaatgttttgttaactaattaaaaaaaaatcctatcttaaatcaaaattgacgctaaaaaagtattctcttctacaatcttacgagctaggaggaataatatcgaacatgtcctgttccaaaggtttcgacacccaagaacccagttgggccttgaggaaggactcgtggaggctcttctttgctgcgttgtagttgggaacgctttctttagcttccatcaaggttccaggtagtgatttgacattggtagttgtctgtaacttgttaaataacgaaacgaacctgttaactagtttctgtttgcagaccaaagatactccttcttcgggttttcccatggtagtgttgactatttcaggtttttgcatacccatcgtccatatgactgaaaaattgggagctttctggggctgtcgtacctcaacggatgttactctcaacatagtcggtctgttcaataggaacggtggaggcagaccttgcaaagtgttctctattcttccacagatggctctgtacaaatgactctccttcatcaagctccccagtgtcaaagactttaaatatataggttcgataaaatgagacaagagagctccttggagacccaagacgttccacctgcatattttatccgaacacgacatagttaggagtctttcaccctggacgataccgtcccaagtctgaatggcagcagcgtttttgacaggtattgtgccttctcctgattcgatctttgacctaagttgtccacgggatattctgttgggatgtttatcgacagcaatttcttcatgtggactgaaaatacgagcatctccacacggtgctgtgtttatataaagatgaaaatcgatctctggcttcaattgataccctttcttgtcggctttaagtgtaaatatggaattatctttggttgagtttgatagcaagagttctaactgatcgtagaaataattgattaagcatcttctcgatagaatttcggcatgcatatcattcagtgaagctccgttgatactgatataatctccggcaacgcattttgttccggtagtgacacatattacttctgctgtagagagatcattgttggtagttttcacaatacctgccaaaactttccgcttgatatgcacgcaatcatcagccatcaaactactgaatttctcattgacaagtcttccgacagtatcagccaaatcctgttcttccttcgtggcaaacggaagatcttccatggcagaattagcagaactaggactggtgtaattggttaacttgcttagtgctcgtgacgctgccgcgtttttagctagtctcttgttagagccagttccgtaataggtttcattgttgatatttatagagatcttaaatctaccgtaaggatcactctcattggaaatgcatgtgaactcagcatctgggtatagttcatttaatatcatcaagggtcctttaactcctttgttcttatttgacaaggtattgtcgtgcttcttgttgatgacttgatctgatgtaaaatccaatcttgtacctggaaccgttttcttggagagaaatgtaccattagtcggaaactgaataaacgacttcaacgcttcagttgcggcttcaaatttggcagcttttttggagttcccaacaccgaaatacttttgtccatcaacttcaacacatatcttgaaggttggattgtgagatggacccatgtgttcaattatatcgtatttcaatcccagccggagctcatttagtagcgaaatcggatttttctcctgcaaatttatatttttgggttcgctttttcttttcttttgagggttaaggtaatcatcttcttgggatcgttttccggatgatttttcttctacacttgtctccaaggattcggtttccaattcgtttgccattgtatttaactaataaaccttttctggatcggtttttataattatatttcaaataacacgttctcctcactaaaattgatgtactttttcagatttcgttaaacaatgtgcaatggacgcgcttaccagtcaaccgcagtaaatattgtttgctaaaatttaattaagttataatcactgagcaaccaacttttttttgtttaaatcaaactatcgttacatttatactgagtaaaataatcacgagtggaaactaccgcaggaaaactataattgataagaatattcacaatttttttattttcaatcaagagtttttagaaaagagaaaacctcataccac

SEQ ID NO: 4511 - DNA, 2342 bp, Diabrotica virgifera
  SmartBlast Evalue=1E-156; Info=Double-stranded RNA-specific editase Adar n=1 Tax=Camponotus floridanus RepID=E2AF18_9HYME
tgtgttgggtttttttttgaaactcagaaaaattgaatttactcacactattctagttgttcagatacttacattaaaaacacaactgtttcattcgtgacatttcaagaaaaattagtgacagtgaacaatgttttgttaactaattaaaaaaaaatcctatcttaaatcaaaattgacgctaaaaaagtattctcttctacaatcttacgagctaggaggaataatatcgaacatgtcctgttccaaaggtttcgacacccaagaacccagttgggccttgaggaaggactcgtggaggctcttctttgctgcgttgtagttgggaacgctttctttagcttccatcaaggttccaggtagtgatttgacattggtagttgtctgtaacttgttaaataacgaaacgaacctgttaactagtttctgtttgcagaccaaagatactccttcttcgggttttcccatggtagtgttgactatttcaggtttttgcatacccatcgtccatatgactgaaaaattgggagctttctggggctgtcgtacctcaacggatgttactctcaacatagtcggtctgttcaataggaacggtggaggcagaccttgcaaagtgttctctattcttccacagatggctctgtacaaatgactctccttcatcaagctccccagtgtcaaagactttaaatatataggttcgataaaatgagacaagagagctccttggagacccaagacgttccacctgcatattttatccgaacacgacatagttaggagtctttcaccctggacgataccgtcccaagtctgaatggcagcagcgtttttgacaggtattgtgccttctcctgattcgatctttgacctaagttgtccacgggatattctgttgggatgtttatcgacagcaatttcttcatgtggactgaaaatacgagcatctccacacggtgctgtgtttatataaagatgaaaatcgatctctggcttcaattgataccctttcttgtcggctttaagtgtaaatatggaattatctttggttgagtttgatagcaagagttctaactgatcgtagaaataattgattaagcatcttctcgatagaatttcggcatgcatatcattcagtgaagctccgttgatactgatataatctccggcaacgcattttgttccggtagtgacacatattacttctgctgtagagagatcattgttggtagttttcacaatacctgccaaaactttccgcttgatatgcacgcaatcatcagccatcaaactactgaatttctcattgacaagtcttccgacagtatcagccaaatcctgttcttccttcgtggcaaacggaagatcttccatggcagaattagcagaactaggactggtgtaattggttaacttgcttagtgctcgtgacgctgccgcgtttttagctagtctcttgttagagccagttccgtaataggtttcattgttgatatttatagagatcttaaatctaccgtaaggatcactctcattggaaatgcatgtgaactcagcatctgggtatagttcatttaatatcatcaagggtcctttaactcctttgttcttatttgacaaggtattgtcgtgcttcttgttgatgacttgatctgatgtaaaatccaatcttgtacctggaaccgttttcttggagagaaatgtaccattagtcggaaactgaataaacgacttcaacgcttcagttgcggcttcaaatttggcagcttttttggagttcccaacaccgaaatacttttgtccatcaacttcaacacatatcttgaaggttggattgtgagatggacccatgtgttcaattatatcgtatttcaatcccagccggagctcatttagtagcgaaatcggatttttctcctgcaaatttatatttttgggttcgctttttcttttcttttgagggttaaggtaatcatcttcttgggatcgttttccggatgatttttcttctacacttgtctccaaggattcggtttccaattcgtttgccattgtatttaactaataaaccttttctggatcggtttttataattatatttcaaataacacgttctcctcacagtcaaccgcagtaaatattgtttgctaaaatttaattaagttataatcactgagcaaccaacttttttttgtttaaatcaaactatcgttacatttatactgagtaaaataatcacgagtggaaactaccgcaggaaaactataattgataagaatattcacaatttttttattttcaatcaagagtttttagaaaagagaaaacctcactaccac

SEQ ID NO: 4512 - DNA, 2809 bp, Diabrotica virgifera
  SmartBlast Evalue=5E-10; Info=Ankyrin repeat and FYVE domain- containing protein 1 n=23 Tax=Amniota RepID=ANFY1_HUMAN
caaacgttgtaatatagtgccagatcccaccctttaaaagaacacgtatatttaacattaaatgggcgtccagttggacgttggcagtcaacgtgataagttactttgtgattggtcacttagatgttgaaagtccatttgaagctcttcaattctaacgttatcatcgtgattcaaatttgatattagttgtcgtttttattcagtatgaaaataacttttttcgagttatttgcgtgtctttcaataatggttttaaatttattaaacaattgtgtccatacggtgttgtcgaccagcagtttattctggtattcaataattaacaaatgatgacttttctcagacctgaaagaatttatgacaagcttttctatatctttcagaaggaatgtcctgagtcttaaaaatacaaaactgtcatgcgctctaaaattattagagttctctaaggtctgaagtaaatgaatggaggccaatcgcgatgaatctgtcaataaaaataaaaatgtttgttagattttaaaaattcattgacacaaacaagatcgtgtagtaaagttatgtctagcgcttttaatttttcgggataagctttatttaggccagatgtcatcagagtatgaatttttcatttaatgagataaaaaactttttaactttatttttaccaagaaagtcactgcgtcctttaaagtattgcttaaaaaaatcaagcatttccttttgaaacaaatgtgtcactaaatcagaatttaacagttggaatgttactcccagctccttacttaaaaatatattcaactcatcaacattcggataatccgttataatacgaaacttatcaataaattctttaatattgctatcaaatttactatcatctaataacaatgatattgctgctctgttagtaattatattctggcacttatcttgtactaaacttcttgtctcttctatatctgcattaggtgatttgagtgtttctaaagttcctattgaaaatttgttagttattcctgcattattaatttcactgcaaatgtcagatattgtaagacattgtgacagtttctttaaaaagctagataaattttcttcatcctcgataagcatcctacgttcctggcgtaagcggctgccaagagaagaggttgttgttagatacttttccattttgctttcttcgtcttttactatcgtttcaatttttccaatggtggtttgcaaattactgactagttggttgaacgaaagttttgttgtactcttcctttcaaatacttttttatctgaaattacatattttaatgaaattatacgttttaaaagtctttctaatgacgcttttgtttttgctgaagccatttctaattttacgctgtttattgtatctattataacagatttgttttccaacacttttactgttgacaaatattcttctatagatagaaaattttcacaatttttagaagttaaaacattttctagcaagttcattttcattaattttaacaagtcgtctttaacgcttggacaaaatttgtatttcagtgcatgcgtgttttcttctaaatataggatttcatcttgtttaatatcgtctagtatgaagtaatttttccatttagcgatgtcttcattagttttctgtgctaaatcagttagtttgccattcattttgcgtttattgctctcccgaaaatcaaaactggtgtttgtgcaaagatccagttcctcaaattcactatcatgatatactgggtttgatttcattttacagaatgacaaaaaatacttgaacacactgaagtctcctttgtgatcattagtagttaattgtttcaccgtaattttatgtttttcaatgtcttgtttgtgtttggcctgtaaaaaccgccatctacagcggatatcttgtgtagtttttctgtatttaataacaacgtcatcaaatttttcagcaatatccaattccgtagcaatatcaaaatacgcgtaattattttttagggctctgtaagagaataacattaaaagtaacaactgatatacggttccgtgtaatgaggtttttatacctgaagacgcatatgacgtacttgcagtggataaatttgattcttgattatcttgatcattgtcggaatcctctgtcaatgtagaagtattaccttgaatagacgtggaggcacattgtgggtaggttggggctgaagcttcatgtagtaatttttcaaagttggaccaattggaaaatcttcgttgatttctttggaatgaatctaatactgattcaccgttgttgtttgtagcaataacatcccaggcagcgttttgaatcaagactttggctacgtttatgcgattccttaaaacagccaaatgaagcggattatttccgtctttgtcagtaacatttaaatcaacaccggattcaatcaacatggcagttatttctggacgatcagaaatgactgcgtaatgaataagcgaaatgccatttctaacttcgttcaaatcggctccattttctatgaaattcctaactttatattcatcaccttgttcagtagcatcaaatatgttactagtaagataatcatagtcgtcgtttgaattgtggtccatcattttatttccttcttaataacaattaagccatttatgtacatatttggatctgaggtagaagagttccaaagttttgacaattggaatagagtatgttatctccagctgttactatctagatctaagcactcgtatattctggtaaaacttgacacctcttcaatattag

SEQ ID NO: 4513 - DNA, 1906 bp, Diabrotica virgifera
caaacgttgtaatatagtgccagatcccaccctttaaaagaacacgtatatttaacattaaatgggcgtccagttggacgttggcagtcaacgtgataagttactttgtgattggtcacttagatgttgaaagtccatttgaagctcttcaattctaacgttatcatcgtgattcaaatttgatattagttgtcgtttttattcagtatgaaaataacttttttcgagttatttgcgtgtctttcaataatggttttaaatttattaaacaattgtgtccatacggtgttgtcgaccagcagtttattctggtattcaataattaacaaatgatgacttttctcagacctgaaagaatttatgacaagcttttctatatctttcagaaggaatgtcctgagtcttaaaaatacaaaactgtcatgcgctctaaaattattagagttctctaaggtctgaagtaaatgaatggaggccaatcgcgatgaatctgtcaataaaaataaaaatgtttgttagattttaaaaattcattgacacaaacaagatcgtgtagtaaagttatgtctagcgcttttaatttttcgggataagctttatttaggccagatgtcatcagagtatgaatttttcatttaatgagataaaaaactttttaactttatttttaccaagaaagtcactgcgtcctttaaagtattgcttaaaaaaatcaagcatttccttttgaaacaaatgtgtcactaaatcagaatttaacagttggaatgttactcccagctccttacttaaaaatatattcaactcatcaacattcggataatccgttataatacgaaacttatcaataaattctttaatattgctatcaaatttactatcatctaataacaatgatattgctgctctgttagtaattatattctggcacttatcttgtactaaacttcttgtctcttctatatctgcattaggtgatttgagtgtttctaaagttcctattgaaaatttgttagttattcctgcattattaatttcactgcaaatgtcagatattgtaagacattgtgacagtttctttaaaaagctagataaattttcttcatcctcgataagcatcctacgttcctggcgtaagcggctgccaagagaagaggttgttgttagatacttttccattttgctttcttcgtcttttactatcgtttcaatttttccaatggtggtttgcaaattactgactaattggttgaacgaaagtttcgttgtactcttacttgcagatactttcttttctttttttactttctttcctttttttactttccttactttttttacgtatctgaaattgcatcttctaatgcaattatacgttttaaaagttgttctaatgacgctttttgtgtttgctgaagccatttctaattttacgctgtttattgtatctgttataacagatttgttttccaatacttttactgttgacaaatattcttctatagatggaaacttttcacaatttttggaagtcaaaacattttctaaaaaatttattttcataaattgtaacaagtcgtctttaacgcttggacaaaatttgtacttcttgtactttagtgcacctgtgctttcttctaaatacagtatatcatcttggttaatatcgtcttttatgaagtaatttttccatttagcgatgtcttcgttagttttatgtgctactagtgtaccaccatggttgcgtttattactcgttttaaaatcaaaatcggtgtttgtgcaaagatccagttcttcaaattcactatcatgatattctggtttgatttgattttacagaatgacaaaaaatacttcggcacactgtattctcctttctcgtccttagtagttaatttgttca

SEQ ID NO: 4514 - DNA, 2428 bp, Diabrotica virgifera
  SmartBlast Evalue=4E-47; Info=Peritrophic matrix protein 9 n=1 Tax=Tribolium castaneum RepID=D1MAJ7_TRICA
ctttttagtacctagagacttagaaaccaataactacattttttattgtgtaaattaaaataaagtttaactagtaaaatgatgatattgagtcttttgtttttggcagttggagtttttgccgatactcaagattgccccaattctgccacacctacattcctcccagatacttcaaactgcagcatctactacgaatgtattaggggacaccagtaccagcttatatgtcctccgggactcctttttaatgttgacactaattactgtgatgacgcagaatatgttgattgcaatactaaggatccattatgccccacggcacaaggaactgctaatgttgtgtactctgaagactgcagcaagttctacagatgtgtagatggaaagaagcaattaaaaaattgtccagagaatatgtactttaattccaaaacaagtaggtgcgactacatggacaatgtggattgtggttctgtaccagctccaacaattcctacagcagctactgagtcatcacctgcaactagttcaccaagagcacaaacttcaacagtagccccaactaccgaaggcaccattgaccctacttgtccagcatcgtcaggaataattaaaatcgttgatccagatgattgcagcaaatactacgaatgcaaccaaggaaggaaatcactaaaggactgtccagaaaatttgtatttcaaccctgaaacacttcgatgtgactatatggataacgtagactgcaaggccgtaccaacacgtcaaacaaatccagccacagagagcacacaggcttcaacagtaactacagctgtacccactaccgcagatcccatagatccaacttgcccagcatcgtcaggaattacaaaatttgtttaccccgaagattgcagcaaatactatgaatgcaaccaaggaagaaaatcactaaagaattgtccagagaatttgtatttcagtcctgaaacgcttcaatgtgattatatggataaagtagactgtcaagctgtgccgtcatcaactgtagcgccagttaaccctactaccgctattcctgcctacacaacaactgtcgctccagaaaatcccacaacagttattgatccagcttgtcctgcgaccggttcaactaatatagtctacccatatgattgtagtaaattttacagatgtgtcaatggtcaaaaaacactaaagaattgtcccgaaaatatgtacttcaatccatcaatgggttcctgtgattacatggataatgtagaatgctctgtgacaccttcaccagttgatacaacgacagccgctccagtaacgactttacagcctgaaacttcaagtccagctaaaactacagctgctcctgttacagctaccacatctgttaccacatcagcaccgtctaatgtatgcgaaggtaaaccaaacggaacctttatacctaatcctgacaattgtaggcaatattatgaatgcgctaacggccaggcgttcttatttaattgtccaactggaaccatttggaacccggttatcaatagctgcagttattcagaaaaccagtgttagataggtatagtcgaaacggaaattggtcagaatatgcaataaagtggcggtatcaatgttattggagaagccgctttatagataagatattttactatcccattaaccattgtaaattagtcattttagggcttacagtaaataattggatattagtaggtacagttaaaatacttagatgataaataccatacaagagaaattaaacgtttttttatacttttaagggtaaaaaaagtaagctcattaaggcagccttcagttttaattgcacagttcgaactgttcagttaaaagtgacatccatatggtctacacacgttcagttttatcagttgaaataatttttcggttgaagtcacatgttaccagtagagtcaccatggtttcatcggatgatgctgtagcaattattaatctattatgcattttgggaaagagaaaacaaaaaaaaaagtgttgtaaacattgtttattaaaaagacaacaatattcacatgataatttactgaaagagctcagcattgctccaaaagactataataactacactaagcatcaaaattaagcaccaccttggaaatgggacatttttgatgactcatatttcctaaacctgttgtctgatttgagtgatttttttagtatggtatagctttgttcttcaagaatatcggcgtaataatgttgttgctggggaggtgagtgtcattgtataccgggtgtaaagatgatggtgggttttttcttcgaagtttggaacaccctgtggaatattctagcatgtttgagggtattgaaattaaaacttaactgtggccttggactttattaacattttgcttttcgattc

SEQ ID NO: 4515 - DNA, 2297 bp, Diabrotica virgifera
  SmartBlast Evalue=4E-47; Info=Peritrophic matrix protein 9 n=1 Tax=Tribolium castaneum RepID=D1MAJ7_TRICA
ctttttagtacctagagacttagaaaccaataactacattttttattgtgtaaattaaaataaagtttaactagtaaaatgatgatattgagtcttttgtttttggcagttggagtttttgccgatactcaagattgccccaattctgccacacctacattcctcccagatacttcaaactgcagcatctactacgaatgtattaggggacaccagtaccagcttatatgtcctccgggactcctttttaatgttgacactaattactgtgatgacgcagaatatgttgattgcaatactaaggatccattatgccccacggcacaaggaactgctaatgttgtgtactctgaagactgcagcaagttctacagatgtgtagatggaaagaagcaattaaaaaattgtccagagaatatgtactttaattccaaaacaagtaggtgcgactacatggacaatgtggattgtggttctgtaccagctccaacaattcctacagcagctactgagtcatcacctgcaactagttcaccaagagcacaaacttcaacagtagccccaactaccgaaggcaccattgaccctacttgtccagcatcgtcaggaataattaaaatcgttgatccagatgattgcagcaaatactacgaatgcaaccaaggaaggaaatcactaaaggactgtccagaaaatttgtatttcaaccctgaaacacttcgatgtgactatatggataacgtagactgcaaggccgtaccaacacgtcaaacaaatccagccacagagagcacacaggcttcaacagtaactacagctgtacccactaccgcagatcccatagatccaacttgcccagcatcgtcaggaattacaaaatttgtttaccccgaagattgcagcaaatactatgaatgcaaccaaggaagaaaatcactaaagaattgtccagagaatttgtatttcagtcctgaaacgcttcaatgtgattatatggataaagtagactgtcaagctgtgccgtcatcaactgtagcgccagttaaccctactaccgctattcctgcctacacaacaactgtcgctccagaaaatcccacaacagttattgatccagcttgtcctgcgaccggttcaactaatatagtctacccatatgattgtagtaaattttacagatgtgtcaatggtcaaaaaacactaaagaattgtcccgaaaatatgtacttcaatccatcaatgggttcctgtgattacatggataatgtagaatgctctgtgacaccttcaccagttgatacaacgacagccgctccagtaacgactttacagcctgaaacttcaagtccagctaaaactacagctgctcctgttacagctaccacatctgttaccacatcagcaccgtctaatgtatgcgaaggtaaaccaaacggaacctttatacctaatcctgacaattgtaggcaatattatgaatgcgctaacggccaggcgttcttatttaattgtccaactggaaccatttggaacccggttatcaatagctgcagttattcagaaaaccagtgttagataggtatagtcgaaacggaaattggtcagaatatgcaataaagtggcggtatcaatgttattggagaagccgctttatagataagatattttactatcccattaaccattgtaaattagtcattttagggcttacagtaaataattggatattagtaggtacagttaaaatacttagatgataaataccatacaagagaaattaaacgtttttttatacttttaagggtaaaaaaagtaagctcattaaggcagccttcagttttaattgcacagttcgaactgttcagttaaaagtgacatccatatggtctacacacgttcagttttatcagttgaaataatttttcggttgaagtcacatgttaccagtagagtcaccatggtttcatcggatgatgctgtagcaattattaatctattatgcattttgggaaagagaaaacaaaaaaaaaagtgttgtaaacattgtttattaaaaagacaacaatattcacatgataatttactgaaagagctcagcattgctccaaaagactataataactacactaagcatcaaaattaagcaccaccttggaaatgggacatttttgatgactcgtatttcctaaacctgttgtccgatttgagtgatttttttagtgtaatatagctttgttcttcaaggatatcgacgtaatggtgttattgctagagaggtgagtgtcgttgtgtaccgg

SEQ ID NO: 4516 - DNA, 2416 bp, Diabrotica virgifera
ctcgtgaaaaagcggcgacgactattcaggtgtagattagatacgaaagtcgataaatagcgacaaaatggcgagactggtaaataaacagttcaattctccgattggtctatattcccaacagaacattcaggacgtattggatagggaatcccatctgttagaaaatggtgcagtgggcatcgacttcaacaatccagatgtaggaaaacccaaaaacttacaaaattccgctgtcttgagaatgttagaggaagaggaaaataggcaacgaaacggttacggaccaggcgtcaaacgagtagcttggccaccaccacacgaaactggacaaaacagtccatacatagagcaaaacccagttcagacacaaggtggacctcaatatccctctcaggctgcaggctaccagaataactaccaacaaccaaagccagctccctctaaccaagccttataccaacaacaacgcgcgccattgaaattagacgtgtctcaaggcggatcttcacccttggcttctcctctatctaatcaaagcccacaggcttacagggccccaactccaaacaagaactgggcatctgtacaatctccagtgcatactcctaatcaacctgcctggagacaaagcagcccttccagattccaagctgcgcaccaacctgtgtcccaacaacagtttcttggacaacagtactctggtccttctcaaccaaattatagtcctaaccaaggctcccagcaatatcagcctcctgtaaaccaataccaaccccaacagcaatatcaacaaccacaaaaccaataccagcaaccccaacagcaataccaagctccccaacacaataccaagctccccaacaacaataccaagctccccaacaacaatatcaacctccccaacaacaatatcaacctccccaacaacaatatcagcctcctcaaaaccaatatcaacctcaacagagtcaaaaccaattctctagcgttgcagctcaggctgtaccctaccaatatccttctgaacaacaatatcaaactcaatctactcaacaatatcaatattctcaacaatatcaatcttccgaacagagttaccagtctcaacctcagggttatcagtccgttccacaatcttctcaagttcatagtgttccaatacaggtacaaagacaaacttcaaaacctgtggaacctcccccatctacaatcactctccgtcctcaggctccagtgagccaggctccaccaccagtttacacttctcaaccagccacggcgaccctaaaagtttatgtcaatccgaaaaatttacgaggagacctaaaatggcctccagaagatgtaaagcaaaagatgtacgaagaagctgaaaaccttaatactagtaatagtttcctttctattcaaggtggaaaacatctccgaggagatatgaagtggcctccagaaaacgtcaaggtccaagccgaagaagagaacaggctacgtcttgaattagccaaaggacctgtttgtaggccacgtaaagtgcatagggattacacagagttctttgatcagcatgctctaaattccagttatcccggatacaaaatccctccaggcactcagttctatagagccgaataaatgtattttaggtcttttgttattttctaatttaatatgcttatttgtaagtctcatttgttattaacacatggtctgtataagattaactatctcgttattcgaagaggatgcattatctttgaatctgcttgtacaaaatataaaaacctactcaaaagaacgctcattcaaagataataataatttacaaagatttttcttatacagaagctatgtaaataaatataagccgctacgtttgtgataataacaacctgatgtacctacttacttgattttaaaactaaatttcgctttttaccaaaatgagacagtaaacgaacagaagaatcatatagttctagtgaacattgtaatagagaaaagaggtatggtgtcatttgtcaattgtcatatgtcagttgtcaattgtcacagtggtcagtcgtcaattgtcatatgtcagttgtcaattgtctaagttttctgttcgtctactagacaaatataggtacaaaaggtacttaagctgaactgatttttgagcaaataactaaatgtattatacggaaatgtattttgcaattattgtataaagataataaaaatatgtaaaaaaattcgattttaacctgccgcttaccgaaccctaaaattggtcgactcgactgcttgctattgattgcagcaactattatgtacattattatataataactaggttttaattacttataatgtataaaaaaaattatttgtactgtgtacggcagcaaaaattttaaataaaggctaagcc

SEQ ID NO: 4517 - DNA, 2296 bp, Diabrotica virgifera
ctcgtgaaaaagcggcgacgactattcaggtgtagattagatacgaaagtcgataaatagcgacaaaatggcgagactggtaaataaacagttcaattctccgattggtctatattcccaacagaacattcaggacgtattggatagggaatcccatctgttagaaaatggtgcagtgggcatcgacttcaacaatccagatgtaggaaaacccaaaaacttacaaaattccgctgtcttgagaatgttagaggaagaggaaaataggcaacgaaacggttacggaccaggcgtcaaacgagtagcttggccaccaccacacgaaactggacaaaacagtccatacatagagcaaaacccagttcagacacaaggtggacctcaatatccctctcaggctgcaggctaccagaataactaccaacaaccaaagccagctccctctaaccaagccttataccaacaacaacgcgcgccattgaaattagacgtgtctcaaggcggatcttcacccttggcttctcctctatctaatcaaagcccacaggcttacagggccccaactccaaacaagaactgggcatctgtacaatctccagtgcatactcctaatcaacctgcctggagacaaagcagcccttccagattccaagctgcgcaccaacctgtgtcccaacaacagtttcttggacaacagtactctggtccttctcaaccaaattatagtcctaaccaaggctcccagcaatatcagcctcctgtaaaccaataccaaccccaacagcaatatcaacaaccacaaaaccaataccagcaaccccaacagcaataccaagctccccaacacaataccaagctccccaacaacaataccaagctccccaacaacaatatcaacctccccaacaacaatatcaacctccccaacaacaatatcagcctcctcaaaaccaatatcaacctcaacagagtcaaaaccaattctctagcgttgcagctcaggctgtaccctaccaatatccttctgaacaacaatatcaaactcaatctactcaacaatatcaatattctcaacaatatcaatcttccgaacagagttaccagtctcaacctcagggttatcagtccgttccacaatcttctcaagttcatagtgttccaatacaggtacaaagacaaacttcaaaacctgtggaacctcccccatctacaatcactctccgtcctcaggctccagtgagccaggctccaccaccagtttacacttctcaaccagccacggcgaccctaaaaggtggaaaacatctccgaggagatatgaagtggcctccagaaaacgtcaaggtccaagccgaagaagagaacaggctacgtcttgaattagccaaaggacctgtttgtaggccacgtaaagtgcatagggattacacagagttctttgatcagcatgctctaaattccagttatcccggatacaaaatccctccaggcactcagttctatagagccgaataaatgtattttaggtcttttgttattttctaatttaatatgcttatttgtaagtctcatttgttattaacacatggtctgtataagattaactatctcgttattcgaagaggatgcattatctttgaatctgcttgtacaaaatataaaaacctactcaaaagaacgctcattcaaagataataataatttacaaagatttttcttatacagaagctatgtaaataaatataagccgctacgtttgtgataataacaacctgatgtacctacttacttgattttaaaactaaatttcgctttttaccaaaatgagacagtaaacgaacagaagaatcatatagttctagtgaacattgtaatagagaaaagaggtatggtgtcatttgtcaattgtcatatgtcagttgtcaattgtcacagtggtcagtcgtcaattgtcatatgtcagttgtcaattgtctaagttttctgttcgtctactagacaaatataggtacaaaaggtacttaagctgaactgatttttgagcaaataactaaatgtattatacggaaatgtattttgcaattattgtataaagataataaaaatatgtaaaaaaattcgattttaacctgccgcttaccgaaccctaaaattggtcgactcgactgcttgctattgattgcagcaactattatgtacattattatataataactaggttttaattacttataatgtataaaaaaaattatttgtactgtgtacggcagcaaaaattttaaataaaggctaagcc

SEQ ID NO: 4518 - DNA, 2395 bp, Diabrotica virgifera
gtttataatgtttcatttgtgtcgaagtttacattacgcatgcgcattcttatgtttaaaactttaagattcgttagttagttagaaactattactatagttctcaatctcatgttatacacaaatgttttcggaaaaaaactaccgagaatgttaattccctacattctttaccgtcaaaaggacacggttgcaaaaatttcaaggccaaattggacagcatgctacttagtacatttactcacggtttgaattgaccaggtcaattcttttcgagtcatttgcgagtgataatgttccatttttcaacgaaaaaacaacgtttttggacggtgttccgtaaataactcggagagtaagtattttatcgaaaaaatattcggagcagaaatatagattatgaaaaactgaaaaatctgtgtatgtatgaagtttggagacctagtagaactcctgcaataaactattgccttctcatgcttgctttctattaggacatgatctatcgatttttttacttcgttatcaagcgaagttcatgttaacttatgaatgtctttactattaaaatttgtgccagctattttcattttgttatctgtaacaaattcgatgaacttttccctttctatagatacttatctttctatactttcaccttactctcaagtaatatattctgatatttcttgaaagtctacaactgctttgttgacgatttcggacaccatgaaacccactcgaaaatatatcttgatcaccccactcttgtagaggttgttatcgactatagaaggatataaaatccatctagatactctacgtcaagatttttcaaggtttattaacagaaatactgttagaccaggaaggatctgtttttaggtggatgtgagaggtggctcttggatttttgcggataaagttaggtgataactagggagcggatttatatgcgagcaattttgatgaaatatgcgtatacatatgcagtaaaaaattacgaaatatgcgcaagatatgcacaataatttcaaataatgcgcattttgagaaaccacatatttatctacaataaaataaatgtatcgattttccaatatcttcttgatttttttatggtatcgttgtaaatttgaggtacgtatttttttttcaatgtaattacatcgggaacacttttcttgtaatatgtttccaaaaaacttttaaatatgggtttttacagttttttcaaaggtatgtttgcacaaaccatcgcctcgcataattccgaattaaatttatattgttcattggatgaagtcatcaacgattgtgtactgtccataggtgactgatcaactttcaattcgctcatcttcttgcattttgacttatgtagttctgtcccgacgtgttgtgtaaacgaaaatattcactgagatcttcgctggggtctacgaaaaatatcacatactttttcaaactgtttaaactacttaaaatgttgaggattcagcgaaatattatttactaaagaaaaaagaggaagaaagcaatcttaaaacccaccattttactacatgctttgcaaaataattttccattggtgcaaagaagctggggataggttctgatctgggaataaacctggctagaatctttcggcatattgcactgttcacaaacagaagtatttttacacaaaaactaaacattcgcattgaccgactaaatgtgactaattttactgatttacagaatcttatttaaattttcgttagagaatcgtcaaacgatgtttagagatgtaaatattcttttaaaaatagtgtatttaacatcatacaatcattttatgacggcgtactatacgcactttgtgggtgaagatcgggtgttttctaagaaaaaccgaaaaggtagtgaatgagctgacttcagatagttctcgaaaagatatgacagcatttgcgatggaatattttgtgtcgaattaaaaaaaaattgaattttttcgtttgggcaaaaaagtttttgaatagacacataatatgcaggcttttttaaaaatatgcaaaatttggtaaagttctcaaatatgcgaaatatgcaggcaatatgcatttagcataaaatccgctccctagtgataactttgttaataataataattgaccatgctcctctcaaaatgcccggaacatcaataaaaaaataaaatatccaaaaatttcaaaaaatttatttaaaacgattcattctggaacaaagtcgtacagaaataaaacaaagataattaaattttctatcaaatacgactggttaaaaatgtcttaaaattatcacccttgcagcaaaatagcaacaaatacaaaataaaggggcaaaacaagcctgtcctcattcaatg

SEQ ID NO: 4519 - DNA, 2296 bp, Diabrotica virgifera
gtttataatgtttcatttgtgtcgaagtttacattacgcatgcgcattcttatgtttaaaactttaagattcgttagttagttagaaactattactatagttctcaatctcatgttatacacaaatgttttcggaaaaaaactaccgagaatgttaattccctacattctttaccgtcaaaaggacacggttgcaaaaatttcaaggccaaattggacagcatgctacttagtacatttactcacggtttgaattgaccaggtcaattcttttcgagtcatttgcgagtgataatgttccatttttcaacgaaaaaacaacgtttttggacggtgttccgtaaataactcggagagtaagtattttatcgaaaaaatattcggagcagaaatatagattatgaaaaactgaaaaatctgtgtatgtatgaagtttggagacctagtagaactcctgcaataaactattgccttctcatgcttgctttctattaggacatgatctatcgatttttttacttcgttatcaagcgaagttcatgttaacttatgaatgtctttactattaaaatttgtgccagctattttcattttgttatctgtaacaaattcgatgaacttttccctttctatagatacttatctttctatactttcaccttactctcaagtaatatattctgatatttcttgaaagtctacaactgctttgttgacgatttcggacaccatgaaacccactcgaaaatatatcttgatcaccccactcttgtagaggttgttatcgactatagaaggatataaaatccatctagatactctacgtcaagatttttcaaggtttattaacagaaatactgttagaccaggaaggatctgtttttaggtggatgtgagaggtggctcttggatttttgcggataaagttaggtgataactagggagcggatttatatgcgagcaattttgatgaaatatgcgtatacatatgcagtaaaaaattacgaaatatgcgcaagatatgcacaataatttcaaataatgcgcattttgagaaaccacatatttatctacaataaaataaatgtatcgattttccaatatcttcttgatttttttatggtatcgttgtaaatttgaggtacgtatttttttttcaatgtaattacatcgggaacacttttcttgtaatatgtttccaaaaaacttttaaatatgggtttttacagttttttcaaaggtatgtttgcacaaaccatcgcctcgcataattccgaattaaatttatattgttcattggatgaagtcatcaacgattgtgtactgtccataggtgactgatcaactttcaattcgctcatcttcttgcattttgacttatgtagttctgtcccgacgtgttgtgtaaacgaaaatattcactgagatcttcgctggggtctacgaaaaatatcacatactttttcaaactgtttaaactacttaaaatgttgaggattcagcgaaatattatttactaaagaaaaaagaggaagaaagcaatcttaaaacccaccattttactacatgctttgcaaaataattttccattggtgcaaagaagctggggataggttctgatctgggaataaacctggctagaatctttcggcatattgcactgttcacaaacagaagtatttttacacaaaaactaaacattcgcattgaccgactaaatgtgactaattttactgatttacagaatcttatttaaattttcgttagagaatcgtcaaacgatgtttagagatgtaaatattcttttaaaaatagtgtatttaacatcatacaatcattttatgacggcgtactatacgcactttgtgggtgaagatcgggtgttttctaagaaaaaccgaaaaggtagtgaatgagctgacttcagatagttctcgaaaagatatgacagcatttgcgatggaatattttgtgtcgaattaaaaaaaaattgaattttttcgtttgggcaaaaaagtttttgaatagacacataatatgcaggcttttttaaaaatatgcaaaatttggtaaagttctcaaatatgcgaaatatgcaggcaatatgcatttagcataaaatccgctccctagtgataactttgttaataataataattgaccatgctcctctcaaaatgcccggaacatcaataaaaaaataaaatatttaaaaatttcaaaaatttatttaaaacgattcattttggaacaaagtcgtatagaaataaaacaaagataattaaattttctatcaa

SEQ ID NO: 4520 - DNA, 2549 bp, Diabrotica virgifera
  SmartBlast Evalue=7E-13; Info=Endonuclease-reverse transcriptase n=1 Tax=Bombyx mori RepID=D5LB38_BOMMO
attttaatgacttatttacgctgatatatacatacctatcttgaaagattagcaacgaactacatactgtctgtgtgcgcatgagccagggaattataaaatttcactctcaatcgtaaagaagtataacttcaacaactatacagatcatttattacatgagactatacttggagcatgccttattgctacaaaaagaaccgtttaaaacccattgcttcttcactttcgatcccaattacatataatgcatttcgtccctttaatatgtgtaaccttaagtaatataaataacaattactctttcaagtattaggtggttggaaaaatccttgaaatatttttgaaaattagtgaaaaatttcctgactgtacagtctgttgaaaagaagtgatgtgagaatctctagaaatactttttttcctacaaatttcgttactgtttatttattaaaaaatccacgaggaaaataaacttcctggagctggctgtataccataaattacaaaaatactatgtttttgtaaaatgtatattttaaaatatagcttttacaataaatctagtatttttgtttatttcttactaatttcttattaaaataaaatttgtgggctagctcagaatggatcttcttttccttcatgcaccatgtcctttcagaacgttggtcaccataataactatctgaattgtatttactgcaaccccagcctagcatgcttgtatcaataccataccaatctcgtaagttcttcaaccatgtagtctttcttcgtactggactgtgtttatctgctattttgcattgcataatatatttctagcatcctatatttgggactactcattacatgtgctaaatactccagctttctcttcttgacgcttctttttttaatctcaaccgtctttctgagaccttctagtattgtgtagttccgaatcttctccacccaagaaacttttagaattcttctacagcacaccacttttcgaaagcctcaaggcgatttagatcacttttattcacagtccaggacttgacaccgtaaagtaagaccgagaacacgtagcagcgcagtaggcggatcagcaatgttcattttaggtctccgttacataatacatcagacaaccatttaaaagtggctctgaccttctccactctggatctaattttaccgtgactatctgcattataattcaattgatatacaaagaacaaatttgatctactaactcaagtgtgctactatttacatatatacacggttttatattctgtagattatttattacgaatattttggctttccgtatcttcagatcccgatctgcttccttacagctctgccgtcctcaaataaaacgcggtatatgcagcctaattaaaaccgagaaatcgactctcaaagttttttctcaggactatatgttttgacaactttttaacgcaaaacatgttctaataatagttgaacattatttaaaaatatatgcttaaaaaatcctgtttttatcaaagctgtaaataaaaagtcatataccgcgttttaattgagcagcggacatattactggatcagaaattgtgccgtatctgcattttatttacaaataggattttttacaaggaataatagttaccaaaaaagaaaaataaatagcttataattgtttattttatacgcaaaatacctacatgtcataaatgttcaaaatacgaggtggcaacacgagtctcgataaaaacgcggtaaatgcgctgtgctcaattaaaactcactagcacataccgctttttagttgagtactttgtagataccgcattttaattaagcagctattgaaatttagcacatacggcatattccaatttgtttattttggtagtaaataaaatgatacggctttcagacattgcagaagcataaataaggtcacaaggaaaccacatatagcaaaaactcgatttcaattttttttgcagataccgcgttttaattggggacggcagagctgtcaacgacactgtcaatccaagacaggatcacttaaccgtaaccaagtgaagacatagttgaaggcatgagatttttttataattttcgttataattcctgcacgcctgtaaagtattaacaatgtgtaccaacactgtgcggtctttataactttaaagacattaactgatcaataaccgaaataacgatttttgtaggaaaaacagtacaaatatgttatggtcttaatagacaatataaaaaaattcatcttaaaagttgttaactgcgtagctttctgtgatgtcaaaaatatttcaatgaacgtcaaaagtgatatatagggactgtaataaagtataggaataaagtttacctaacgatgtataaagtatttattttgattagttttaaggtaaatcttaggttttttagtggtattactattaaaatgttgtgtatatatattttgcttcgagtattgttttagtgaaatattgagaactatcgatagttttgttgcaggttaaaataaatatatac

SEQ ID NO: 4521 - DNA, 2106 bp, Diabrotica virgifera
  SmartBlast Evalue=6E-13; Info=Endonuclease-reverse transcriptase n=1 Tax=Bombyx mori RepID=D5LB38_BOMMO
attttaatgacttatttacgctgatatatacatacctatcttgaaagattagcaacgaactacatactgtctgtgtgcgcatgagccagggaattataaaatttcactctcaatcgtaaagaagtataacttcaacaactatacagatcatttattacatgagactatacttggagcatgccttattgctacaaaaagaaccgtttaaaacccattgcttcttcactttcgatcccaattacatataatgcatttcgtccctttaatatgtgtaaccttaagtaatataaataacaattactctttcaagtattaggtggttggaaaaatccttgaaatatttttgaaaattagtgaaaaatttcctgactgtacagtctgttgaaaagaagtgatgtgagaatctctagaaatactttttttcctacaaatttcgttactgtttatttattaaaaaatccacgaggaaaataaacttcctggagctggctgtataccataaattacaaaaatactatgtttttgtaaaatgtatattttaaaatatagcttttacaataaatctagtatttttgtttatttcttactaatttcttattaaaataaaatttgtgggctagctcagaatggatcttcttttccttcatgcaccatgtcctttcagaacgttggtcaccataataactatctgaattgtatttactgcaaccccagcctagcatgcttgtatcaataccataccaatctcgtaagttcttcaaccatgtagtctttcttcgtactggactgtgtttatctgctattttgcattgcataatatatttctagcatcctatatttgggactactcattacatgtgctaaatactccagctttctcttcttgacgcttctttttttaatctcaaccgtctttctgagaccttctagtattgtgtagttccgaatcttctccacccaagaaacttttagaattcttctacagcacaccacttttcgaaagcctcaaggcgatttagatcacttttattcacagtccaggacttgacaccgtaaagtaagaccgagaacacgtagcagcgcagtaggcggatcagcaatgttcattttaggtctccgttacataatacatcagacaaccatttaaaagtggctctgaccttctccactctggatctaattttaccgtgactatctgcattataattcaattgatatacaaagaacaaatttgatctactaactcaagtgtgctactatttacatatatacacggttttatattctgtagattatttattacgaatattttggctttccgtatcttcagatcccgatctgcttccttacagctctgccgtcctcaaataaaacgcggtatatgcagcctaattaaaaccgagaaatcgactctcaaagttttttctcaggactatatgttttgacaactttttaacgcaaaacatgttctaataatagttgaacattatttaaaaatatatgcttaaaaaatcctgtttttatcaaagctgtaaataaaaagtcatataccgcgttttaattgagcagcggacatattactggatcagaaattgtgccgtatctgcattttatttacaaataggattttttacaaggaataatagttaccaaaaaagaaaaataaatagcttataattgtttattttatacgcaaaatacctacatgtcataaatgttcaaaatacgaggtggcaacacgagtctcgataaaaacgcggtaaatgcgctgtgctcaattaaacgcggcaagtacatggtactcgctagcacataccgctttttagttgagtcctctgtagataccgcattttaattaagcaactattgaaattcagcacatacggcatattccaatttgtttattttggtagtaaataaaatgatacggctttcagacattgcagaagcataaataaggtcacaaggaaaccacatatagcaaaaactcgattttcaattttttttgcagataccgcgttttaattgagaacggcagatttgtcttgttgattttttctgattgcatgtctttcttggatatttaccatgttttattccatccca

SEQ ID NO: 4522 - DNA, 2352 bp, Diabrotica virgifera
  SmartBlast Evalue=2E-99; Info=Nubbin n=1 Tax=Tribolium castaneum RepID=D2A2H9_TRICA
tacacacatatagtgaatggaataaattttaaatattcagttatactaatatcttacaatatgacatctcttttatcagcgttgaatagtaatagtaatatgccgcatagaaattattataattatgcgaactttgatacaaatcaaccccacttcatgccaacttatttatctgaaccacgaccaaatacaaggcttgaaaagactccctcaacccctgcatcacataatgatggagatatcaatggtgatgttagtggagatgatcaaagtatcgccagtgatcacgaccaaaacgatgaaaattccatggattcggagaggggcggtgcgttaaattttggtacgaccgagtaacgaacaacctaggatatccacgccaaattcacaagtaacaagttccagtcctggagtaggagcagccctggcggcgttaggaagtctcggtggaatcttcggcaatcacttacaaatgttaggaagcttaccagctttccagagtccgcagagcctgcaacagctgcagcagctggcgatgctgcagcaggctagcggcaaccagatgaatccgcaggctcagtttttatttcaaaatcagggttttctacaagggttccctagaacaagtataccttctagacccccacatacaatgcaggtacaacaaatagcacaagctgcccagcaactacagcaactgcagaaagtacagcaaaacacaaaccaacacaataccagcattcctcaaaatacgacgttacctcatcaaacgcagaccacgcctccaaacaaccacaatatacctgccagcatgcttactccaagcacgcctagttctggtggacttacgccgcagcatcttaaaacaccctcaaggatactggaaccatctccagaagaaaccacagatttggaagaacttgaacagtttgcgaagacgttcaaacagagaaggataaaactaggatttactcaaggagacgtaggtttagcaatgggaaaactgtacggaaacgatttttctcaaaccacaatttctcgatttgaggcattaaaccttagttttaaaaatatgtgcaagctaaagccccttctgcaaaaatggttagaagacgccgacagcacattaacaaaccctgggtccctcagcaatcctctaactacaccagaaacgataggaaggcggcggaagaaaaggacctcgatagaaaccagtgtgcgagtagccttagaaaaggcttttgttcaaaatccaaaacctacttccgaagaaataacgatgttggccgatgggctctgtatggagaaagaagttgttcgagtctggttctgtaatagaaggcagaaagagaaacggattaatccacctacatcagtgatgggctcaccttgttctgttggtaacaccaatggaaatatgtttcatatcgctaatagtttagcaactagtcctctttcactcgttacgtcaagtggccataactacaatcatccgaacgtcatggtcaagcaagaatgaccatcactgaacttttttgctgaccattttttagagtagcatggtcttttgttgtgcaatgattttaaatatcaatgatcccggtttttgtgtactttttaaaaaggatagctttgaatcaggtactttgaatcactttctcgattaagtgatatgcctgaacgcgtgaccagatatctcataacgcgacagttcgtaaccgcacaaatggtaacggacaattcgtaacgccgaaaattcgtaacggcgaaacgccgctacgaatttttggcgttacgaattttccattaccattggtgtggttactaactgtcgcgtctcgagatgtcgtggaaccgcctgaacgtactaaactgattaaacctactaatagtgtaattttttcaataaaagaatcattttattgagaaatttttgtaaaatcttttgtaattattaatatttctagattcattattatttggtttttgccagttttgtaagaacttgtatagagattctttgactttaatcgaaaatgtaaaatacaccctgaagtatttaaggttgacatctttatgcagtatttgaaaacttttgtttttagatctcagtgcatttatttatatcaactaagggttactgcgacgatattttaataaaaaaaaattaatttatgattttgcaagagtttatttcttttctttatgcgtctttcgagtatccctaaacatttcatctaagtttctctaggtaagacaattgggactgtattattttatgtagattgtaatttaaaatacgagtttcttttggttataaagaactttttaaacattaccaagacacaaatg

SEQ ID NO: 4523 - DNA, 2292 bp, Diabrotica virgifera
  SmartBlast Evalue=2E-99; Info=Nubbin n=1 Tax=Tribolium castaneum RepID=D2A2H9_TRICA
tacacacatatagtgaatggaataaattttaaatattcagttatactaatatcttacaatatgacatctcttttatcagcgttgaatagtaatagtaatatgccgcatagaaattattataattatgcgaactttgatacaaatcaaccccacttcatgccaacttatttatctgaaccacgaccaaatacaaggcttgaaaagactccctcaacccctgcatcacataatgatggagatatcaatggtgatgttagtggagatgatcaaagtatcgccagtgatcacgaccaaaacgatgaaaattccatggattcggagaggggcggtgcgttaaattttggtacgaccgagtaacgaacaacctaggatatccacgccaaattcacaagtaacaagttccagtcctggagtaggagcagccctggcggcgttaggaagtctcggtggaatcttcggcaatcacttacaaatgttaggaagcttaccagctttccagagtccgcagagcctgcaacagctgcagcagctggcgatgctgcagcaggctagcggcaaccagatgaatccgcaggctcagtttttatttcaaaatcaggtacaacaaatagcacaagctgcccagcaactacagcaactgcagaaagtacagcaaaacacaaaccaacacaataccagcattcctcaaaatacgacgttacctcatcaaacgcagaccacgcctccaaacaaccacaatatacctgccagcatgcttactccaagcacgcctagttctggtggacttacgccgcagcatcttaaaacaccctcaaggatactggaaccatctccagaagaaaccacagatttggaagaacttgaacagtttgcgaagacgttcaaacagagaaggataaaactaggatttactcaaggagacgtaggtttagcaatgggaaaactgtacggaaacgatttttctcaaaccacaatttctcgatttgaggcattaaaccttagttttaaaaatatgtgcaagctaaagccccttctgcaaaaatggttagaagacgccgacagcacattaacaaaccctgggtccctcagcaatcctctaactacaccagaaacgataggaaggcggcggaagaaaaggacctcgatagaaaccagtgtgcgagtagccttagaaaaggcttttgttcaaaatccaaaacctacttccgaagaaataacgatgttggccgatgggctctgtatggagaaagaagttgttcgagtctggttctgtaatagaaggcagaaagagaaacggattaatccacctacatcagtgatgggctcaccttgttctgttggtaacaccaatggaaatatgtttcatatcgctaatagtttagcaactagtcctctttcactcgttacgtcaagtggccataactacaatcatccgaacgtcatggtcaagcaagaatgaccatcactgaacttttttgctgaccattttttagagtagcatggtcttttgttgtgcaatgattttaaatatcaatgatcccggtttttgtgtactttttaaaaaggatagctttgaatcaggtactttgaatcactttctcgattaagtgatatgcctgaacgcgtgaccagatatctcataacgcgacagttcgtaaccgcacaaatggtaacggacaattcgtaacgccgaaaattcgtaacggcgaaacgccgctacgaatttttggcgttacgaattttccattaccattggtgtggttactaactgtcgcgtctcgagatgtcgtggaaccgcctgaacgtactaaactgattaaacctactaatagtgtaattttttcaataaaagaatcattttattgagaaatttttgtaaaatcttttgtaattattaatatttctagattcattattatttggtttttgccagttttgtaagaacttgtatagagattctttgactttaatcgaaaatgtaaaatacaccctgaagtatttaaggttgacatctttatgcagtatttgaaaacttttgtttttagatctcagtgcatttatttatatcaactaagggttactgcgacgatattttaataaaaaaaaattaatttatgattttgcaagagtttatttcttttctttatgcgtctttcgagtatccctaaacatttcatctaagtttctctaggtaagacaattgggactgtattattttatgtagattgtaatttaaaatacgagtttcttttggttataaagaactttttaaacattaccaagacacaaatg

SEQ ID NO: 4524 - DNA, 3004 bp, Diabrotica virgifera
gaactaataaagatggatatacatttatttacaaaatagtagattggacaaaaccaggtctcactgtaggcacatgctgtggtgtgatagtcttcttgattattcttcatctgcttatgttcctaatttcttcctggagaagaagtcttcaagaaaaacattgcggaaaggaagtcaatgataataagatggattccaaacagcaagctgcatatgtaaatgaagctatgtcaaacgatatagtttgatgatatataatttgatgaggagcatagttagttctgtcgtgccatatatacagctagttgcagacttttcgcacgaattaaatttattatatccaactataatattggatataagagtagaatatatccaatggatatattctactatatttaccaaaacatatatttgttttacaaatctatcggtatttttgtagaccacatatcattttaaatttttagtgtcatgtttgaccaaggactcattttagaagacacaatttacccataacagaatccgaccctttataaagggcgctttacagcttgcaattctacctgcaagacgcaagaaagttgcctaaaggcatgcgcagtatggcgtcagttgattattgcatgcaacttcttgcaattgcgcgataatcggtttggtgccattttttctgcaagttttcatgcaagtctaggggaatttgatttttccacaatatcaaatgtcattgacgacaaggattcacgaatacatgccgatcggctgttttctgtttgtgaaatatatcaacgatggaaatgaatgaataatgaaatggcactttctgagattctataattattgtaaattgtatattaagttacgggagctctctctcctctagctaagtaccttaggataataattaatttgtgtttcgcagaaatattatttcgaaatatagatttctttgtaattgttcaatttttccctagggtttattaaaatgtacattcattcctagaaaattagagtcattttcatcatctacttggataaattcttctgttggagatacattattacccctcttcttgttcaactaagatcttactcaccatctccgatctcgggcgttctaaattagtgacgaaaaggctggctgcagcaatagttaatacttaaagttgctggtaccgcctttttccttttatatttggttatttctgatagtcttggcatttcgaaatttaccaagttaaataaacagcaataaagtaattaaaaaaaaacaaaagtttataagttaggttaagggtaaaactttcaaattgcatgcaagccggattgcaagctgtaaaagaccatgcaatagacttgcatgaaagtcttgcatgcaaaaaattgcagcaagttttcttgcaagctgtaaagcagtcttaaccattacctgcacgcgtcctggccctagtcccgcatgcccgcatgtgaactttctagtcttccatgcctatcttgatatatacgaaaacagtttctttcaggtatatatattctctcaacaattttctttacctcaatttcccaagaaatgaaagaacggcacattcgacctaatagtcttttaagccacccgtacaagttgtttactagcataatatgtgtaatgggaagaaacttggagatctagagacctagggaaaatgcaggatttcaaaaaggaaccaacgaccatctacaaaacatgaaaaccattattcacaaaatagtggaatacggcaggcttttttctagtcttgactgattttctaaataaaaaggaggcaaccacttttaaattgcatagaaacagtaagtatttacaaagaaaatgttgaatcagacaatgatccaaaatcacctaaactttttgattaggttctggaatgacaaatgatatgctacatccattcattaagacaattgtaaagcatggtttaaacataaacatatcttacactatcatgattacaaattgagtagtcaacagcacgttaaaatcaaaaataaaacgcatgagatatgatttacagagaaatccaaaaccatcaattaaaaaggcgaatctgtcttcgataataggttaggttcaatattagtgggtgtataatcacccttccttccactcgacctaataggtgtgttgtgactgattcccaggctaaaagttgttccttcagcccagcgtttttaacaaagtctattatggtctttggtaacacttttacgaagtctcaaatgtattggaccttatcctatctaaccctgtgtagttgtacaaaacgtgttctgccgtctcgacaaaatctgttagagacctacgatgattttcaggtcattcctattcatatcagcagatctttagatctcgtcttcaaaggttcatgtctaaaagccttgccatttggtcgtaccagtggttaggctttatccattccacctagtcctatattatatgttcttttggttgtgcttcttgctatgctaacgacaggttttgggacagtgtcatgtctggaatgagcagtctatggaaaactacgaaacattttaaagatagctgataagtttgaaaagaaaagtgtatgatcagtgtctaccagtggaccagacagaggcacagtaaaaaattaaaacagataaacaaaaagttaaatacaaacgacataaacaagagaactaaagtaacttacatcgtttaaagcatggctaaaataaaatgaagttggataggataaatagaatgagagatggccgatggataaataatagactgttggaatagcatgggacagacgacaactacgtctggcgatagagtgatgacttttaaataaaaaaaaaattgtgtgagaacggggcatgatggtagaaacaaggagatggaattcacatttaaaaaataattaattaattaatgttattacttttttgtgccctttaaaccaaaatttggcacaatcaaataataaattttcgttaa

SEQ ID NO: 4525 - DNA, 1622 bp, Diabrotica virgifera
gaactaataaagatggatatacatttatttacaaaatagtagattggacaaaaccaggtctcactgtaggcacatgctgtggtgtgatagtcttcttgattattcttcatctgcttatgttcctaatttcttcctggagaagaagtcttcaagaaaaacattgcggaaaggaagtcaatgataataagatggattccaaacagcaagctgcatatgtaaatgaagctatgtcaaacgatatagtttgatgatatataatttgatgaggagcatagttagttctgtcgtgccatatatacagctagttgcagacttttcgcacgaattaaatttattatatccaactataatattggatataagagtagaatatatccaatggatatattctactatatttaccaaaacatatatttgttttacaaatctatcggtatttttgtagaccacatatcattttaaatttttagtgtcatgtttgaccaaggactcattttagaagacacaatttacccataacagaatccgaccctttataaagggcgctttacagcttgcaattctacctgcaagacgcaagaaagttgcctaaaggcatgcgcagtatggcgtcagttgattattgcatgcaacttcttgcaattgcgcgataatcggtttggtgccattttttctgcaagttttcatgcaagtctaggggaatttgatttttccacaatatcaaatgtcattgacgacaaggattcacgaatacatgccgatcggctgttttctgtttgtgaaatatatcaacgatggaaatgaatgaataatgaaatggcactttctgagattctataattattgtaaattgtatattaagttacgggagctctctctcctctagctaagtaccttaggataataattaatttgtgtttcgcagaaatattatttcgaaatatagatttctttgtaattgttcaatttttccctagggtttattaaaatgtacattcattcctagaaaattagagtcattttcatcatctacttggataaattcttctgttggagatacattattacccctcttcttgttcaactaagatcttactcaccatctccgatctcgggcgttctaaattagtgacgaaaaggctggctgcagcaatagttaatacttaaagttgctggtaccgcctttttccttttatatttggttatttctgatagtcttggcatttcgaaatttaccaagttaaataaacagcaataaagtaattaaaaaaaaacaaaagtttataagttaggttaagggtaaaactttcaaattgcatgcaagccggattgcaagctgtaaaagaccatgcaatagacttgcatgaaagtcttgcatgcaaaaaattgcagcaagttttcttgcaagctgtaaagcagtctttaaaaacgctagagataattatgatttatttaattaaaaggataatatacattattttataaatttttatagaacctttttgttaagcttcaaattctttttaccttcaaattcttttttggttgcttgttacaaatctttatatgtattttcaaacaatattttctgtactctacatttctccctcatttgtagaggt

SEQ ID NO: 4526 - DNA, 2329 bp, Diabrotica virgifera
  SmartBlast Evalue=1E-140; Info=WD repeat domain phosphoinositide-interacting protein 2 n=1 Tax=Camponotus floridanus RepID=E2AP41_9HYME
atgatgctttttcttcgtaacttttttgtttgtgtaaataaggagatatgttaaagttgtacttcaaaaattagtgttataaatggaattctttagtttactagtgagttctttatatgtcaaaaacaaatttctttttgagaaatctgaactagagatggtttacagctgattaacgctatattacagtacattttatagctaaataaattgataaatctctaaacttacttccttaatttttagatctctaaagttactgtgagcgtgtaatgggaacccaattgagattcactattcaaactagaactaaacatttgaatttgttcaccaaaaataagaatgtggttgctaaaattgcttgtaagtcaaggttgtaaggtggtaaaacattgttaaggataactggacaacagtttaagaaatatctatatttagataaagttttacaaaaaaaaataaaacgattacgccatattgaactttctgctctctttatctcactagtatatacaaatatggcggcgatatgttaagttggcatcaagtatttatgtattttgaaatgaattgttatgttatgatacacgatattcatctaatgatgtcgtttaacatttgaaataaaatataactcgaaaaaatgatgattgatgtattgtttgtttacactgaatatttagtaccctttagcggttctaaaagtcactgataatgttcccgaaatgacaagacccattcacttcggtcgaaacaccgagaacaaagtcctcttccagcatacagacgataaggtggatgaataaaataaaaatgcaagtgagttggaacctctcctttgctgatagttgcagcgaggtcattccggcgacgtagatgagtatgtctcaatctgagttctgggttagcggggggtattcctggtcgtcggtgaactgaaacgcgcctttgggcggcgattccgtagctgctgccatctcccggaacttttctgactctgacatttggccggatggattgcctttgacgatgccagcgtagctacctagtatgcctccttcgatgttttggggcgccgaggtctttcctatgtccgttttgtcagaggatttgcctgggttctccggggcaccgtctaatcggtgctctttgaacagaatcaggtcgcctccttcgctgggatcgatgttgtacacgtacagagttccgtcttccgtcgctactagcaatctcagctgctgctggattgttgctatcgagatcacattcttgacaccgtagaaaggcaagtgcgccgtggcaaaagctctaccttgggtaaaaacgtccgtcacttgtgtgggaaggtaagtcgtcaaatatcccatccaactgctttcttctacgctccttctaggactatcctttggttcctctaatttaaatatatgtacagtttccgtattactgctacagctcaagaattggccgcacaaactgaacgctatacacgatatggcaacgcagcgtttcactcctctcctgaactcgtacaattttgaagcgtctattacagaaaacactcggatcacagttcctttctctgacgccgtagctatacgggtaccattcgggctgaacgccaacgcagctaatgggctgtcgtgcgcgtggatcatagttttcgcgtgcagattaatggcatcgaaaatctgtacttcaccaataatcgaagatcccggatatgctatgaaacagttatcagaggttatacttaaagcacaaagacctaaaggatttggaggtgtgtccctaatcgtatgaagaactttcatatctctaatgttatggatatacaaactctcttcgagacatactacaagtcgagctctgttaagtttgacggccaaaatagtgttggaataggaataattacaaatttccgttcctttcttgaaatggcacaccttcagctttcggggggcagccagagagaccaccgcgaccaaactactgctgaacagcctttccacaaggcacgtgtcctcggtgcaattgctatatatttgttcgagtgtgtcgacaccgctaagagaatacagacgataccctgttctgctacccactgctaaagatgtgctatcctggttgaagtttacaaaataatttttggatccatttgagtcagaagaacctgtgctattcatgagtccgaagaaggaaaacacttttgtagaaactgcgtgaaattcaacgaagatatttttattaaaatctgtacacttccaagtaccaaaaacttcaaaacaattttatactcgcacaaagactgaccttgcaattactaaac

SEQ ID NO: 4527 - DNA, 2272 bp, Diabrotica virgifera
  SmartBlast Evalue=1E-140; Info=WD repeat domain phosphoinositide-interacting protein 2 n=1 Tax=Camponotus floridanus RepID=E2AP41_9HYME
atgatgctttttcttcgtaacttttttgtttgtgtaaataaggagatatgttaaagttgtacttcaaaaattagtgttataaatggaattctttagtttactagtgagttctttatatgtcaaaaacaaatttctttttgagaaatctgaactagagatggtttacagctgattaacgctatattacagtacattttatagctaaataaattgataaatctctaaacttacttccttaatttttagatctctaaagttactgtgagcgtgtaatgggaacccaattgagattcactattcaaactagaactaaacatttgaatttgttcaccaaaaataagaatgtggttgctaaaattgcttgtaagtcaaggttgtaaggtggtaaaacattgttaaggataactggacaacagtttaagaaatatctatatttagataaagttttacaaaaaaaaataaaacgattacgccatattgaactttctgctctctttatctcactagtatatacaaatatggcggcgatatgttaagttggcatcaagtatttatgtattttgaaatgaattgttatgttatgatacacgatattcatctaatgatgtcgtttaacatttgaaataaaatataactcgaaaaaatgatgattgatgtattgtttgtttacactgaatatttagtaccctttagcggttctaaaagtcactgataatgttcccgaaatgacaagacccattcacttcggtcgaaacaccgagaacaaagtcctcttccagcatacagacgataaggtggatgaataaaataaaaatgcaagtgagttggaacctctcctttgctgatagttgcagcgaggtcattccggcgacgtagatgagtatgtctcaatctgagttctgggttagcggggggtattcctggtcgtcggtgaactgaaacgcgcctttgggcggcgattccgtagctgctgccatctcccggaacttttctgactctccttcgatgttttggggcgccgaggtctttcctatgtccgttttgtcagaggatttgcctgggttctccggggcaccgtctaatcggtgctctttgaacagaatcaggtcgcctccttcgctgggatcgatgttgtacacgtacagagttccgtcttccgtcgctactagcaatctcagctgctgctggattgttgctatcgagatcacattcttgacaccgtagaaaggcaagtgcgccgtggcaaaagctctaccttgggtaaaaacgtccgtcacttgtgtgggaaggtaagtcgtcaaatatcccatccaactgctttcttctacgctccttctaggactatcctttggttcctctaatttaaatatatgtacagtttccgtattactgctacagctcaagaattggccgcacaaactgaacgctatacacgatatggcaacgcagcgtttcactcctctcctgaactcgtacaattttgaagcgtctattacagaaaacactcggatcacagttcctttctctgacgccgtagctatacgggtaccattcgggctgaacgccaacgcagctaatgggctgtcgtgcgcgtggatcatagttttcgcgtgcagattaatggcatcgaaaatctgtacttcaccaataatcgaagatcccggatatgctatgaaacagttatcagaggttatacttaaagcacaaagacctaaaggatttggaggtgtgtccctaatcgtatgaagaactttcatatctctaatgttatggatatacaaactctcttcgagacatactacaagtcgagctctgttaagtttgacggccaaaatagtgttggaataggaataattacaaatttccgttcctttcttgaaatggcacaccttcagctttcggggggcagccagagagaccaccgcgaccaaactactgctgaacagcctttccacaaggcacgtgtcctcggtgcaattgctatatatttgttcgagtgtgtcgacaccgctaagagaatacagacgataccctgttctgctacccactgctaaagatgtgctatcctggttgaagtttacaaaataatttttggatccatttgagtcagaagaacctgtgctattcatgagtccgaagaaggaaaacacttttgtagaaactgcgtgaaattcaacgaagatatttttattaaaatctgtacacttccaagtaccaaaaacttcaaaacaattttatactcgcacaaagactgaccttgcaattactaaac

SEQ ID NO: 4528 - DNA, 2725 bp, Diabrotica virgifera
  SmartBlast Evalue=2E-69; Info=Polyprotein n=2 Tax=Pectinidae RepID=A2TGR5_MIZYE
tttgcacctgataaaagcctaccagttttaagtgcaacaagaatgcaacattatgcaattttcttacaaggtttgaattatgacattcgttacaaaaatacagattctcatctcaatgctgacgcactttcacgtctacctataaaatcagaacaaaatttcacacatgatgagccagatatttttgaaataaatcaaattgaaactttgcctacaaatattagagatctagcttttcatacaaaaaatgatcataccttaaaaaaattacttgttgggttaaaaacaggaaaacctgttgataaacgatttagcttcaatataaatcaagctgaattttcattacaatctgatgttattatgagaggacaaagagtagttatacctactaaattgagaaataaaattttgacagaattacatactgcacattttggaatagttagaatgaaatctttagctcgtagttattgctggtggcctcacatataccaggatattgagtcactttgtaaaaattgtttagagtgcaataagcacaagaacaacccaattaaagataattctcatatatgggagccaccaaaattttgttttgaacgagtgcatgctgattacgctggacctttcaatggaggttattattttatattggtagattccttcagtaaatggcctgaaattcattttacaaaaaatactactacaaaaactactattgaaatttgccgaaaaatttttacaacttttggtattcctaaagtttttgttacagacaatggtagacaatttgactctcatgagtttagaacttttatgaaagataatggaattacacaaaaatttactgcaccctaccatcctgcaactaatggacagggagagagatatgtccaaatactaaaaaaatgtttaagggctatgcgaagtgagggaaatgacagggagtttgaattatgtaagctacttatgcaataccgcagaagcccacatacagttacaggtaaaagtccctcagaacttatgttaggaagacaaataaggaatagattagatttacttaaaccttcatgtagtgatagagttacctatactgatatgagtctaagaaactttgatataggaactagggtttccgtgagggattattttcattctaaatggcaatttggcattattgtactcagattagggttattgcattatttaattcagttagatgatggtagaacatggaaacgtcatgtagaccaaatacggcaaattggggaatatactccatctcaaaataatccaacatgttacattccggataccattactcacaatttgattccgagggaggcatcaattccagagcacagtgtctcaccaccacctaccgaagtgattactgatgaatccgaaatttcaaacaatatggaaagttcgaatagtgtacctggggctcaaactgaaactgaggaacccattttaaggcgttccactagagtaaggaaacctgttaccagactgaatttgtaagtacttttacttctagttaacttttgtaattcttggtcaagggaggaggtgttatgttcgtgtaaaactcccttaaccatgaatgtaggttggtactactgtcatctgaacgacagctgtcacatacttaatactgcgatagaaaatggaaaccatgtgcataattctttaaaataaagtattttacatcgagtattatttcattacaaatacttacgtcctttaagtacaaaggacttgacatttggcgacgaggataatggatacaaatattacagacactacatcaactacaacgttccaactacagccggtacaaacacgagttcctcgactacaactgcgatagttgcacctgctacagctccagtaatgtctacacaagtttctacattccagttttccgttgaaccttttaaccagtacagctacaaaatggtccaggtgggtaaaacggctggaaggagcatacaaagtttttaaaattccagaggaaatgaaattgccctatttactacattacatggggtcggaagcatacgatacactgtgcgataaactagctccagaggtccctgaagacaagtcatatgaggatacagttaagttaatggataatttttacaaccctgcaccacttgaaattgctgaaatatttaggtttcaatcaaaaagacaagcagaaggcgaaagtatacaagaatacctacattctctacagaaacttgccataaactgcaacttttccacatatttaaaaagtgctatacgaaatcagtttgtttttggtttacagtcaaagaggattcaagccagactattagaaacaaagggattggacttggaccgagccgtagaaattgcagcaagcatggaaacttcagaaaaggatagtaatcaattttctcacaacaataattacaatcaggctagtataaatgttttaaatgcgaaagcaaaaagttttcataaaaatacaaacactagtaaatttaatgataataatacagtaaataatcatagtagctctcctaataatacttttacaatgtcaaataaccgtaatagggcttgttatagatgcggagacacctcgcatttagccgataaatgtaataaaaagcatttaatctgtaacttttgtaaaaacgtcggacacattcaaaaagtttgtttaaaggcacaacaaaattcacacagg

SEQ ID NO: 4529 - DNA, 1859 bp, Diabrotica virgifera
  SmartBlast Evalue=1E-24; Info="Transposon, putative n=1 Tax= Ixodes scapularis RepID=B7PEP2_IXOSC"
taaactctgctcaagaggtcttagaagtaaatgctggaaattgcaaagataaattttttataaatttaaaagtgaatggtaatattttaaattttgaaattgattctggcgctgctgttacaatcataaataaaaatatatttgaaaaatattttcctgcattacaattacaaaaatcggatgttaaattaactacatactgcaaaaataatttgaatgttttaggtttagtttcagtggaggttgagcaccaggaattaaagcacactctaaagttgtatgtggtggatggtgatggctactcactggttggtcgagagtggatacatgctctggaaatcaatttacatcagatgatggtagaacatggaaacgtcatgtagaccaaatacggcaaattggggaatatactccatctcaaaataatccaacatgttacattccggataccattactcacaatttgattccgagggaggcatcaattccagagcacagtgtctcaccaccacctaccgaagtgattactgatgaatccgaaatttcaaacaatatggaaagttcgaatagtgtacctggggctcaaactgaaactgaggaacccattttaaggcgttccactagagtaaggaaacctgttaccagactgaatttgtaagtacttttacttctagttaacttttgtaattcttggtcaagggaggaggtgttatgttcgtgtaaaactcccttaaccatgaatgtaggttggtactactgtcatctgaacgacagctgtcacatacttaatactgcgatagaaaatggaaaccatgtgcataattctttaaaataaagtattttacatcgagtattatttcattacaaatacttacgtcctttaagtacaaaggacttgacatttggcgacgaggataatggatacaaatattacagacactacatcaactacaacgttccaactacagccggtacaaacacgagttcctcgactacaactgcgatagttgcacctgctacagctccagtaatgtctacacaagtttctacattccagttttccgttgaaccttttaaccagtacagctacaaaatggtccaggtgggtaaaacggctggaaggagcatacaaagtttttaaaattccagaggaaatgaaattgccctatttactacattacatggggtcggaagcatacgatacactgtgcgataaactagctccagaggtccctgaagacaagtcatatgaggatacagttaagttaatggataatttttacaaccctgcaccacttgaaattgctgaaatatttaggtttcaatcaaaaagacaagcagaaggcgaaagtatacaagaatacctacattctctacagaaacttgccataaactgcaacttttccacatatttaaaaagtgctatacgaaatcagtttgtttttggtttacagtcaaagaggattcaagccagactattagaaacaaagggattggacttggaccgagccgtagaaattgcagcaagcatggaaacttcagaaaaggatagtaatcaattttctcacaacaataattacaatcaggctagtataaatgttttaaatgcgaaagcaaaaagttttcataaaaatacaaacactagtaaatttaatgataataatacagtaaataatcatagtagctctcctaataatacttttacaatgtcaaataaccgtaatagggcttgttatagatgcggagacacctcgcatttagccgataaatgtaataaaaagcatttaatctgtaacttttgtaaaaacgtcggacacattcaaaaagtttgtttaaaggcacaacaaaattcacacagg

SEQ ID NO: 4530 - DNA, 2313 bp, Diabrotica virgifera
  SmartBlast Evalue=9E-73; Info=Spindle pole body protein n=1 Tax= Glossina morsitans morsitans RepID=D3TML3_GLOMM
gattcatatctaataataaagcaataaaaagttaattttttgtagttttagggtggttttagctaataaactcattttcaaatatgttttcaagcggtcctaattacccaaaactcaaaacaaaccttagattatcaatatcaagattaaaattgctccagaaaaagaaatcagagttaacggagaagtccagaaaagaaatcgcagactacatagtagcagggaagatcgaaagggccaagatcagagtagaatacatcatcagggaagattatcttgtagaagctttagaagtagttgaaatgtactgtgatttgctgctggcaagattcggacttatttcaaacatgaaagaattggatgatggaatagctgaagctgtatcaagtcttatttgggtggctccacggcttatgtcagatgtacaggaattgaaagtcattgctgatcttttggcaacaaaatacggtcctcaatatgcggaagcctgtagaatagaatccgtcgaatccataagtgctaagttgaagcacaagttgtcaattcaagctcccccaaaacttcttgttgagaaatatatgatagaaatagcaaaatcgtataatgtgccttatgaacctgatgcacagattatggctacagagaaaggacacgatgcactgttaatcgacttatccacaaacaacttgggtggtggtggtatgccccaacctccaggattttttggctacccacaaccacctccgctaccacaatttgtaaatcccatgccgccccaaccatttacttacccggatcagaaaggtaaagaactcaatatcggtccaacagcaccccctacacctccgtttccgtataatattccaccaaatggagaaaaagaagttaatactgacatcggggaggaattaccaacttacagacatctttatccaaatttcgctactccaaagagtgaggaaaaggacgataatgcatcaggagacaatacggaaaaaacagatcaggagaatcctaaagacctgaatctagatgttaatttagagaatagcaacactgcaccaaaacctgctccaagatcaaagctgaacgacaaagtctatgacctaccagaacttccatcagtacccaacatggacccgagccccgaaaaagacgacatcgacttcgatgacctgtccagaagattcaacgagctgaagaagaaacactaaccgctcacacatttatcaaaccaattatttaaccagctccgcgctatgtgatacgcttcctacacttctttgagaaaatcactatagcattctaactttaatgagttatatagtagtttgtagcggtgttatataagaagttgagccgcatatatgccgctttaaaggctccctaactgaaccttgtgtcagttatatatccaatatattttgtactatagttttgtaaatttgttttgggactggaagagatttaactagtattaaaggttacgaatgtgtaactagtggcaaagtacaggttttacaggtttaattgatgtttgttaactatagatctgcaaatatattttttgaattattaatttatgttgaataaaaatatagtgaagggatacatggcctagtctagtaggacctatgtgcgaagtcacctactgtgtttatacaagaaacttaatctaaatatcttttttgtcgttaatatcttataaggagtgatttgatagtactgtagctagcgcatttataaaaacatttcgtaaaacataacacattctgttttagtcaaagacggatgatttgtagtttatgtgcaagtgttgctgtggttatggagcccacgttacactatgttgtgaccttgagatcatactatgacaagagcagaagtcaacaacacaaagatagaaatagcaccacgtgaaacgaagataataatacacatgttttacttgtttatatacaatcgcgacagccttactatgacattaccagaaattgttatcataataattattattaataactgttatcataaggtttgcattatatttgccgttatgtctatatttatattttccactgaaaaagtatttcaagcgcatccaaaacatgaattgctcgatcattcgcttatgccttctttgtgaacaattctttgacattgaaatgtcacaattaagttttgttaaattgcttgtttccatcagtgtaatttctgtcacatgatcgccattcatcgaccatatcgcagacttgttcttgtagattcagagatctttttataaaagagtattaaaagttaaaattcataatt

SEQ ID NO: 4531 - DNA, 2220 bp, Diabrotica virgifera
  SmartBlast Evalue=1E-77; Info=Spindle pole body protein n=1 Tax= Glossina morsitans morsitans RepID=D3TML3_GLOMM
gattcatatctaataataaagcaataaaaagttaattttttgtagttttagggtggttttagctaataaactcattttcaaatatgttttcaagcggtcctaattacccaaaactcaaaacaaaccttagattatcaatatcaagattaaaattgctccagaaaaagaaatcagagttaacggagaagtccagaaaagaaatcgcagactacatagtagcagggaagatcgaaagggccaagatcagagtagaatacatcatcagggaagattatcttgtagaagctttagaagtagttgaaatgtactgtgatttgctgctggcaagattcggacttatttcaaacatgaaagaattggatgatggaatagctgaagctgtatcaagtcttatttgggtggctccacggcttatgtcagatgtacaggaattgaaagtcattgctgatcttttggcaacaaaatacggtcctcaatatgcggaagcctgtagaatagaatccgtcgaatccataagtgctaagttgaagcacaagttgtcaattcaagctcccccaaaacttcttgttgagaaatatatgatagaaatagcaaaatcgtataatgtgccttatgaacctgatgcacagattatggctacagagaaaggacacgatgcactgttaatcgacttatccacaaacaacttgggtggtggtggtatgccccaacctccaggattttttggctacccacaaccacctccgctaccacaatttgtaaatcccatgccgccccaaccatttacttacccggatcagaaaggtaaagaactcaatatcggtccaacagcaccccctacacctccgtttccgtataatattccaccaaatggagaaaaagaagttaatactgacatcggggaggaattaccaacttacagacatctttatccaaatttcgctactccaaagaatagcaacactgcaccaaaacctgctccaagatcaaagctgaacgacaaagtctatgacctaccagaacttccatcagtacccaacatggacccgagccccgaaaaagacgacatcgacttcgatgacctgtccagaagattcaacgagctgaagaagaaacactaaccgctcacacatttatcaaaccaattatttaaccagctccgcgctatgtgatacgcttcctacacttctttgagaaaatcactatagcattctaactttaatgagttatatagtagtttgtagcggtgttatataagaagttgagccgcatatatgccgctttaaaggctccctaactgaaccttgtgtcagttatatatccaatatattttgtactatagttttgtaaatttgttttgggactggaagagatttaactagtattaaaggttacgaatgtgtaactagtggcaaagtacaggttttacaggtttaattgatgtttgttaactatagatctgcaaatatattttttgaattattaatttatgttgaataaaaatatagtgaagggatacatggcctagtctagtaggacctatgtgcgaagtcacctactgtgtttatacaagaaacttaatctaaatatcttttttgtcgttaatatcttataaggagtgatttgatagtactgtagctagcgcatttataaaaacatttcgtaaaacataacacattctgttttagtcaaagacggatgatttgtagtttatgtgcaagtgttgctgtggttatggagcccacgttacactatgttgtgaccttgagatcatactatgacaagagcagaagtcaacaacacaaagatagaaatagcaccacgtgaaacgaagataataatacacatgttttacttgtttatatacaatcgcgacagccttactatgacattaccagaaattgttatcataataattattattaataactgttatcataaggtttgcattatatttgccgttatgtctatatttatattttccactgaaaaagtatttcaagcgcatccaaaacatgaattgctcgatcattcgcttatgccttctttgtgaacaattctttgacattgaaatgtcacaattaagttttgttaaattgcttgtttccatcagtgtaatttctgtcacatgatcgccattcatcgaccatatcgcagacttgttcttgtagattcagagatctttttataaaagagtattaaaagttaaaattcataatt

SEQ ID NO: 4532 - DNA, 2720 bp, Diabrotica virgifera
  SmartBlast Evalue=4E-18; Info=Transposase n=1 Tax=Salmo salar RepID=A8C5I4_SALSA
ggtgacaccgattacccaacacaagtgcactagttttcaataacgctttgtcagctattcaatattattcacaattcacggccaggtcgtgtcagcagtcgagttaatttatagatacagcaaagcatcgcggatcattcttttatcaattatcattcgtgattcagatacattattagacagttagacctcaaacgcaccaactagttactgtggtatttagagttcagcaaatagtgtctacttcatcaacccctatcatagggggtaactactccaactaacataggacgttcctgaggatggagtaccaccataggactattgtagtgttctaaagagtttctgagatatcttgctgttagactggcctcctgatagtgaattgtatttaatgatgaaaaatatcaaagttgttcggattgttacatttctggaaaatagaacaagccgaagggatggggtaagacaattgaatgttagtcgtccagttgtgcagagaacttgagaccagatctcatcaacggcgacacgatatgggacgaccagatctcgttctcactataagacgctaactgctagaatgttccaaaaccatattcagcaagcccacggatcagtaatcagcgtttttactgctcgacaaaggttaacagaacagggattgacagattgtgacacagcaacagggtcattactttctgttgctcccaaaagacgcagacttacatttttggcccgtgaacatgttaattggacagtagacgatttggaaatagtattggttacggatgagtgtgtaatattaatttatggtaaacatgggtcgaaatacagtccatagaagggtttgtaaaggttatgctgcctgtactgccatacctgtttgcttttggtggtggctcagtgtacaggatttatattagcatccaaaaaattaagaacaattcatatcgatttaatttttaaagatcttacacaaacattattgtttatagtagaataactaggtgacattgatgtcacaatgtagggcactcgtttcgagaaagacctagtcagctattttgatattattaatatttcacggtcgattcggtgtcggcaatcataataaaaacaattatgagtttatttatagatacggagaaagtattgcagatcattaattctttattcattatttagacatcaagtagttagaatatagactttgcacaccaactcgttactggtatagttagtgttgataaataaatatatatctggtaatagtgttcgacttaatcaaccccatcatagggggtaactacacccggcaccatatgttttgggcagggatttcttttggagcacatatagatctcgtcttgattgaaaggggcacattaacaacacaccgatacataatgaatatcctacaagatcgtgttatgccatatgctgggtttattggtaatgcaagataatgcgacatcatacacggcaaggattgtaacacagtatcttggtggtattccaaaaatggactggcctgcttaaattccagagcttaatcctattgagaaaatacggagccttttcaaaacgcgtgtaagacgttgtatacctgctccaataacatatgaagagcttcgaagggctctcattgaggaatgaaccacttttacccaaaggagcatccaaaatgtgatcagttttataccaaatcgaatgatgactattatccagaaccctggtggcaacacacattattgaaacgaataacacttgcttttttttgactataaataagaaaaaaaaaaggaataaaaaatttcttgaacgttgtggatggttcgttctctgacgggcagtttatttttaaaatctgggcgcttctcccgatccggaaaagttaatattattctttttgctaccgctaaaatatcacagatggacgtcagcgcttttctatcagcaccacgctaaacgacgaacgagttaaatacttaatactacaaatatttacacgacacaatgcagtcatgtcaagatccgtaatataaaaatcaaaaagattattattcagtcactagcacccaccacataaaaaatctttaaataactctcactccaggctgatcgatacagtcaaacatccatacttcaaaagctactgcaacttttttcttggtcgcagtcattcctaggtcaaattacacatatccgagctcgataaactcaactctttagattaatccaaccgctttacccgatttgatacggaatgactgctcgttttatataccacaaacataaattttcttcaaataaataaaaaatatttatattcaacattctgggacaataaaatctttgtgtaatttcggtctaagtctttatatactttgaattagctgtttaccttcgagcgacaaagctacagaggatacgccaacatcaacactggccaacctactaagagaacgaagctattgaaagttccttcgaaaataatacatagatttgtgttcgaataattattcgaacatgtaaaacatttaaaatattttttaattagttcatctttgaaaggcaacaatgtaaatattatgtaatagtccaagaggcagcgctgaaaaatttctctatgaatttaccaaagctagttatttcacattcattggaaccgaccgaccggctctgtcccatcatacagctgaccgactataataact

SEQ ID NO: 4533 - DNA, 1808 bp, Diabrotica virgifera
  SmartBlast Evalue=2E-18; Info=Transposase n=1 Tax=Salmo salar RepID=A8C5I4_SALSA
ggtgacaccgattacccaacacaagtgcactagttttcaataacgctttgtcagctattcaatattattcacaattcacggccaggtcgtgtcagcagtcgagttaatttatagatacagcaaagcatcgcggatcattcttttatcaattatcattcgtgattcagatacattattagacagttagacctcaaacgcaccaactagttactgtggtatttagagttcagcaaatagtgtctacttcatcaacccctatcatagggggtaactactccaactaacataggacgttcctgaggatggagtaccaccataggactattgtagtgttctaaagagtttctgagatatcttgctgttagactggcctcctgatagtgaattgtatttaatgatgaaaaatatcaaagttgttcggattgttacatttctggaaaatagaacaagccgaagggatggggtaagacaattgaatgttagtcgtccagttgtgcagagaacttgagaccagatctcatcaacggcgacacgatatgggacgaccagatctcgttctcactataagacgctaactgctagaatgttccaaaaccatattcagcaagcccacggatcagtaatcagcgtttttactgctcgacaaaggttaacagaacagggattgacagattgtgacacagcaacagggtcattactttctgttgctcccaaaagacgcagacttacatttttggcccgtgaacatgttaattggacagtagacgatttggaaatagtattggttacggatgagtgtgtaatattaatttatggtaaacatgggtcgaaatacagtccatagaagggtttgtaaaggttatgctgcctgtactgccatacctgtttgcttttggtggtggctcagtgtacaggatttatattagcatccaaaaaattaagaacaattcatatcgatttaatttttaaagatcttacacaaacattattgtttatagtagaataactaggtgacattgatgtcacaatgtagggcactcgtttcgagaaagacctagtcagctattttgatattattaatatttcacggtcgattcggtgtcggcaatcataataaaaacaattatgagtttatttatagatacggagaaagtattgcagatcattaattctttattcattatttagacatcaagtagttagaatatagactttgcacaccaactcgttactggtatagttagtgttgataaataaatatatatctggtaatagtgttcgacttaatcaaccccatcatagggggtaactacacccggcaccatatgttttgggcagggatttcttttggagcacatatagatctcgtcttgattgaaaggggcacattaacaacacaccgatacataatgaatatcctacaagatcgtgttatgccatatgctgggtttattggtaatgcaagataatgcgacatcatacacggcaaggattgtaacacagtatcttggtggtattccaaaaatggactggcctgcttaaattccagagcttaatcctattgagaaaatacggagccttttcaaaacgcgtgtaagacgttgtatacctgctccaataacatatgaagagcttcgaagggctctcattgaggaatgaaccacttttgcccaaaggagcatccaaaatgtgatcagttttataccaaatcgaatgatgactattatccagaaccctggtggcaacacacattattgaaacgagtaacacttgcctttatttttgactataaataaaaaaaaaaacag

SEQ ID NO: 4534 - DNA, 2644 bp, Diabrotica virgifera
  SmartBlast Evalue=2E-59; Info=Reverse transcriptase n=4 Tax= Drosophila RepID=Q6S015_DROME
acatgattttacatgcattttttatgataaggcataataatttttcaagctctacttataactttttacaagacatattatacaatgtccattgtggaagtcgaaacaatattaacaattttatgttacacagaagattttaaaactgaaataccaaagtttttcaggtggtgatatacattattcttaaatattattaatgtaggaattgttctaaagctaatttcttgtggtatcttaatgcaatttactgtttttattgtgaataagccatacgtctactttaagatgagtttatattgtcgtttttatttctacttcggaaattttgagaaagatttccgaagtggaaattgaaacgtcaaaataaacttattttaaagtaaaattgtggcttattcccaataaaaatagtagattgattatgcgaattcttaacttaagatctacagaaacacttatgtaaatagaggtgttatgttaccttatgatttatttaaaactctttgtgttcttggtctgttaagagtaaaacaatttttttaagtaaaagttggtttgaagagattagactcacgtaaatcaatggctgaattgttgtttagagttttgaaattacccattccctcctcatttgccagcatattaagactaatacttccctaagatatttataattttcgtgttttgacttctaccctcatccattgaattggggcaattttggcaatgtttttcctccatcttgctcttggttccatccggtttttttacacaaatttacgtattctgtgacgatctctatattttcttgcaaaaaattgcaagcaattctacttgttcattgacggatagccaatagatatatatctctatagatatctcaagtattcgactggtgagtgcagaggtttggtcggtcatgggggttggcacaaaaaggactagaggtcatctacttcattgattttttgcattacaatggaaaagttgacaatgtttatataagtaactatcagccaaaccccccccccccccaatcccacttcaacctacacgaacaaaataaataaacacatcactgactaaaaaaaaaacaataaaatcattgatgagaaactagccaaaaccctccataattataatggcgctgcccccagattctattgtcttcctaaaattcacaagccccaactaagtatgcgtcctatattatcttcaataaatgctcctaataccaatctagcccaattcttaacggacattctctcaaaagcatacaattacaagaatgacatcaacataactgactctttccagttcagtgattttatcaataattatcagttaccaggagaatatgtactagtaagttttgacgtggtatctttgttttctaatcttccattctccagcgttgtcagttcactccggaaccattggaacgaaatccaaccccacagtccagtatcttgggaaattttcgctgaattattaaaactgacatttgacaccaactatttaatattcgatgacaaattctatcgtcaaatttttggaactcccatgggatcctcgatctcccccattttagtcaatttcgtactcgacgaccttatcaaggagagtatcactaagttagatttccaagttccctttgtgaagcgttatgtcgacgacttaatccttgctacaccacctgataagattttgagcaccttatcagttttcaatagctgcgatacacaccttcaatttacatgtgaattggaggtggataatagcataccttttttagatatgcgaatcatacgcacacaggacaacactttgggtactacatggtacaggaaagaaatggcaagcaaccgtttcttaaattaccattctgcacacccaacgagatacaaacataaccttgtacaagctctaagtcttagagtacatacgctgacacatacgctgtataaagctgaatctctggatctactcaagtccattcttattaataattcctatcccatatccatcattaacaaaataccttttttctaaaagctacggccattccatttctgaagcacctaacggtgaaatattagcctccatttctaacagcattcagatgaacagctccccgataaccccagaaagagccacaaaatatgcttctctcccctattttccacaaattacgaacaaacttaccaaactattcaaaaacttacctgtcaaaatagctctaaaaaacaccaaaaccgtcggaaagttattctctaagtccaaatctccactgaccccgttagaacacaccaatgtggtctatcacataccttgtgcagagtgtaactcctgctatataggtcagaccagccgttcgcttcttggtcggttaacttcgcataaaagcgatattagactttctaagccttcctgtgccctagcacaacacgccatttccacaaacatcagatagacttcacaaaagtcaaaatacttgccaaacaacaaaattatcataaacgctcattccttgaaatgtgtcagatcctcagacacccctctgctctcaataaacgaactgacatcgacaatttgagccaggtataccactctctcatcatacataataaataacatcaca

SEQ ID NO: 4535 - DNA, 1851 bp, Diabrotica virgifera
  SmartBlast Evalue=1E-59; Info=Reverse transcriptase n=4 Tax= Drosophila RepID=Q6S015_DROME
acgatctctatattttacttgcaaaaaattgcaagcaattctacttgttcattgacggatagccaatagatatatatctctatagatatctcaagtattcaactggtgaatgcagaggtttgatcggtcgtggaagttggcacaaagaaaactagaagtcatctacttcattgattttttgcattacaatggaaaagttgacaatgtttatataagtaactatcagccaaaccccccccccccccaatcccacttcaacctacacgaacaaaataaataaacacatcactgactaaaaaaaaaacaataaaatcattgatgagaaactagccaaaaccctccataattataatggcgctgcccccagattctattgtcttcctaaaattcacaagccccaactaagtatgcgtcctatattatcttcaataaatgctcctaataccaatctagcccaattcttaacggacattctctcaaaagcatacaattacaagaatgacatcaacataactgactctttccagttcagtgattttatcaataattatcagttaccaggagaatatgtactagtaagttttgacgtggtatctttgttttctaatcttccattctccagcgttgtcagttcactccggaaccattggaacgaaatccaaccccacagtccagtatcttgggaaattttcgctgaattattaaaactgacatttgacaccaactatttaatattcgatgacaaattctatcgtcaaatttttggaactcccatgggatcctcgatctcccccattttagtcaatttcgtactcgacgaccttatcaaggagagtatcactaagttagatttccaagttccctttgtgaagcgttatgtcgacgacttaatccttgctacaccacctgataagattttgagcaccttatcagttttcaatagctgcgatacacaccttcaatttacatgtgaattggaggtggataatagcataccttttttagatatgcgaatcatacgcacacaggacaacactttgggtactacatggtacaggaaagaaatggcaagcaaccgtttcttaaattaccattctgcacacccaacgagatacaaacataaccttgtacaagctctaagtcttagagtacatacgctgacacatacgctgtataaagctgaatctctggatctactcaagtccattcttattaataattcctatcccatatccatcattaacaaaataccttttttctaaaagctacggccattccatttctgaagcacctaacggtgaaatattagcctccatttctaacagcattcagatgaacagctccccgataaccccagaaagagccacaaaatatgcttctctcccctattttccacaaattacgaacaaacttaccaaactattcaaaaacttacctgtcaaaatagctctaaaaaacaccaaaaccgtcggaaagttattctctaagtccaaatctccactgaccccgttagaacacaccaatgtggtctatcacataccttgtgcagagtgtaactcctgctatataggtcagaccagccgttcgcttcttggtcggttaacttcgcataaaagcgatattagactttctaagccttcctgtgccctagcacaacacgccatttccacaaacatcagatagacttcacaaaagtcaaaatacttgccaaacaacaaaattatcataaacgctcattccttgaaatgtgtcagatcctcagacacccctctgctctcaataaacgaactgacatcgacaatttgagccaggtataccactctctcatcatacataataaataacatcaca

SEQ ID NO: 4536 - DNA, 2928 bp, Diabrotica virgifera
  SmartBlast Evalue=6E-95; Info=Serpin peptidase inhibitor 4 n=1 Tax=Tribolium castaneum RepID=D6W6R7_TRICA
gtgccgacgacgtgagacgcgagttcaaaataccagacttatttacatattattgtattttgttagtagagttgaggaagatgtgcaaagtgttgaaaagtttatgtacatgaattgtagaaactaattgtttattgtgtatcattcgaattcagtttcaaaattaaaagtgtgctagtggagaaaactaaacgataacttctgtttatactgttgtttttatcgtttaacaatggctctctttcttctaggtttgttgttctgcctatctagtcggatctctgccagtggtttctacgaaatcagtaacattgacttctataattctgtttttacagattctcttgattggagattgttacaggagctatcaaaccagtataaaaacgtagtgatatctcccatcagcctaaaatcatattatccctattatatcaaggatctaccggacagacagaaagggaattccaaacacttttaaattatcaaaataaagaatatgtcaggaacaattacagccaaattgtcgctgccctttataatgcagacagaactgaatatatgctcaacattgggacatcgatgtttgtagatgaaggtctatacgttttatctaaatacgaagaccttgcaagaaaaagcttcaaaacagacatcataaagactaactttgacaaacaggaaaaggctagtaaagatattaattcgtgggtggaacagcttactcatggtaaagtgaagaaaatagtcaatgctgatgatctgtcgcaagcactaatgataattaccaatgccatttacttcaaaggaacatggactcgtaaatttgataaaaatagatcaacgcttggaaacttctatacatctcctgataatataagatctagcagaaacttaaaattagttcaatacatgactaccactgacgaatttctttattacgaggacagatctttggatgcgaaaattgtcaggttggaatacaagggaagtgactatgccatgtatatagtcctaccgaacactttgggaggattaagcagccttatcaaaaatgtggacataaacaaaataggaactataaagttccaaatgacacaacaagttgttgaggttactattccaaagtttaagttcaattttgacatcaagttgggaaagattcttcaaaagtttggactacgcgaagcattccaaaacacggccagttttacaggcatcgtgcaaaccaacaggaccttaagaaggagtctatacgtatctgacattgttcagaaatcgggaatagaagttgatgaagaaggaagtgaaatcttctcagcatcagctgtcaacgtgggtaataaattcgccgaaaatacgatgatattcaatgcatcacatccgttcatgttctttgttgatggtcccaacggtaccatattgtttgttggacaatatgaaaatccagatgcggtggacccgtcagaggtaccgaatcgttggagtcaagaagtagaagaaaaaaatcctactgaagctgtgcaattccaaaatactcgcccaagtagaccaaataatgaaattgatcaatccaataatgtacagttccaacagcctcgtccaaatagaccaagtgttgaaagtcaacgacccgacaatgtacaattccaacagaatcgcccaaatagaccaaatactgaaaatgaacagcccagcaatgtacaaggtcttaatttgaatccaaatctggaccccgactactatcaacctccagatgtagaaatggatgagattgcatatagattcaatctgtttgatattgacttattatattccttttctgatttatccacgaacgtattaatatctcccgctagcatcaaaacgacattagcaatgattttagaaggagcagaaggaacttgtgcagaagaaataagtgaagcactgaggatacctgatattaatcaaaaaggtgtcagaagtgttcttgtagaacttctaaataatcttaatgaaagatctacgccaaatagtgtcctagaaagccataatgccatatttgtctctgaaaaacatcgactggttgataattataagaatgtcgttataaagtattacaacgcttacctgaaaagcttagatttttcaaattcagattatgctgctagggtcattaatggatggatatctgactccactcatggcgaaataaccgatgtcatctcaccacaggggatagttcctgattgttacgtggtgctgtcaaacgccctgttctttaaagcacagtggaaatatgcttttgataaaagaagtgtacgaaaatgtttccacactcctaggggatgtgtttatgttgacatgatgcacatttcacataatttcaattacaattacatcacccgtttgcgagccaatgttgtggatattccttatcaggataaattctccatgctactgatcttaccatcttcagattcaaatgtaaggagtgtgattcgggatttacctcactttagactgtcgagcattttggagagtctaaatcaatccgagattgttctagaactaccaacatttagcttcgagtattcagcagatttggttgaatttttaaaacctcttaaaatccgagaaatatttggttcccgcgctaacttaaccaaaatgatagaaggccaccatggtatgataaacaacctgttacacaagaccaaaatcacagtagacgaaaaaggaacaactgccgcagcatcctccagtgccatgataattcccctgatgcagccagtgacagttgcggctgacagaccgtttgtttttatgatctatcacagagacactaaaaatataatctttgaaggaattgtacaaaatcctttagaaaaatagtatctaacattactgataattttttatttaatgtgccgaaaactcatctag

SEQ ID NO: 4537 - DNA, 1546 bp, Diabrotica virgifera
  SmartBlast Evalue=3E-71; Info=Serpin peptidase inhibitor 5 n=1 Tax=Tribolium castaneum RepID=D6W6R8_TRICA
gcgggtgacactggtagtgcttcgcaagagtaaagcagatgtgcaaaaagaaaaatcgttgtttatattttaaacatagtggattaaaatgttgttagttctgtttttgtgtatagcaggattagcagctactgaagctgtgcaattccaaaatactcgcccaagtagaccaaataatgaaattgatcaatccaataatgtacagttccaacagcctcgtccaaatagaccaagtgttgaaagtcaacgacccgacaatgtacaattccaacagaatcgcccaaatagaccaaatactgaaaatgaacagcccagcaatgtacaaggtcttaatttgaatccaaatctggaccccgactactatcaacctccagatgtagaaatggatgagattgcatatagattcaatctgtttgatattgacttattatattccttttctgatttatccacgaacgtattaatatctcccgctagcatcaaaacgacattagcaatgattttagaaggagcagaaggaacttgtgcagaagaaataagtgaagcactgaggatacctgatattaatcaaaaaggtgtcagaagtgttcttgtagaacttctaaataatcttaatgaaagatctacgccaaatagtgtcctagaaagccataatgccatatttgtctctgaaaaacatcgactggttgataattataagaatgtcgttataaagtattacaacgcttacctgaaaagcttagatttttcaaattcagattatgctgctagggtcattaatggatggatatctgactccactcatggcgaaataaccgatgtcatctcaccacaggggatagttcctgattgttacgtggtgctgtcaaacgccctgttctttaaagcacagtggaaatatgcttttgataaaagaagtgtacgaaaatgtttccacactcctaggggatgtgtttatgttgacatgatgcacatttcacataatttcaattacaattacatcacccgtttgcgagccaatgttgtggatattccttatcaggataaattctccatgctactgatcttaccatcttcagattcaaatgtaaggagtgtgattcgggatttacctcactttagactgtcgagcattttggagagtctaaatcaatccgagattgttctagaactaccaacatttagcttcgagtattcagcagatttggttgaatttttaaaacctcttaaaatccgagaaatatttggttcccgcgctaacttaaccaaaatgatagaaggccaccatggtatgataaacaacctgttacacaagaccaaaatcacagtagacgaaaaaggaacaactgccgcagcatcctccagtgccatgataattcccctgatgcagccagtgacagttgcggctgacagaccgtttgtttttatgatctatcacagagacactaaaaatataatctttgaaggaattgtacaaaatcctttagaaaaatagtatctaacattactgataattttttatttaatgtgccgaaaactcatctag

SEQ ID NO: 4538 - DNA, 2532 bp, Diabrotica virgifera
ctataatttatcatttacaattctatacattaaaattaaaatatacaaacttatacggattgattaaaaataaatacggtgtgtatagaaaaaatcaacaaaacctttggttctttttccgttgaggccgttatatatagactaattaatctcttacaagtaaataatagttatcaggaatgttcgagtcttgttacttgaacttttctttcaaaaataatcgctatatatgtactttctacagtcattatatacattattagtataccgatgcaaaaggtcgatgatttggttaatttcagaagcacgaactgtaaaaaaaaacgaacatggctatgagttaaattcaattttaaatcattaaaattgtatttaactcattggcatgtcaatataaagtaaatcaagccgtaatacctagaaggaaagattttagtccaatctggcaacattgctatttaatttaattctgcctatttaaatcgctaccacaccaagctggccatggctctgtgttacattgacagctgtcaatttgtttatcggtgtatagcaacgaactgtcaatactgatggattgagcatgaagcgaatttaatgcgaccaggatgagagagcgatagtcagggaaggtaagacatatttcgtaaacaaaaaaattaatataggtagtcaggattgctagattggggtattttcccacaattttggagtaatttgaaagcgtctagggaatttttctaagcagaaacaattggggggggggggtacaactgtatattatactctcatataatcgaagacgataggacctatgaattatttccagggccctctgtagataagttgtttaataatattggtttactgttctctacatttgactactaatttattaaaatgcggcaaaaatttaaatttgggggatttaagcttcaatttgagggaatttcagattcgaagtgggggatttataaaatcatctggcaactctggtggtagttatagcaaattttccctgacaaattctctgtctctctaggacctctctcttgtatgttggccgcaatctcgcttcactgtatgaatgagacggggccattccatcagtattgacagttcgttggtgtatagacatgaatatttgacaaaatgacgcccagagttttagaagacggtcaatagaattccagtagaccttcgatttctgcctttgaagactaactggtgggaattcgcgagttctaacaaaagatttcttcaacgctgtccacaaaagaatgaagaagtattttgacattctattttagacgcaattgtatcttcgttacagcagtaaaattgtaagtatcagcaataaacattattttagtctaatttggttaaatttttcagtctatccgtttctagttccaaaacttgcctgacacctatgtcaatcacgacatgtagaatccataaaaagtaagtttcggcatacaaagtcatacattcaccggaaaaataaaacggccattcacaaaatgtgtcgtttttgaataaaaagtttcgttcgaagcttttgaatctgaaatactctgcaaagaaaggttcaggatagaatttctcggcattattgccgatatctgacaaaaaaaatagtatatacagtgattagtgcgctaataaccggcaaaacaacgcaaaagtcggaaaccatattaagttgtggaagtttagcgcggtcatcaacgtatattgtattattatttatttactgtttaattcaaagttgtatcccgaatcgccctagaaaaacctctgaatgaaccgttgtttgctggtgatttttttatcaaaacataaacgtttcatacctcaaatacgtcttcaattcttgtgataacttcgaaaataattcaaccatcgactttccacagtaaaagatacatctaacagcagaagtaggccaatatattactagatatcacatttaagtaaatacagttaaaaagttgtgggaagtgaatactgagttgggagaatcccacgggtttataatatactccttcaattcccttaggaaagtgcgaaaataagtgagcgttagtagttggcaatatcagaagttcgtagacggatcagactggatttgcaacatatacatttagtaattaatgcgacagcaacataataataagcatatagttattatcaccaataatccaacatcatttatagcaatttggattgcaaacaggatgatagagctgtactgattcattcaaacttgtctacaactcattagtagagtaaaacaccaatatacttattaaagtacgattttttaaatgtataatttgtaatatctcgagactgttgcaaaaataaagtacttttaagtgaatttatgtcatctgtatacagggtgtttggtaaagaatgggccatagcccaacttcagattcctgaggtcaaaataggtcgattcaagccaacccaccctagtacaaaagtcgataataacccaaatacagggtgccaaagtcaaac

SEQ ID NO: 4539 - DNA, 1906 bp, Diabrotica virgifera
ctataatttatcatttacaattctatacattaaaattaaaatatacaaacttatacggattgattaaaaataaatacggtgtgtatagaaaaaatcaacaaaacctttggttctttttccgttgaggccgttatatatagactaattaatctcttacaagtaaataatagttatcaggaatgttcgagtcttgttacttgaacttttctttcaaaaataatcgctatatatgtactttctacagtcattatatacattattagtataccgatgcaaaaggtcgatgatttggttaatttcagaagcacgaactgtaaaaaaaaacgaacatggctatgagttaaattcaattttaaatcattaaaattgtatttaactcattggcatgtcaatataaagtaaatcaagccgtaatacctagaaggaaagattttagtccaatctggcaacattgctatttaatttaattctgcctatttaaatcgctaccacaccaagctggccatggctctgtgttacattgacagctgtcaatttgtttatcggtgtatagcaacgaactgtcaatactgatggattgagcatgaagcgaatttaatgcgaccaggatgagagagcgatagtcagggaaggtaagacatatttcgtaaacaaaaaaattaatataggtagtcaggattgctagattggggtattttcccacaattttggagtaatttgaaagcgtctagggaatttttctaagcagaaacaattggggggggggggtacaactgtatattatactctcatataatcgaagacgataggacctatgaattatttccagggccctctgtagataagttgtttaataatattggtttactgttctctacatttgactactaatttattaaaatgcggcaaaaatttaaatttgggggatttaagcttcaatttgagggaatttcagattcgaagtgggggatttataaaatcatctggcaactctggtggtagttatagcaaattttccctgacaaattctctgtctctctaggacctctctcttgtatgttggccgcaatctcgcttcactgtatgaatgagacggggccattccatcagtattgacagttcgttggtgtatagacatgaatatttgacaaaatgacgcccagagttttagaagacggtcaatagaattccagtagaccttcgatttctgcctttgaagactaactggtgggaattcgcgagttctaacaaaagatttcttcaacgctgtccacaaaagaatgaagaagtattttgacattctattttagacgcaattgtatcttcgttacagcagtaaaattgtaagtatcagcaataaacattattttagtctaatttggttaaatttttcagtctatccgtttctagttccaaaacttgcctgacacctatgtcaatcacgacatgtagaatccataaaaagtaagtttcggcatacaaagtcatacattcaccggaaaaataaaacggccattcacaaaatgtgtcgtttttgaataaaaagtttcgttcgaagcttttgaatctgaaatactctgcaaagaaaggttcaggatagaatttctcggcattattgccgatatctgacaaaaaaaatagtatatacagtgattagtgcgctaataaccggcaaaacaacgcaaaagtcggaaaccatattaagttgtggaagtttagcgatagaaacctataaactcacattcaattgattgtttcccaccttcagacgtgtcggacgaatttggccactaccaatgtggcagtgacagttttagttgacatactcctctgatgcgtctaaaggtgtgaaacaatcaacaaaatgtaaatttataggtttccatcgctaaatttccacctctag

SEQ ID NO: 4540 - DNA, 3736 bp, Diabrotica virgifera
ctgaggttatccatgtcgaaaaaatggtacatcctggaccacgtcatctcgtaaccgttttgcctggcgagagccacactttcgatcttagtggatctcactataatatgactgtcttacaggtaacaaatcatgaggatggagaggcagtattttctgctgaaggtggaaatgttattcccgatatggagcaaaccatccaagaagaacttccagaacacgttgaacataaagtcgacaacgtacatttggctggtcattcttcaatgcttgttatgagtcaacctatcaacgaaggtgaagaaggaaggcaggatcatttccttgtttctaacaagggaaatgttaaaattgatgctgaggttatccatgtcgtaaggatggtacatcttggaccaagtcatcgtgtaactattctgcctggtgagagccatacatttgatcttagtgatgcacacttccacaatgctcttcttaaagttacaaataatgaacaaggacaagctgtattttcagctgaaggtggtaatgttctagaagatttcgaacagaccgtacaaaaattcgaatatgaagtccaggttatgcaaaaagttgaaaacttacatctagctggtcactcttcgatgttggttatgactagttccaaacaggagggtgcacaagaaagacacttcaaagttactaataatggaaatgttaaaattgatgcagaggttactcatgctgaaaggatggcacaccttggaccacgtcatctcgtaacccttttgcctggccagagccacactttcgatcttagtgaaactcactttaagatggctatcttagaggtgagaaatcatgaggatggagaagcggtattctctgctgaaggtggaaatgttgtgcaccaaatggaggaaagcgtaaaaccagaagaagttccaaatgagcatgtagaacacaaagtggaaaactttcatctagctggtcattcgtcggtcatggttatgactcaaccccccaaacaacaaggtgaagaagagagaaaggatcaatttatggtttccaataacggaaatgtcaaaattgatgctgaagtcacccatatcgaaagaatgatccatttaggaccaagccatcaaaaaactctcttgcctggcgagagtcatacttttgatctcagcggtgctcacttcagattagctgttcttaaaattacaaatcatgaagatgggggaagccgttttttctgccgagggcggtaatgttctgaacggttttgagaacaacgtacagaaagttgaacatcaaacagaagttgtacataaggttgagaacttccacctcccagctgactcctcagtgctcgttatgactcaacctcccaaacaaggaaatgaagagagaaaggattatttccttgtaagcaacaatggaaaggtcaagatcgaagccgaggttactcacgttcaaagaattctacaccttgaaccacgtcatgtggtaactcttttgcctggccagggccacactttcgatctcagtggaattcactttaatatggctgtcttaaaggtgagaaattatgaggatgcggaagcagtcttttcagcagaaggtggcaacgttcttcctaatttagaaaaaaatgtacaaaaattagaacacgttgaacacaaagtccagaacgttcgtctaccagctcactcagccgtgcttgttctagctcaaccagaaaaagagaacgatgaccataggaaggattatttccgtgttagcaacaacggaaatgtcaagattgatgctgaggttgtccaaaacgatcttcaaccaccacataccaaaagccttctacctggcgagagccacacctttgacctgagcggtaatcagttccacttagctcatctgaaagtatccaaccttgaagatgaagaagctgcattctccgccgaaggaggaaacgttcttcacgatttcctaaataacatccagaaggtagtatccgagaagccccaacataaactcgatcatttccttttgcctcctagaagaactgttttggcattatcccagaccggtgttcaaggtgaagaaaacaataagtacacaattaccaaccatggacccgctgatctttttgctgaagttgttcacatgaatcacatctacgatgctcctcattggtacgtcgtcaggccagaagaaaccactgaaattccaataaacgagcatcttcaacgcaatattttacgattgaccaataacagttacaaagacgaagtagtcgtcagtgctgaaggtggtcacgttcttcaagggattgagcaaaacattgaacaactttcaatgacagatagcacaggaactgtattaactaaagtagagaacttctcgttgcctccaagaacccacatcgttgctttgagtcaaaatgttgaaggaagcaacgaacatcctggaaggtttactgtaactaaccatggtaaagctccttttgatattgagttgaaacgtacatcacctgttcaaacacttgaccttcatctcagaacagttcagcctaatgcaactgaatattttgaactcaccgcccaattccaaaataccgtgttggaagttatcaataccagccatactgaaaccgcagtatttacagccgaaggaggggatgttatgcatgatctccaagatgaaattaaaaaactcgacgttcaagaacaaagtacactggacaaaattatagattccttagcaaaccttcgactaaatgcacgctcacgagttttggctttggtatatgatcccaaagatataacatcagcaggagaaaaaggttttactattactaaccacggacaatacgacatagaagccgaggttgtttataccgacagagatgaccgtgacaaagatcaacttaaagtcatcaaaccaaatgaaactgtattgattgagcacgttaaagatgctggaaaggcagtattaaacatcttaaacagaagttacaaggaattgggaaatattactgtcaagggaggcagagtaattcacgaacttgaacgaaaagtaaagaaactggcatctgacaacgaagtagtcctagaattagatcgtttccacttggcacctaactcttcggtggttgttatgcaccaaattggtaaatacaaacgaagattcgaaaactttggtctaacacttagatctaaacttggcggccttcaaaaatccatccaaggggtatatcataaacttgaaggagaaggtgagcaacctcaaggagagaatcaggaacaggaaggtgaacatcaacaagatgaacaccacaaatttgtgggagtacaggataaacaaattcaacgtagacaagttcttcacgatagatataccatcactaactatggatacaacccaattactgttcagatcgttcacctaacaaaagaagacgccgatgatgaagtgcttcgtagccaggtcgtcaaacctaatgaaactcaggagctccttcttgaaggcatagaatcgtcttcgctgaaggttatcaatgaaagttcaaaggacattgctattttctctgcagaaggaggagaggtcattcccggagttgaacatttgattagacaactgcagagaagagaatgtatgaaaagtgttttgtggcgttccagacgtgaacgaagagtttaaataatgtgtacaataatttgattaaagtttttttatagtaaataaatactctacagac

SEQ ID NO: 4541 - DNA, 697 bp, Diabrotica virgifera
ctgaggttatccatgtcgaaaaaatggtacatcctggaccacgtcatctcgtaaccgttttgcctggcgagagccacactttcgatcttagtggatctcactataatatgactgtcttacaggtaacaaatcatgaggatggagaggcagtattttctgctgaaggtggaaatgttattcccgatatggagcaaaccatccaagaagaacttccagaacacgttgaacataaagtcgacaacgtacatttggctggtcattcttcaatgcttgttatgagtcaacctatcaacgaaggtgaagaaggaaggcaggatcatttccttgtttctaacaagggaaatgttaaaattgatgctgaggttatccatgtcgtaaggatggtacatcttggaccaagtcatcgtgtaactattctgcctggtgagagccatacatttgatcttagtgatgcacacttccgcagagctcttctgaaagttataaatcacgaagaaggagaagctgtattctctgctcaaggtggtaatgttctaaaagactttgagaaaactgtacaaaaactggaccacgatgtccaggctgcacaaaaggttgaaaacttccatcttcccgctcattcttcggtgctcgttatgtctcaacttcccaaacagggaacagaagaaagaagagatcacttccaagttacaaataa

SEQ ID NO: 4542 - DNA, 2216 bp, Diabrotica virgifera
  SmartBlast Evalue=5E-23; Info=Endonuclease-reverse transcriptase n=1 Tax=Bombyx mori RepID=D7F170_BOMMO
ccttaaagtcgccaacttatgaaatggcgtaatttgttcctttcatttgcaccatactgtatattatattcagttcttatagttcctactctgtaatctgtatcattgcgctgcgatctcgaagcgcaccagtggtggcgtcaaaaactgagtaatttaattataataatattctagacttatagcagatggaaagtttctttgtattgcctgactggctggctgcttcatatatgtcaaacgaatgacgcttgaaaattatttataaattgtcgaattttcaaatctacaaatatttttcatacaaaggtattcataaacattaataaactcacatttatacgttttttcggcgatctaatacttaacactggttgtagatgtacataaatacttaacactggttgtagatgtatgtacataaattataatacagtgtcagaaaatgggtgcaaatgggtatcgttcttattaaataaataataaaattaaataattaaaacaaagatagataaaaaaattaaaaatcttatacctataaataaggaaacacatcctcaaaaatatttgaaaatatttatttttatatttaggcaaatggtttataagaaatagccaatttcatttacttccgaagcgtataacgtatttagagatattaactactacattttataaatgtttttatattttatatttggcgtttcaaatatatttgttttatttctagtcaaaatgagttctcaaaatacaaattaaatattcttgttgtacaataacttggctatactcataatataataataatataataggtaatataaaaatgtcacacataaattgtttccaaacgtattaaggaattgattaataataaagtaataaaattaaatagaattaaaaaaataaattaaaataagcacaaagtaaatcacacagtcgctgcctattaaaaatcaatacctaccttcttcttctgcttaactggctttagggcttgcggtgaatctacgccgcacacactatagccctccatcttatacgatcttgctcttccatttcccattgttatgccccaatcctacataattcggcttcaacattatcctgtcatcttcttctacgacggcctactgatctggtctggtttctcaaaaaacactcttacatcttatcacatgatctgtccattttatccggttagcttttattatgtctgacgatgttttcagtaccatacagagtcaacaattcagccttggcgcgccgtcttcactctcctattaattcatccctttgaggccaaatatcattttgagaaccttcctttcaaataccagcagcttatttattttccctggagtccatgtttcacttccattataacaactggacgaataattgacatgtccagtcttaatttagatttttgttttagcagcttaggtcttaataatgatgatagggagtataatactgtattattctcagctatccttgctgagacctctatttctatgtggttgttatctgtgtttactgccctcagatatttaaactctattactatttctagttgtggttattaatatttatgttctgcctaactcttggtcttggatttttggttactagcatgtatttcgtcttctctttatttattcgaaggcctagactacatgttcctgtttcttcatcgagttgggaaaatacctctctcatatatctcttgtagaaagagcgactgcacctagatcattagcaaaggccaacaatagttttgattctcgattcgcaaatccccctgccagctcagattatattttaattattgcactttctaacgctaaattgaatagcaatggtgataagaggtctccttgtctaagtcctgatgttttactaaatggcatcggtgttccttttttttacatattcatatgagtctgtcaaattagctccactaattttctaggtattcccatttctagcattgctagccatagtctacttctttttatcgaatcatatgcttgctgtaaatctgcgaaaatttggtgtacatctcggttgaattcccagttttttttctaatatttgtcggatggtaaatatttgatctattgttgaccttccacttcgaaagccgcattggtagtcgcctagaatatcttccgaatacggagtgagtctctttagtaagataattgatagaa

SEQ ID NO: 4543 - DNA, 2167 bp, Diabrotica virgifera
ccttaaagtcgccaacttatgaaatggcgtaatttgttcctttcatttgcaccatactgtatattatattcagttcttatagttcctactctgtaatctgtatcattgcgctgcgatctcgaagcgcaccagtggtggcgtcaaaaactgagtaatttaattataataatattctagacttatagcagatggaaagtttctttgtattgcctgactggctggctgcttcatatatgtcaaacgaatgacgcttgaaaattatttataaattgtcgaattttcaaatctacaaatatttttcatacaaaggtattcataaacattaataaactcacatttatacgttttttcggcgatctaatacttaacactggttgtagatgtacataaatacttaacactggttgtagatgtatgtacataaattataatacagtgtcagaaaatgggtgcaaatgggtatcgttcttattaaataaataataaaattaaataattaaaacaaagatagataaaaaaattaaaaatcttatacctataaataaggaaacacatcctcaaaaatatttgaaaatatttatttttatatttaggcaaatggtttataagaaatagccaatttcatttacttccgaagcgtataacgtatttagagatattaactactacattttataaatgtttttatattttatatttggcgtttcaaatatatttgttttatttctagtcaaaatgagttctcaaaatacaaattaaatattcttgttgtacaataacttggctatactcataatataataataatataataggtaatataaaaatgtcacacataaattgtttccaaacgtattaaggaattgattaataataaagtaataaaattaaatagaattaaaaaaataaattaaaataagcacaaagtaaatcacacagtcgctgcctattaaaaatcaatacctaccttcttcttctgcttaactggctttagggcttgcggtgaatctacgccgcacacactatagccctccatcttatacgatcttgctcttccatttcccattgttatgccccaatcctacataattcggcttcaacattatcctgtcatcttcttctacgacggcctactgatctggtctggtttctcaaaaaacactcttacatcttatcacatgatctgtccattttatccggttagcttttattatgtctgacgatgttttcagtaccatacagagtcaacaattcagccttggcgcgccgtcttcactctcctattaattcatccctttgaggccaaatatcattttgagaaccttcctttcaaataccagcagcttatttattttccctggagtccatgtttcacttccattataacaactggacgaataattgacatgtccagtcttaatttagatttttgttttagcagcttaggtcttaataatgatgatagggagtataatactgtattattctcagctatccttgctgagacctctatttctatgtggttgttatctgtgtttactgccctcagatatttaaactctattactatttctagttgtggttattaatatttatgttctgcctaactcttggtcttggatttttggttactagcatgtatttcgtcttctctttatttattcgaaggcctagactacatgttcctgtttcttcatcgagttgggaaaatacctctctcatatatctcttgtagaaagagcgactgcacctagatcattagcaaaggccaacaatagttttgattctcgattcgcaaatccccctgccagctcagattatattttaattattgcactttctaacgctaaattgaatagcaatggtgataagaggtctccttgtctaagtcctgatgttttactaaatggcatcggtgttccttttttttacatattcatatgagtctgtcaaattagctccactaattttctaggtattcccatttctagcattgctagccatagtctacttctttttatcgaatcatatgcttgctgtaaatctgcgaaaatttggtgtacggggttattcactatattttgaccccctgtaatagactatttataaatgagagtaggggttgtgtgctagctcatttgaagggttattgggttctctattcggt

SEQ ID NO: 4544 - DNA, 2223 bp, Diabrotica virgifera
  SmartBlast Evalue=3E-55; Info="Elongation factor SIII p15 subunit, putative n=10 Tax=Coelomata RepID=Q17C74_AEDAE"
cctccatccatcgtcgtctttgagattagcattgttttcaataatctacaaggcttctttcatcacacgctatatcgatcacaataattacactctgcagtatatagaatacacattcaaacaacgaaatagtgcaattaaaatcaaaatggcagacagtaccacagaaataaatcaagaaagagtttatggaggatgcgaagggcccgatgctatgtacgtaaaattaatttcatcagatggtcatgaatttatagttaaaagagaacacgctcttacatctggcactatcaaagccatgttaagtggccctgggcagtttgccgaaaatgaagcaaatgaagtgaactttagagaaatcccatcccatgtactacaaaaggtctgcatgtatttcacctacaaagttcgttacacaaacagctccacagagatacctgaatttcctattgctccagaaattgcactagaattattgatggctgctaatttcttagactgttaaattatttattctaaaaaaaatgttggttgttcattacttagctgtaaaatgcagttgcttttttttatttttacttcataataataataattagacgacaattgaaatcctgcacggataccagaagaagaaacaattattttgtctgccgaagttgattttttcatatgtttaaatagtttctataaagtttaaacaattacttttattgtataaatagatgattttgtggcaataactcatatcattttccaatgttccctgaaaaaaaaactgctgcatttaactacatttaaccctgcgttagtgcgatgggtaaatattagacagttagagcggtggggtgtgtagaaccccaacaaaaagtacaaagaaaaatttgaaaaaatcaaaaaaatttcagaaataagataactgtaatctttactaaatgcctttatggcttcgatctaaaaaataacagtaaattgaaaaaatacaaatagtattctgaatatgtcaacaaagaacaccaaaatatttctagctagggtgtaccacaccctgccgcactaacgcaggtttaaggaagtctattgcatttttgtagtagagtaataaaatctatttttattagtcaagcagcttacaattcacgcaacatttcagtgttgccaaccagtatggcgaaaaaattcagtacgatgcctaaatatctatgtttgataacacatgatattggcactaagcttttcatatattatgttagtgacagttaactcatcttagttctatacatctaaagttcacttggactttcttcaattttaaaacattgcttgatgataataaaataacattttgttttctctagctggatatctcattgtttcgctttaggacaatacttctatggtataataatgacaggcaacattgcaattttttgttttattacagtgaatttaattttctatacttttgataaaaagttataatcaacttgagtaatgtggatcttagttgagcattgattaaaatgattttatttcattttatcactgagtatttccaaagaattttaagtcttgctcatttagttgaaccatttattattttgttctattagaaattgaacaatttctttatgctatctgataattttatatctagcatatttttaatatgtgtttcataaacacatatctttagaggtgttacattatgtaaaatatactcaaagttgctttaagattggtggcccagcatttttctttgatttattttgccaggctgatttttttgcataagattgtaatttgtttcaaataaatataatcttctattatgatatacttgtcaactaaaatgtagacttacaatatttcaaaatggatcattattaaaatgaaataataattacacctgttttggtctgtcataaaaaatgttataaacttagactgcattttacagccatacttatgtaacactctagacgccatatagttcagctcattaagcatattaactataaaacgtcaaaacatgaaactttcagatttagcttatcattatatacttcaatattttaatttagcttaaatttcaatcaagtactttcatgtttgaccatttttatatcctcgaagttgaactaatactattttcagttgcccgtggttttttatttttgattctcatgttttaattattttactgcaaaaacttaatgtatt

SEQ ID NO: 4545 - DNA, 2167 bp, Diabrotica virgifera
  SmartBlast Evalue=3E-55; Info="Elongation factor SIII p15 subunit, putative n=10 Tax=Coelomata RepID=Q17C74_AEDAE"
cctccatccatcgtcgtctttgagattagcattgttttcaataatctacaaggcttctttcatcacacgctatatcgatcacaataattacactctgcagtatatagaatacacattcaaacaacgaaatagtgcaattaaaatcaaaatggcagacagtaccacagaaataaatcaagaaagagtttatggaggatgcgaagggcccgatgctatgtacgtaaaattaatttcatcagatggtcatgaatttatagttaaaagagaacacgctcttacatctggcactatcaaagccatgttaagtggccctgggcagtttgccgaaaatgaagcaaatgaagtgaactttagagaaatcccatcccatgtactacaaaaggtctgcatgtatttcacctacaaagttcgttacacaaacagctccacagagatacctgaatttcctattgctccagaaattgcactagaattattgatggctgctaatttcttagactgttaaattatttattctaaaaaaaatgttggttgttcattacttagctgtaaaatgcagttgcttttttttatttttacttcataataataataattagacgacaattgaaatcctgcacggataccagaagaagaaacaattattttgtctgccgaagttgattttttcatatgtttaaatagtttctataaagtttaaacaattacttttattgtataaatagatgattttgtggcaataactcatatcattttccaatgttccctgaaaaaaaaactgctgcatttaactacatttaaccctgcgttagtgcgatgggtaaatattagacagttagagcggtggggtgtgtagaaccccaacaaaaagtacaaagaaaaatttgaaaaaatcaaaaaaatttcagaaataagataactgtaatctttactaaatgcctttatggcttcgatctaaaaaataacagtaaattgaaaaaatacaaatagtattctgaatatgtcaacaaagaacaccaaaatatttctagctagggtgtaccacaccctgccgcactaacgcaggtttaaggaagtctattgcatttttgtagtagagtaataaaatctatttttattagtcaagcagcttacaattcacgcaacatttcagtgttgccaaccagtatggcgaaaaaattcagtacgatgcctaaatatctatgtttgataacacatgatattggcactaagcttttcatatattatgttagtgacagttaactcatcttagttctatacatctaaagttcacttggactttcttcaattttaaaacattgcttgatgataataaaataacattttgttttctctagctggatatctcattgtttcgctttaggacaatacttctatggtataataatgacaggcaacattgcaattttttgttttattacagtgaatttaattttctatacttttgataaaaagttataatcaacttgagtaatgtggatcttagttgagcattgattaaaatgattttatttcattttatcactgagtatttccaaagaattttaagtcttgctcatttagttgaaccatttattattttgttctattagaaattgaacaatttctttatgctatctgataattttatatctagcatatttttaatatgtgtttcataaacacatatctttagaggtgttacattatgtaaaatatactcaaagttgctttaagattggtggcccagcatttttctttgatttattttgccaggctgatttttttgcataagattgtaatttgtttcaaataaatataatcttctattatgatatacttgtcaactaaaatgtagacttacaatatttcaaaatgttataaacttagactgcattttacagccatacttatgtaacactctagacgccatatagttcagctcattaagcatattaactataaaacgtcaaaacatgaaactttcagatttagcttatcattatatacttcaatattttaatttagcttaaatttcaatcaagtactttcatgtttgaccatttttatatcctcgaagttgaactaatactattttcagttgcccgtggttttttatttttgattctcatgttttaattattttactgcaaaaacttaatgtatt

SEQ ID NO: 4546 - DNA, 2229 bp, Diabrotica virgifera
  SmartBlast Evalue=0; Info=Starch branching enzyme ii n=2 Tax= Aedes aegypti RepID=Q16PC7_AEDAE
taccacatttatcagagctgaaggttgtagttcagacatgggaaggccacaaagtggataggctgtcaccatacgcaacatatgcagtagagcctcccaagcatgaaggaactatttataaacaaaagttttggaatcctcctcagactcaaagatacatatttagacacaagaaagtgcctcgtcctaaaagcctgagaatttacgaatgccacgttggaatagcaactcaagaaccaaaggttggaacttatgataactttactgataatgttcttcctagaatcgttaaacaagggtacaactgtattcagttaatggctgtcatggaacacgcttactatgctagttttggatatcaggttaccagtttttatgcggcatctagtagatatggtacacccgaagaactcaagcgtttggtggacagagcacatgagttgggattaatggtattattggatcttgtacattctcatgccagtaagaacgtaatggacggtcttaatcaatttgatggaactgattcctgtttcttccactctggtccaagaggcgaacattctttatgggattctagactgtttaactattcagaattcgaagtactccgttttcttctttcaaatataagatggtggatggaagagtaccgttttgatggtttccgttttgacggtgtcacttccatgttgtaccattctagaggaatcggtcaaggttttggtggtcactatgacgattatttcagtatgggtgtagatactgagggattggtttatcttatgatggctaaccatatgattcacaaactacacagcgacgcagttactattgctgaagacgtgtctggtatgccagggacttgccgtccagtcacagaaggttgtatgggatttgattacagattggccatggctatacctgataaatggataaaactgctaaaacacaagtccgatgatgaatgggacatgggcaaccttatacatacattaacaaatagacgatggatggaaggcaacgtagcatacgcagaatctcacgatcaagccttagtcggtgataaaactatcgcattttggttaatggataaagaaatgtatacgcacatgagcaccttatccgaccagtcgctcatcatcgacagaggcattgctttgcacaaactcatacgttacgtaactcacggtctaggaggagaagcctacctaaacttcattggtaacgaatttggtcatccagaatggctagattttccaagggctggcaacaacagttcctatcactacgccaggagacaatggaatctcgttgatgatgatattctgaaatataagtttttgaacaactgggacgccgctatgaaccacacagagcagaaatacggatggttggcggctcatccagcatatgtcagtacaaaacaccaggatgataaggtgatagtctttgagagagcaggattggtattcgtcttcaacttccatcccaccaagagttttgcagactacagagtgggagtagaagtagaaggaaactacagaatcgttttgagttctgacgacaaagcttttggaggtttcgataggatcgacaaatcagttacttttgcaactacccctgaaggatttgctggcagaagaaattatatgcaggtctatattccaagcaggacgtgcataacattggcaaaagagtaaatcaacggtaactaaaaaaatcatggtttaataagattaagcactttatattattttcctactccaaaataacaaataatcatatgcgcagtttttgcattttatgtcaaaaaaatatttagtgccatgttaaagaagactactattttgatataggaaaagttaaattttttatattgtaccgatagtttttattctttaaaaaatatttgttcggtacagctatttttatacaaattttattgtaatctcgtttgaaaattaactttttaaattcgtttatgctacttaaatatttttagaatgttgttttataataattgttagatactttttggattttcctatatctgtttactgtctacgatattactaaaattgtacattaaatcactgaatgaaattaaatccaggatatttctggcaggccagaactgaataaagttaaacatataactaaaattaccctcaaatataatgatctgttaataaagtatcgaatttgttaaattttgagaaatcggcc

SEQ ID NO: 4547 - DNA, 2130 bp, Diabrotica virgifera
  SmartBlast Evalue=0; Info=Starch branching enzyme ii n=2 Tax= Aedes aegypti RepID=Q16PC7_AEDAE
taccacatttatcagagctgaaggttgtagttcagacatgggaaggccacaaagtggataggctgtcaccatacgcaacatatgcagtagagcctcccaagcatgaaggaactatttataaacaaaagttttggaatcctcctcagactcaaagatacatatttagacacaagaaagtgcctcgtcctaaaagcctgagaatttacgaatgccacgttggaatagcaactcaagaaccaaaggttggaacttatgataactttactgataatgttcttcctagaatcgttaaacaagggtacaactgtattcagttaatggctgtcatggaacacgcttactatgctagttttggatatcaggttaccagtttttatgcggcatctagtagatatggtacacccgaagaactcaagcgtttggtggacagagcacatgagttgggattaatggtattattggatcttgtacattctcatgccagtaagaacgtaatggacggtcttaatcaatttgatggaactgattcctgtttcttccactctggtccaagaggcgaacattctttatgggattctagactgtttaactattcagaattcgaagtactccgttttcttctttcaaatataagatggtggatggaagagtaccgttttgatggtttccgttttgacggtgtcacttccatgttgtaccattctagaggaatcggtcaaggttttggtggtcactatgacgattatttcagtatgggtgtagatactgagggattggtttatcttatgatggctaaccatatgattcacaaactacacagcgacgcagttactattgctgaagacgtgtctggtatgccagggacttgccgtccagtcacagaaggttgtatgggatttgattacagattggccatggctatacctgataaatggataaaactgctaaaacacaagtccgatgatgaatgggacatgggcaaccttatacatacattaacaaatagacgatggatggaaggcaacgtagcatacgcagaatctcacgatcaagccttagtcggtgataaaactatcgcattttggttaatggataaagaaatgtatacgcacatgagcaccttatccgaccagtcgctcatcatcgacagaggcattgctttgcacaaactcatacgttacgtaactcacggtctaggaggagaagcctacctaaacttcattggtaacgaatttggtcatccagaatggctagattttccaagggctggcaacaacagttcctatcactacgccaggagacaatggaatctcgttgatgatgatattctgaaatataagtttttgaacaactgggacgccgctatgaaccacacagagcagaaatacggatggttggcggctcatccagcatatgtcagtacaaaacaccaggatgataaggtgatagtctttgagagagcaggattggtattcgtcttcaacttccatcccaccaagagttttgcagactacagagtgggagtagaagtagaaggaaactacagaatcgttttgagttctgacgacaaagcttttggaggtttcgataggatcgacaaatcagttacttttgcaactacccctgaaggatttgctggcagaagaaattatatgcaggtctatattccaagcaggacgtgcataacattggcaaaagagtaaatcaacggtaactaaaaaaatcatggtttaataagattaagcactttatattattttcctactccaaaataacaaataatcatatgcgcagtttttgcattttatgtcaaaaaaatatttagtgccatgttaaagaagactactattttgatataggaaaagttaaattttttatattgtaccgatagtttttattctttaaaaaatatttgttcggtacagctatttttatacaaattttattgtaatctcgattgaaaattaactttttaaattcgttttatgtccggtttcagagaactccgttgaatcaagcaaatctaagctacttatatatttttaaaatggtgttttataataattgttagtaatttttggattttcctatatctgtttactgtctacaatagtactaaaattgtacatt

SEQ ID NO: 4548 - DNA, 2222 bp, Diabrotica virgifera
atacattatttattggattatttatccatttatttgatcttatatatttatttgatcttatttatttgattatatacttcattatatatatatatatttttgctggccattttgattttgttggggtgttgcgaatattttctcggtatatatattttgcgtgcaaacttaggtatctttcatacttctgttctttggactacttgtcaataactttgctctcatcatgtgtgcttttaaagctgaacatcttctggtggatgaattggattatgaattaaagattcgggacataatgccagaggagtcgacaactgtcgataaaaaacgcaatcttttgagaggtgctttgaaacaagaagctggcaatagaagttttctccaaatttcagctgtatcccttccttttgaggaacaacaaaaaggaatcactgaaacattggacagcttgtctaaaaaaatcgaaaagtttaggggaactgtaaaggatacagagtatgcgcgattaacatctcgtctaggccatatttctgcccgtgtacacttgctacactgtccttctgaagaacaggaaccgttcaagaggtctgtttctcttaaaatattaacactagagggtgaacttgattctagagttaaccccattgctacctctactcctaatgcttcagtcaatgtacctagctttacgtactccaaacctgttcaagtacacaaatggggtatttcattttcaggtgaaaaacagcacactgatgtgatgtcatttttagaaagggttgaatgtcttcgaatatctagaggtgtttctgaagaggatttgtttgctgcttctgctgagttgttcaccgggaccgcttttacatggtttatgaataacaggggtaatttttcttgttggtctgatctgattaaaaagttgaagtcggattttcttccgtattcattccaggatgatttattagatcaaattaagaatcataagcagaaacctggggaatctgttactatgtttattaatactatattaggtatgtgtagtcgtttagacactcctttgtcagatttactaaaattaaaatcatccttaaatgtctattacccttttatcatcaacaattagctcttatggacattcagaacattgatgaccttactataaagtgcaaacgtttggaggaaacgttatcctggtcttctcaacctccatccacatctcgatcctcttctaactcttcttctcagccaacttcctttaggcaacgttcttggcaaataagggtcatgaacataatgtttcggttgttagttctcttgtctgctggaattgtgatcagccggtcacccgttttacaattgtgggattcctcaaatcgtattttctgccatggttgtggccgagagaacacccttaaaagaaactgttctaagtgttcgggaaacgacacgtcggaggtccgtcccctgaacgtttctccgtccaacatccaatcagggaatcaaaccccatcgtcaaacgaaactgctggaccaagcacatccagcaacccaaacccatcttcacgaaaagggaaaggggtgtcgttcaagaaagcagcacacaccacaaaacaaaattaaaccagaaatttatttctatagataatacgttagattcgcttgattcaaatgatcacagatggtcatttacaaacgcttctttgattggtagtgttcaacgtaacaataataattgtgatagtaatgtggttccattatctatattagattctagttttgttaatgatgatgatacgtctgggttagttccatataacggttgtagacaaccaaatactttagatctagatattaattcgttattagttaggaaacaaaatgataataggccatatcttcctattcaaattttaggacaatcgtgtttagctttgttagatagtggctctaatatttcattgataggggcacattcgttaaatttattgaaaaattctagtattcccattatgcccatttcatctttgcaagtatctactgcagatggtacagttcagtccattacgggcaaactccaaattaaaatcacagtggcagatttatgtagggaaattacattttatgttattccttccgtgcagaattctataattttaggtatggacttcttcaatgctttcaatagtaccttaagttgttctgatttttctttttccatatct

SEQ ID NO: 4549 - DNA, 2126 bp, Diabrotica virgifera
ttgattttgttggtgtgttgctgatattttctcggtttatattatatatattttgcgtgcaaactttcatattttcatatttttcatatttctgttctttggactatttgtcaataactttgctctcatcatgtgtgcttttaaagctgaacatcttctggtggatgaattggattatgaattaaagattcgggacataatgccagaggagtcgacaactgtcgataaaaaacgcaatcttttgagaggtgctttgaaacaagaagctggcaatagaagttttctccaaatttcagctgtatcccttccttttgaggaacaacaaaaaggaatcactgaaacattggacagcttgtctaaaaaaatcgaaaagtttaggggaactgtaaaggatacagagtatgcgcgattaacatctcgtctaggccatatttctgcccgtgtacacttgctacactgtccttctgaagaacaggaaccgttcaagaggtctgtttctcttaaaatattaacactagagggtgaacttgattctagagttaaccccattgctacctctactcctaatgcttcagtcaatgtacctagctttacgtactccaaacctgttcaagtacacaaatggggtatttcattttcaggtgaaaaacagcacactgatgtgatgtcatttttagaaagggttgaatgtcttcgaatatctagaggtgtttctgaagaggatttgtttgctgcttctgctgagttgttcaccgggaccgcttttacatggtttatgaataacaggggtaatttttcttgttggtctgatctgattaaaaagttgaagtcggattttcttccgtattcattccaggatgatttattagatcaaattaagaatcataagcagaaacctggggaatctgttactatgtttattaatactatattaggtatgtgtagtcgtttagacactcctttgtcagatttactaaaattaaaatcatccttaaatgtctattacccttttatcatcaacaattagctcttatggacattcagaacattgatgaccttactataaagtgcaaacgtttggaggaaacgttatcctggtcttctcaacctccatccacatctcgatcctcttctaactcttcttctcagccaacttcctttaggcaacgttcttggcaaataagggtcatgaacataatgtttcggttgttagttctcttgtctgctggaattgtgatcagccggtcacccgttttacaattgtgggattcctcaaatcgtattttctgccatggttgtggccgagagaacacccttaaaagaaactgttctaagtgttcgggaaacgacacgtcggaggtccgtcccctgaacgtttctccgtccaacatccaatcagggaatcaaaccccatcgtcaaacgaaactgctggaccaagcacatccagcaacccaaacccatcttcacgaaaagggaaaggggtgtcgttcaagaaagcagcacacaccacaaaacaaaattaaaccagaaatttatttctatagataatacgttagattcgcttgattcaaatgatcacagatggtcatttacaaacgcttctttgattggtagtgttcaacgtaacaataataattgtgatagtaatgtggttccattatctatattagattctagttttgttaatgatgatgatacgtctgggttagttccatataacggttgtagacaaccaaatactttagatctagatattaattcgttattagttaggaaacaaaatgataataggccatatcttcctattcaaattttaggacaatcgtgtttagctttgttagatagtggctctaatatttcattgataggggcacattcgttaaatttattgaaaaattctagtattcccattatgcccatttcatctttgcaagtatctactgcagatggtacagttcagtccattacgggcaaactccaaattaaaatcacagtggcagatttatgtagggaaattacattttatgttattccttccgtgcagaattctataattttaggtatggacttcttcaatgctttcaatagtaccttaagttgttctgatttttctttttccatatct

SEQ ID NO: 4550 - DNA, 2149 bp, Diabrotica virgifera
  SmartBlast Evalue=8E-50; Info=CG3819 n=4 Tax=melanogaster subgroup RepID=Q9VVV1_DROME
gccgtgagtaagttcgaaaggtcataaacgctggcacaaatcagcgtggaccgacgagccttgcggtatggagagagtggtgaagcaggaggctccttgacggtgacctgttagacgggcttggtgggccgctcatcagcgttgacttgactgaccttcggggtggacaatatttcgttatagcgacacagttactggaaacgggctcgcgtgggtatttgttcttcctagatagagctcttctctacgatgtagaggatctcttcatactacctgctctctcgaaatggggtattgttgagactttgcatcgagggggacgccagacttcacaacctgggggggaattcttgttagccattcatgttgacatggattccttagtagggcaggaggtccggtatttttcttggatttttacaggacttctaatcccacactgctgcacatgcgtcatgattttagtgcgagacgcgtgcagcggtgatgctcgtagaccggaagataatccaaggcatgacgctgcactccaattcctgccacccagtgacgacccgtaagaggagccgtagttaggaaagggtgtaaccggtccgggagaggagtggtcagtattgcgggaacgttgcgagtacttgaggaggccgccaccgtcttttaaaacagacattcgaacattacagggggttcctacgggtattggggggaattaccatcccccaagccccctggtgcggtcgcaactatgactctttttaaggtggataaccgtggtactagccgtaaggtcttgatattcttatggcaatgaaagatactaataagcgaaataataaaaataaattctttagaacgtatatattttaatatttactctaataatccctttatcgtaagatgaggcaaaacggttataagagtcttgaatttgctatctgtacaactacaagcatacgaatatccagttctgacattattcttgttccatttaagccaagtaacttttgctgatacatcagtcttgcaaattttttgactactacttgttatttcttcgtatggattattatgcccaaccagaacaatacaatgttgagttattggttcatatactagtctccaaaatacttctggtgctggaagggcaggagaatgctttttgtcttgatggttaacgtagatatagagatctacaagttcggaagtttgagagttgggaaggctggaaattccataaactcctgtccaaacttttaagtcaacgtttttgttgttggcataatttcttacgtcagtttctacttggttccagttacctccattaaaagtgttccattggggagctgcattgacatatctataagacgctctttgatgtggttcatacacaaaatcagctttggcagccaaatgtcctctatttggaaaaatacttgtattcacatactgcgtggacgtaacttctaatccaactagggtattataagtagtctggatactttggtacatcgcattcacagacctccccattctataaaaaatatcatcttgcgaaaaggaagggttggcaacgtttctagccctataatttatagattttgatagaacaaaataggtgtatattgcaagcttagtagtactatcgaaacaaacagtcatggcttcgttgaaacggtcagaacttagtgcaaacccgatttgaatgatttgtaattttttaacaccatcaacacatttattgtttggatcatttgtgtctgttgctctagtaatttctctaactgtgggattaattacgttattacaagataaataggaccaatgcacagcgtggccattgatgttaaagacatcgcctgttttacatgtagctgttacaatgtctcctaatgatgtaccgttcttgatgatttgagttccaggacaggcgaactctactgctgcgttcctggtaaatgaaagagtggtgtaaccaggtgttggttcgattagagacgaagtaccatattttactactaatggagttttgcttccaaatgggtttatttcgcaccctgttgtagcacatgttcctacagatagtaagtaaccaactaatataattataacagagttcattgttgctgaaaggaaacaatgcatggatcgc

SEQ ID NO: 4551 - DNA, 2164 bp, Diabrotica virgifera
  SmartBlast Evalue=8E-50; Info=CG3819 n=4 Tax=melanogaster subgroup RepID=Q9VVV1_DROME
gccgtgagtaagttcgaaaggtcataaacgctggcacaaatcagcgtggaccgacgagccttgcggtatggagagagtggtgaagcaggaggctccttgacggtgacctgttagacgggcttggtgggccgctcatcagcgttgacttgactgaccttcggggtggacaatatttcgttatagcgacacagttactggaaacgggctcgcgtgggtatttgttcttcctagatagagctcttctctacgatgtagaggatctcttcatactacctgctctctcgaaatggggtattgttgagactttgcatcgagggggacgccagacttcacaacctgggggggaattcttgttagccattcatgttgacatggattccttagtagggcaggaggtccggtatttttcttggatttttacaggacttctaatcccacactgctgcacatgcgtcatgattttagtgcgagacgcgtgcagcggtgatgctcgtagaccggaagataatccaaggcatgacgctgcactccaattcctgccacccagtgacgacccgtaagaggagccgtagttaggaaagggtgtaaccggtccgggagaggagtggtcagtattgcgggaacgttgcgagtacttgaggaggccgccaccgtcttttaaaacagacattcgaacattacagggggttcctacgggtattggggggaattaccatcccccaagccccctggtgcggtcgcaactatgactctttttaaggtggataaccgtggtactagccgtaaggtcttgatattcttatggcaatgaaagatactaataagcgaaataataaaaataaattctttagaacgtatatattttaatatttactctaataatccctttatcgtaagatgaggcaaaacggttataagagtcttgaatttgctatctgtacaactacaagcatacgaatatccagttctgacattattcttgttccatttaagccaagtaacttttgctgatacatcagtcttgcaaattttttgactactacttgttatttcttcgtatggattattatgcccaaccagaacaatacaatgttgagttattggttcatatactagtctccaaaatacttctggtgctggaagggcaggagaatgctttttgtcttgatggttaacgtagatatagagatctacaagttcggaagtttgagagttgggaaggctggaaattccataaactcctgtccaaacttttaagtcaacgtttttgttgttggcataatttcttacgtcagtttctacttggttccagttacctccattaaaagtgttccattggggagctgcattgacatatctataagacgctctttgatgtggttcatacacaaaatcagctttggcagccaaatgtcctctatttggaaaaatacttgtattcacatactgcgtggacgtaacttctaatccaactagggtattataagtagtctggatactttggtacatcgcattcacagacctccccattctataaaaaatatcatcctgcgaaaaggaagggttggcaacgtttcgagccctataatttatagattttgacagaacaaaataggtgtatattgcaagcctagtagtactatcgaaacaaacagtcatggcttcactgaaacggtcagaacttagtgcaaacccaatttgaatgatttgtaattttttaacattatcaacacatttattgtttggatcatttgtgtctgttgctctagtaatttctctaactgtgggattaattacgttattacaagacaaataggaccaatgtacggtgtggccattgatgttaaagacatcgcctgttttacatgtagctgttacaatgtctcctaatgatgtaccgttcttgatgatttgagttcctggacatgcgaactctactgcagcgtttctggtgaatgaaagagtggtgtaaccaggtgtgggttcgattagagacgaagtaccatattttactactaatggagttttactaccaaatgggtttatttcgcaccctgttgtagcacatgttcctacagatagtaagtaaccaactaatataattataacagagttcattgttgctgaaaggaaaaatgcatgaatcgcatccttatgtaaaggg

SEQ ID NO: 4552 - DNA, 2190 bp, Diabrotica virgifera
  SmartBlast Evalue=0; Info=Pyruvate kinase n=1 Tax=Camponotus floridanus RepID=E2AJ75_9HYME
taacagtttaatactactttatttggatataattttgaagtctgtttatttcataacacgtataatacatttataaataacaatcacaaaataaatagccagacctgaagtttgtagaaaaaaaaaacaacaaattgctaaaaaaaaattgttttgtaatttagacacctgttagtaatgtgtgttggtgtttcatctagaaaaattcatttaatgatgtgaactagtactaaggcgactaaaaataaattaaaatatacgtaattaaggaattctgactgatgttgtagaagttgttggccggtaacttttcaaaaaatatttagactttctgagataacactgatattgaattaacttctagacgtttactttgcgcatgagccaagacatatgccctctacttcatcggatgcgtagataattctgagggtgttggtgtaaccagatccttgtttccatcctgttactacgacgactggatctccggttctaacgaatcctcgggatttgccgaatgtgataccatagtgtaatctggcgtctacgtcttggagccagtcttctttacgttcagcttcgtagatcaaaggtaggatggctctgtacatttggcattgacgtgcagtttgtggaatacgcgtaacagcgatgatagggcatctgggcttgaatttggctatcagatgagctgattttcctgatgtagttattacaactatggcagctgccattgttttattggcagattcgacagcggaaatagcgatagcttgtgccatatctaatggaacaggaatcattgaggtcaagtcaccgaagaattcgccgctccagatagcagcttcagcttccttgcagatattagccatggttcggacacagtccaaaggatagtctcctttggcggtctctcctgacaacatcacacagtcagcaccgtcgataacggcattagcaacgtctgagctctcggcacgagtaggtcttggttttttggtcatagattccaacatctgggtggcgcagatgacgggtttgccggccttgttgcatcgggcaatcatggccttttgagcgatgaatactttttcggttgggatttcgataccaagatctccacgagctaccatgataccgtcggaagcttcaataatttcgtccaaattggtcataccttgttggttttcaatcttcgaaattataataattctttttccttcttcccctagaatgtttctgatttcagtcaaagcgccgccatcacggatgaaagaggcgaaaacgatgtctactttttgttctacaccaaatctcaaatctgatttatccttttctgagacggctggtaagtctacaggaactccgggaagattgcaacctttgcggctgccgagagtaccaccattttcgactgtgcaagtgaggaaagatccttgaatactgtctactactagagaaattagaccatcatcaacgtaaacacggtttcctgctttgactactttctggatattgtcatagtcgacgtatatgcagtcttttgtgcctttggattcataagccttatctgtggtcaatttgattgtttgtcctttgactagttcgacttcagcagagccacccccttctaaaagtccagtacgaatttcaggacctttggtgtctagggcaatggccaatgggtagggcatgccgattttcttgctgtacatttcgacggcctttctgatgttggcgatggtctcagcgtgatattcgtgagaaccgtgagagaagttcaaacgggcacagttcataccagattccatcatttggaccaagatctctgggtcccttgaagcgggtccaatggtacatattattccagaaagacggataaacgaggctctggaattgatatcaagggcacacaaatggtccaagtggtttttcttctccaaagcttggagttggaatggcaaaacattttgagccatcttaggagattattactgatacacttgaagaatcttagaaaggaaaacgatggaaatcagttacttttacacgtgagagccggcacaaattctgcaaaaattcttaattatgtaccacctgactgacccagtactccagtagaaagaaaaggtcaaagtggtcaaagcaaggccaaaataaatgtcatcgactatgtcattggaatttaag

SEQ ID NO: 4553 - DNA, 2122 bp, Diabrotica virgifera
  SmartBlast Evalue=0; Info=Pyruvate kinase n=1 Tax=Camponotus floridanus RepID=E2AJ75_9HYME
taacagtttaatactactttatttggatataattttgaagtctgtttatttcataacacgtataatacatttataaataacaatcacaaaataaatagccagacctgaagtttgtagaaaaaaaaaacaacaaattgctaaaaaaaaattgttttgtaatttagacacctgttagtaatgtgtgttggtgtttcatctagaaaaattcatttaatgatgtgaactagtactaaggcgactaaaaataaattaaaatatacgtaattaaggaattctgactgatgttgtagaagttgttggccggtaacttttcaaaaaatatttagactttctgagataacactgatattgaattaacttctagacgtttactttgcgcatgagccaagacatatgccctctacttcatcggatgcgtagataattctgagggtgttggtgtaaccagatccttgtttccatcctgttactacgacgactggatctccggttctaacgaatcctcgggatttgccgaatgtgataccatagtgtaatctggcgtctacgtcttggagccagtcttctttacgttcagcttcgtagatcaaaggtaggatggctctgtacatttggcattgacgtgcagtttgtggaatacgcgtaacagcgatgatagggcatctgggcttgaatttggctatcagatgagctgattttcctgatgtagttattacaactatggcagctgccattgttttattggcagattcgacagcggaaatagcgatagcttgtgccatatctaatggaacaggaatcattgaggtcaagtcaccgaagaattcgccgctccagatagcagcttcagcttccttgcagatattagccatggttcggacacagtccaaaggatagtctcctttggcggtctctcctgacaacatcacacagtcagcaccgtcgataacggcattagcaacgtctgagctctcggcacgagtaggtcttggttttttggtcatagattccaacatctgggtggcgcagatgacgggtttgccggccttgttgcatcgggcaatcatggccttttgagcgatgaatactttttcggttgggatttcgataccaagatctccacgagctaccatgataccgtcggaagcttcaataatttcgtccaaattggtcataccttgttggttttcaatcttcgaaattataataattctttttccttcttcccctagaatgtttctgatttcagtcaaagcgccgccatcacggatgaaagaggcgaaaacgatgtctactttttgttctacaccaaatctcaaatctgatttatccttttctgagacggctggtaagtctacaggaactccgggaagattgcaacctttgcggctgccgagagtaccaccattttcgactgtgcaagtgaggaaagatccttgaatactgtctactactagagaaattagaccatcatcaacgtaaacacggtttcctgctttgactactttctggatattgtcatagtcgacgtatatgcagtcttttgtgcctttggattcataagccttatctgtggtcaatttgattgtttgtcctttgactagttcgacttcagcagagccacccccttctaaaagtccagtacgaatttcaggacctttggtgtctagggcaatggccaatgggtagggcatgccgattttcttgctgtacatttcgacggcctttctgatgttggcgatggtctcagcgtgatattcgtgagaaccgtgagagaagttcaaacgggcacagttcataccagattccatcatttggaccaagatctctgggtcccttgaagcgggtccaatggtacatattattccagaaagacggataaacgaggctctggaattgatatcaagggcacacaaatggtccaagtggtttttcttctccaaagcttggagttggaatggcaaaacattttgagccatccttccggtcctgacaatagccttcatgtttgaattttctttcctagaaccttacccactgaactgaagtctaccaagtcactgactgaccttccagctttgactttcgtcaaatatatagaaaggttaaacctgtatcctct

SEQ ID NO: 4554 - DNA, 2841 bp, Diabrotica virgifera
  SmartBlast Evalue=1E-107; Info=Endonuclease-reverse transcriptase n=1 Tax=Bombyx mori RepID=D5LB38_BOMMO
ctagatctcatggaagcaaggcgatcttataaaaccaaagacaaaacatgtataatattatacacagaaataaggagaaagatcggagaggcaaaggaaagatggtatagtgacagatgcgcagagattgaacagttggtagagaaacatgataacttaaaccttcataagaaaattagagaaataacaggcactaatattaagaaaaaatcaaacatactgctggataaaaacggcaaaataattatagacgtcggtgaaaggcttaaaagatggcaggaatatattcaagagctatttaaagacgaacggactgaaatagtactagagcaggaaaagttcgacaacggcccagacataacagaagatgaggtactagaggcgataaagcgaacaaagaacaacaaggcaacaggtcctgaccaaatcctgtagacataatacggttaatagaggaccagcaaattggaatattggtcgacttatttaatacaatatacagtacaggaatcattcccagagattggctgctgtcaacgttcataacactgccaaaaaaaccaaatgcaaaagaatgccaagaccaccggataataagtttaatgagtcatacactcaaaatattttaaaaattatacaccggagaatacataacaaacttgagcaggacataagcgacacgcaatttggatttagaaatgcaatgggaacgagggaagccctgttcgctgtaaatgtacttgtgcaaaggtgcatggatgttaatcagccagtatatatgtgtttcttggattacaacaaagccttcgataaggtcagacataaccgccttatcgaattacttgaaaagaaaaacttagatatgagggacatcaggatcattagtgctatctattataatcagatcgctgtggtaaaagagaacaacgccttttcaaatgaaatacgtattgagaggggcgtcagacagggctgtgtcctgtctcctactttgttcaatttgtattcagaggaaataatccaggaagcactagaagacctaaccacgggaataaaagtaaatggccgaccaatcaataatatacggtttgccgacgacactattttattagccgaatgtcttgaggatttacaacaaatggttgacagagtggtagaagtcagccaagaaaacggactgtccctaaacacaaaaaagacacaatttatggtaatcacaaaagctcaacagcgccaagaaagcataacaatacatggagaacaaattaaaaaggttgaaaaatataaatatttgggtacaataattaatgaaactaatgagtacacagaagagattaaagcaagaataggacaggcaagaaatgctttcaacaaactgaaaaaaagtactctgtagcagggacattacaatttctttaaagataagacttctgagatgctacgtgttctccgtattattctatgggttggaggcttggacattaaagaaggatgtttcggacagattagaagccttcgagttatgggcctacagaagaatattaagaataagttgggtggatagagtcacgaatatcgaggtgttgagaagaatgggaaaagataaagaggttttaaatacaattaaagtcagaaaactacaatatctgggacatgttatgaggggcgagcgttataacttgttacaattgataatgcaaggaagaatacagggtagaaggagtcgcggaagaagacgcatctcctggttaaacaatttgagagcttggtttaattgcacttctgctgatctctttagagcagcggtatcgaaagtgcgaattgccgtgatggttgccaaccttcttagaggagatggtacatgaagaagaagaagggtatctaaacgacagcaagttattggaacggatgtaaaagtcagttagttatacagttatgagcacgctaataaccggcaaaatagctcaaagaaaacataacacattgcgtaacaaaaagagatgaaactagtggaggtggaaattatcgttataaacgtattaattaactttacattacatagtttcccactatgtctgttccaaaaataaattgttttattaaatatttttagtagtttattatatacattttggtatagtgggaggatatcagtgtgactttcggcctaaaatcaacaacggacccaatctttacggtgaggcagatccttaaaaaaaaaccctagcgttcggcgtcgacacccaccacgtatccgtagagttcaaagtggcatacgactcggttaataagttaatagatattaacttctcctggctatagtagaattccaaataccgcttcatcttattcaactaactcaacttacactcacaggagcagcgagtatggtcagaatccagaacaatcttccaaaacccttccattgcaaaattggactcagacagggtaaagagctctcgcgtcttttatttaagtttgttctagaaaatggaattcgagaggtaatggcactgtctttaacaaatctgtacattgtaagttgttggatatccagatgacatcgacatcatagttaggtccacagagcttctgaccgatgcattccggccattaagggcatctacacagagaatggcactaactataaatgaccaaaagaccaaaatgtgttatacctactaggtcaaggaaccagacagctagaagaataatatttgctggattcgaccgttacttgatggaagttcattttatctaacaataaaacactgaaaacgccgtcctctatactttcacaaaatttattacaactatgtgactacagctgtttcggcagag

SEQ ID NO: 4555 - DNA, 1443 bp, Diabrotica virgifera
atttgagatggtacttaagataatttatttatttacaaaaaatacttattattaatcgatagctaaatttattatatcaatacagtcaaatttgcgttcatatgattttatcaaataatatacatggtaattaataaataaaaggatattattttacctgcagataatatataaaatttatagatagtataaaaaatattaaatattattgttcaataattgctggctgggtatctaaactacaatatctgggacatgttatgaggggcgagcgttataacttgttacaattgataatgcaaggaagaatacagggtagaaggagtcgcggaagaagacgcatctcctggttaaacaatttgagagcttggtttaattgcacttctgctgatctctttagagcagcggtatcgaaagtgcgaattgccgtgatggttgccaaccttcttagaggagatggtacatgaagaagaagaagggtatctaaacgacagcaagttattggaacggatgtaaaagtcagttagttatacagttatgagcacgctaataaccggcaaaatagctcaaagaaaacataacacattgcgtaacaaaaagagatgaaactagtggaggtggaaattatcgttataaacgtattaattaactttacattacatagtttcccactatgtctgttccaaaaataaattgttttattaaatatttttagtagtttattatatacattttggtatagtgggaggatatcagtgtgactttcggcctaaaatcaacaacggacccaatctttacggtgaggcagatccttaaaaaaaaaccctagcgttcggcgtcgacacccaccacgtatccgtagagttcaaagtggcatacgactcggttaataagttaatagatattaacttctcctggctatagtagaattccaaataccgcttcatcttattcaactaactcaacttacactcacaggagcagcgagtatggtcagaatccagaacaatcttccaaaacccttccattgcaaaattggactcagacagggtaaagagctctcgcgtcttttatttaagtttgttctagaaaatggaattcgagaggtaatggcactgtctttaacaaatctgtacattgtaagttgttggatatccagatgacatcgacatcatagttaggtccacagagcttctgaccgatgcattccggccattaagggcatctacacagagaatggcactaactataaatgaccaaaagaccaaaatgtgttatacctactaggtcaaggaaccagacagctagaagaataatatttgctggattcgaccgttacttgatggaagttcattttatctaacaataaaacactgaaaacgccgtcctctatactttcacaaaatttattacaactatgtgactacagctgtttcggcagag

SEQ ID NO: 4556 - DNA, 3337 bp, Diabrotica virgifera
  SmartBlast Evalue=0; Info=Megator n=2 Tax=Tribolium castaneum RepID=D6WGQ0_TRICA
ctggattatatatttattacaaacgcctacacagcagggatggccttacacatcgctaataaattaaataatccttctcagtcgaacatcaaaactctttcacaaaaaaaaataataaatcctattattaataaatttttttccgtacatttataaaacaaaatataagacgaaactaaaaccttaacaatgctcatggaatgaattaaaaacgaaatgaggtttagaaacgtctatcaaatggcctctggccacgattgcgggctctccttgctaccgtcctcgattggtaaccttggggtgatctatttctgtcttggggatgttgatgtcgttggggcgatctgtcgctccaaacaatcggagttggaccagatcgttgattagcacctctcggtagtgacgaccttgtagatcttcgagcagaattcgagcctctttgagctacgccccgtgaattagaactgggagaagcctccgcttcacgtccttcttcttcgccttcttcggctatgggtggcttctctccttcagaacttacaccatcgtcaccttcgagcatttcttcggcttgttcgtgctgctgggcgccttctgatgaggtgccagctacagctgggggacccatatcgcccgaactactttcacctatggtttcattatcgtcaacttcgccacttattacaatcgatggggtttcagcatctgactgttggctagtaccttgctcttcactaccgggaattccttcttgtggagaagactgtagcggtgtcgtgggtacgctccttccggtaccatcagtgccactacttattgcttcagactgtggttgttctgaagtttcttcttccacgttatcttcttctctctcactttgatttggcacttcactggaatcatctatcacctcaacttcattgccggcctcctcttcatcttccacatcttggcaatcagcatcttcataattatcctgttccattccctccatatcatatccctcagtatcaggatcatcttgctcatcatcagcaccttcgccttcatcagcagcaccttcttcatcactttcaactctatcacattatcatcatcatgatccctttgactgcttgtaggaacttgatactcaacatctaaaccactatcacttacagttccagcttgctggatcctcgtcctcttagtttgttgttgcgtcttattttgctcatcggattgactactatccatatcagcttctcgctgtcttttatgcccagcctgtgtcgtcgtcacagtgttcgagctgctactgctcgtaccctgttcctgagttggtccactgctaggtggttcaactcttggtagtacaagagcaacggcttgggtttgtggagctgcctggacctgcatactactctcgtcatcttctgtatcttgagacgattgggtgggaggtacggcgacttggcgaggacccaacattgcaggactagcagaactagtggcaggaacgtattctgtgtgagaactagtggggctgctagaaagggcttctattgaactggatcctgttgtgtgcacctgttgctgtggtggtaccataactgcgctgggactctgactagttggtaacacaacaccagtgcgtagttgtgcagacattggtctaatacttgctaaaggaggttccccaccacttcgccatggttgtataggaacagattgtgtttgagtatttgtagagtggcctgccattggtttaatatcagcagttggccgttcagtggaagacttttcagtggtgcttgaactagtgctaggttttgatccttgttgaaggcccaattgcctctgcaactgcgatatcctttggttaagactttcaacttctgttgtatgcttatcttgttcctgttgtttttcttcaagaatatcgtccctctctctttccagcaaagctattttctcgagcaattcatcaactttagcagagtcttcgctttccttttcagctccgtctgatcttcccggtctattaacttcttccttcaagttgttgttctgttctgttaaactcacgatcctttccttggcgttcttaaacagcgccttaaatctttcttccttctcttgactggtttgcttcagagtatcaatttcctttcggtaattctctatttgctccgttgtagaagaaacttcttgatttaactggtcaacagtctctttatggtttctttctaattcatttatcttttcttctaattctgaacgctggctttccaacagttcttgcttttcagcactgctcacttgatcagattcgtgctgttcattttgctgtttcagcgcgcttatttctttagtttggtcttcgcattgaatcttgtactttttagctatctttctaacttgggccatattattctttagctcgttaatagtggtatctttagcggccgtttcctcagtaaggccacgagtttcttccttgaacctaattatttcggcactttgttgatctacggtattagtgagttgtgtaacttgtgactgtaggttagatacttcgtcccgtaatctggttatttcttcttgctgctgactactctggttcttcaaagtatttagtttctcctcaagattactcttctcctgttttaatgtgttaacatcatccgttaacttggtaatattggctttttcaattatcaactgtttggataaggtctcccgttctgtctgcaacttcttccaatcttcgggacttgttctgttcgtcttttcaataagcatattagccctctgtctccatctggtacattcggcacgtaatgatatattttcactttgtaattggtcagcctttgttgtgagctctctgttcttctcctgcaaaggttcgacttcagtttcgaatgtttctgctttgctttggaggtctgctaattgggcagctagagtatctcgttcctgtcttagagctctattgctgtcggtgatggcattaagagtttctaatttacgaagtacttctgcatgtttagcagcggatacaacagagatctccgttttctgcctctccgtttcaacagactctttagcctcatcaagttgctttttaatcatttcaaattgtgtcttcaatctggaatgttcagcttcaactatgtcggctttgcttacagcgatatctttctcttgtcttagatatttaataatcttcagaagttgttcagacgatttcgtttcatcttctgtgaatgatttcgagaaggaggtatcaccgatagatgtattttgggtttgactgtcactgacttgggcttgtaggagtgcaagctgtgta

SEQ ID NO: 4557 - DNA, 955 bp, Diabrotica virgifera
  SmartBlast Evalue=1E-49; Info=Megator n=2 Tax=Tribolium castaneum RepID=D6WGQ0_TRICA
ctggattatatatttattacaaacgcctacacagcagggatggccttacacatcgctaataaattaaataatccttctcagtcgaacatcaaaactctttcacaaaaaaaaataataaatcctattattaataaatttttttccgtacatttataaaacaaaatataagacgaaactaaaaccttaacaatgctcatggaatgaattaaaaacgaaatgaggtttagaaacgtctatcaaatggcctctggccacgattgcgggctctccttgctaccgtcctcgattggtaaccttggggtgatctatttctgtcttggggatgttgatgtcgttggggcgatctgtcgctccaaacaatcggagttggaccagatcgttgattagcacctctcggtagtgacgaccttgtagatcttcgagcagaattcgagcctctttgagctacgccccgtgaattagaactgggagaagcctccgcttcacgtccttcttcttcgccttcttcggctatgggtggcttctctccttcagaacttacaccatcgtcaccttcgagcatttcttcggcttgttcgtgctgctgggcgccttctgatgaggtgccagctacagctgggggacccatatcgcccgaactactttcacctatggtttcattatcgtcaacttcgccacttattacaatcgatggggtttcagcatctgactgttggctagtaccttgctcttcactaccgggaattccttcttgtggagaagactgtagcggtgtcgtgggtacgctccttccggtactagtctcatccaagctgccgggctccataagcgtctgttcgggcacgtgctctacactgctggatccggctatatttgtcggaagagactcgttaaaagtgaaccttccgctggtaggcacgtgaggagaactgactgcttcgccgaaaccatccga

SEQ ID NO: 4558 - DNA, 2214 bp, Diabrotica virgifera
  SmartBlast Evalue=1E-178; Info="Serine/threonine-protein kinase MST4, putative n=1 Tax=Pediculus humanus corporis RepID=E0VBU1_ PEDHC"
agggggtatagtggtgttaatcatcaactattactctataagaagaatgtctgcttaaaatttaaccagtaataagctcaatagatataagatattgtcatgtaaatggtaagtatttttaacaacttggaataacgagagaataactttcaaccgaaccaacaaattttcaattagcaactctccactgaaatctaaccaaattcttcctacaacgtatcccttacaactttatctaacacacccttaagtctctgttctgaaatggatggcaccaatttttgcaccaattcacaaatgaacatttcacttatccctgggcttgtcttctcggcaatctcaaatgcattctctagctcctctatcgcgtcacttgatttatgagatgcttccgcgcttcgcctgttgtactggtgctttctctgtaactctgatataagcgggtatataaaacttccaagtaccggcgatctactttcgattttcccactataatttgagccagattttctatttgctttcttttccgccgctatactatcacctcggtggtccaatggactcaattcacgagatattctcttctctttgtcctttacatctgttctctcacgttctcgttctcggtcggcttctttttctcgatctctgtccttatcttttctgttgtctagtggcgattgtactaccggcgattttgacaagttagatttatctggtttataatgattgagattggaatcagtcggaggagatttgctcaacataggacccgaaccgttttgaactttatttccagctttgtgattaggggatggtatttcgtccaagggtaatttcatatttcctttcaccgtcatgatccatgggtcatctaagtcgccatcctgttttggttcctcagaatcggaattttctgattctgtttcagattcttcgttcctagtacacctccattttttgtatctgtctataagatctattaagtaggaattctttttcgcctttcttataaatggatattttaataactccttcgctgttggtctattttctggatctttgtttaaacaggcttccacaaaatccttgaattgtttactatagcttcctgttaactggggaggattattcttcggaattaaaaacaacaccctcatcggatgaagctctgcattgggaggttctcctttggcaagttctatggctgtgatgcctaaactccatatatcagctttagaatcgtacgcggactgcttgatcacctccggagccatccaaaagggggttcccacgaaggtatttcgcttacttgttgtattggtcaattggccggcaacgccaaaatcagctagtttaacgtctcccatttcgctaagcagaacattcgcagctttaatatctctatgtaatttcctttcgctatgtaaataatctaatcccttcaagacttctcttaaaataatagcaatgtgcatttcttcaaagtttcccgctttcatcagatctaaggctgacccgccacccaaatattccataatgatccatagttttgtaccctttaagtaagatccataatatttcgtaacaaacgggctgtcgcactgggacagcaccataatctcctgttgaatatcttcgatttcatcttcggcttcttctaaatcgataattttgatagcgactacttgcgtagttctgttgtcaatacctttaaaaacttctccaaacgaacccttgccgattctttcttgtttggtgaaaatcaattctggatcgaccttctcattaaaggccatatctgaaggtaggtagagcactagttcgatggcctttcacccaaaggtgtcaacaaaatggattttccttaagaaatatttaccgaaaaaattaaatcacttttattacagtcaacaaacatcactcaagagattctaatttctacacgatccatttggtaaaagatccgtttgtaaacaaaaaaatttgcattcctcaggtgagcttgacgaacacacctttgaactaattacgcgacaaatcaatcacactatttttaacttggaatggaccgatattaatacgacaaatactctaaatattaaataataggaattatgtcgatttcacttctcttcagaaacatctgacattttacacataacacttgtcagaagaagccatatgcatttttgcattgtgacatgacaagac

SEQ ID NO: 4559 - DNA, 2081 bp, Diabrotica virgifera
  SmartBlast Evalue=1E-179; Info="Serine/threonine-protein kinase MST4, putative n=1 Tax=Pediculus humanus corporis RepID=E0VBU1_ PEDHC"
agggggtatagtggtgttaatcatcaactattactctataagaagaatgtctgcttaaaatttaaccagtaataagctcaatagatataagatattgtcatgtaaatggtaagtatttttaacaacttggaataacgagagaataactttcaaccgaaccaacaaattttcaattagcaactctccactgaaatctaaccaaattcttcctacaacgtatcccttacaactttatctaacacacccttaagtctctgttctgaaatggatggcaccaatttttgcaccaattcacaaatgaacatttcacttatccctgggcttgtcttctcggcaatctcaaatgcattctctagctcctctatcgcgtcacttgatttatgagatgcttccgcgcttcgcctgttgtactggtgctttctctgtaactctgatataagcgggtatataaaacttccaagtaccggcgatctactttcgattttcccactataatttgagccagattttctatttgctttcttttccgccgctatactatcacctcggtggtccaatggactcaattcacgagatattctcttctctttgtcctttacatctgttctctcacgttctcgttctcggtcggcttctttttctcgatctctgtccttatcttttctgttgtctagtggcgattgtactaccggcgattttgacaagttagatttatctggtttataatgattgagattggaatcagtcggaggagatttgctcaacataggacccgaaccgttttgaactttatttccagctttgtgattaggggatggtatttcgtccaagggtaatttcatatttcctttcaccgtcatgatccatgggtcatctaagtcgccatcctgttttggttcctcagaatcggaattttctgattctgtttcagattcttcgttcctagtacacctccattttttgtatctgtctataagatctattaagtaggaattctttttcgcctttcttataaatggatattttaataactccttcgctgttggtctattttctggatctttgtttaaacaggcttccacaaaatccttgaattgtttactatagcttcctgttaactggggaggattattcttcggaattaaaaacaacaccctcatcggatgaagctctgcattgggaggttctcctttggcaagttctatggctgtgatgcctaaactccatatatcagctttagaatcgtacgcggactgcttgatcacctccggagccatccaaaagggggttcccacgaaggtatttcgcttacttgttgtattggtcaattggccggcaacgccaaaatcagctagtttaacgtctcccatttcgctaagcagaacattcgcagctttaatatctctatgtaatttcctttcgctatgtaaataatctaatcccttcaagacttctcttaaaataatagcaatgtgcatttcttcaaagtttcccgctttcatcagatctaaggctgacccgccacccaaatattccataatgatccatagttttgtaccctttaagtaagatccataatatttcgtaacaaacgggctgtcgcactgggacagcaccataatctcctgttgaatatcttcgatttcatcttcggcttcttctaaatcgataattttgatagcgactacttgcgtagttctgttgtcaatacctttaaaaacttctccaaacgaacccttgccgattctttcttgtttggtgaaaatcaattctggatcgacctttcttttcaatgccatgtttatgctatttcctcgtattgacaaatccaacattccatggaaggaccacgacataggccttggtatagttttgccattacttctgaaaaagtctttttgtccacagttgccttcatcagatccgaaatttgaagctttttgaaacattatcgataaatcatcaacacattggtttgttgttctgtcacacacgattctcactcaccgcgaagaagtcacacttaataatttgaataaattttcattatcacaaagtttattcgcagtattaataaattg

SEQ ID NO: 4560 - DNA, 2483 bp, Diabrotica virgifera
  SmartBlast Evalue=2E-67; Info=Neuropeptide receptor B3 n=1 Tax= Bombyx mori RepID=B3XXQ1_BOMMO
gttttatctcacgtagatatctccaattcggatgtgggagctcagagaaaaaaacaaatgataagattccgcgactatcgccagtaattatgtttggttagataagattggagggtttcttcattaaaactgatttttgtgtgtgtgtaaagagtatgtggtgtttaatgttatttcgagtgggattatctatcttatttttctttcatacaacattagctcttcctgatgaatgtagttctatttcgcctgtaagaagttgtttactgaggacaaactacatagatatacggctgtggagatattacgctggctatttttgctacatttatacaaatgaagccaggttggatatcaaatataattccactagttacaacataacatgtggcggtgaaaacgcaacgattcccgtagcaagggtggaggagaacataatagctagttatgattatacagataaagaagatgtccagcatatcagaaaatcgtttaagactgacgcggtttttaaaaattatatatcttgttgccaaggagctataaggtgttgcaatgatcacatggacgaggaaaatgttattccaacgcaatcacaatgtcctgtaatatgggatgcctggtcttgttttccacaaactaaagttaatactacagccaagctaccatgtagtagccaagcataccaatctcccgatgaagtctgtactttagaaagcgaaaaacactgcatctggaacggaacaaatcaaaaagcacaatggatccaacaaactgactacacaacgtgtgccatagcgccggtttacgaacgaagatacaacttccatattatatttctgggagtctgtatcggcttttgtataccggcaatatctatatttttctttttcgaaaaacttcgaaagaccatcagagttattctgcataggaaccttttgatagccattgtggtcaggaatgtcttgacaattatgtgcaaagaactagtgctgctagacgctttaaaagctccggctctaagtcatcgtacgatggacaacaatggagtcccatgtcggatattggcttttatggagacctcagctataaatagtatatacgcttgtatgtttctagatgcttattatctacacaaggtaatagtacgagcgtttgcaaaagaaacaagaatgatccatatttatatagtactggcagctttaacttttacatttagcattgtatgggcgataatcatgggcgtcaaagatgctcctcattgttggatggtggatttagatggcctccagtggaccgttgatggttttagaatagctgtcttggtgatcaacggaataatgttagcagatattataagagtgatgatattaaaactgagacacggaagtactaccaaacaaactatggctgcgtttagagcaacaatctttttgatcccactttttggtcttcacatcatcgtaaccgctaaaaagatcgtttacgataactcttgtactgccgaagacatttacgactttttcagatatgccatggagggcttgcaagggatcatcgtgtctatattgttttgttacgcgaataatgaggtacggggtgaaatgaaaaacggacgcatatgaccggtactagaaattcgcaattagtgaaatcgattcatctctgaaatataaataaacgtaccagttttcgttttccttaagttaaattgtcttaaaattgtctgaggaatctcctgtcttcatttgtcggtagagtttctggacaccctttataagagcatggataatttcggcatctactagcgacaataagtagaaaagtggatgcaaatctcagtagctgtagataatagtaattagagtaccacttttattaaccaatcgtctcttttctttaaaatacatttttctatataaaataacgaagttaataaacgacaaaaaaacggtggcatctaatcagtacccagaactcgttactcagtactaccccatctcagttctctatcggttattcacgacattttatacttttggcccctatttcatctccagtgcccatcaatggtaatggtaggttgttggtgggagtgcgggcatacagagagagggccagctgctggcagaaatgtcagtgtcatcgtaaaatgttttttcttccatgtagttcattgtgaattgtgtaaataaatatcttatttggcaattacttgcagtatgtcctttttctgtcattacatcccttcctccttcttattttttcttgcctaaagtgtcataagctatctttttatcacatgttttcaaattctcccattcataatataatatatctgctagatttgtttccagttttctacttattctacttgccctaaatgtataatatttatttatttcttaatttataattattgtagctttaaaaacattccttatgttgtaaatttaaaatttgaaatagatagcaaaaaacag

SEQ ID NO: 4561 - DNA, 1773 bp, Diabrotica virgifera
  SmartBlast Evalue=8E-69; Info=Neuropeptide receptor B3 n=1 Tax= Bombyx mori RepID=B3XXQ1_BOMMO
gttttatctcacgtagatatctccaattcggatgtgggagctcagagaaaaaaacaaatgataagattccgcgactatcgccagtaattatgtttggttagataagattggagggtttcttcattaaaactgatttttgtgtgtgtgtaaagagtatgtggtgtttaatgttatttcgagtgggattatctatcttatttttctttcatacaacattagctcttcctgatgaatgtagttctatttcgcctgtaagaagttgtttactgaggacaaactacatagatatacggctgtggagatattacgctggctatttttgctacatttatacaaatgaagccaggttggatatcaaatataattccactagttacaacataacatgtggcggtgaaaacgcaacgattcccgtagcaagggtggaggagaacataatagctagttatgattatacagataaagaagatgtccagcatatcagaaaatcgtttaagactgacgcggtttttaaaaattatatatcttgttgccaaggagctataaggtgttgcaatgatcacatggacgaggaaaatgttattccaacgcaatcacaatgtcctgtaatatgggatgcctggtcttgttttccacaaactaaagttaatactacagccaagctaccatgtagtagccaagcataccaatctcccgatgaagtctgtactttagaaagcgaaaaacactgcatctggaacggaacaaatcaaaaagcacaatggatccaacaaactgactacacaacgtgtgccatagcgccggtttacgaacgaagatacaacttccatattatatttctgggagtctgtatcggcttttgtataccggcaatatctatatttttctttttcgaaaaacttcgaaagaccatcagagttattctgcataggaaccttttgatagccattgtggtcaggaatgtcttgacaattatgtgcaaagaactagtgctgctagacgctttaaaagctccggctctaagtcatcgtacgatggacaacaatggagtcccatgtcggatattggcttttatggagacctcagctataaatagtatatacgcttgtatgtttctagatgcttattatctacacaaggtaatagtacgagcgtttgcaaaagaaacaagaatgatccatatttatatagtactggcagctttaacttttacatttagcattgtatgggcgataatcatgggcgtcaaagatgctcctcattgttggatggtggatttagatggcctccagtggaccgttgatggttttagaatagctgtcttggtgatcaacggaataatgttagcagatattataagagtgatgatattaaaactgagacacggaagtactaccaaacaaactatggctgcgtttagagcaacaatctttttgatcccactttttggtcttcacatcatcgtaaccgctaaaaagatcgtttacgataactcttgtactgccgaagacatttacgactttttcagatatgccatggagggcttgcaagggatcatcgtgtctatattgttttgttacgcgaataatgaggtacggggtgaaatgaaaaacggttatagaaaagcctgcatctacctaaatcaaaggtttggctggaatttgggaggtgatctcctctatgataaaagacgagccacaacagcaacttttgttcaagaaggaaatttttaaacattctacaactttactcactaaaaaataagagcctggc

SEQ ID NO: 4562 - DNA, 2151 bp, Diabrotica virgifera
  SmartBlast Evalue=1E-146; Info=E3 ubiquitin-protein ligase HUWE1 n=1 Tax=Camponotus floridanus RepID=E2AL17_9HYME
cctcattctcttctccatcttcaatattctcatcgtcggcctcgttatcatcattaccctcgtcgtctacttgatctgatggattggaatctgattcaccagaatctgtgctcattagttcctcggttgcttctccttcatcaatatccatgttgcctctgctagttggaacgctattgtattcttgattggtgtcattgcttctttggtctaaaatgtgttccatcatttcttcaagtgcattttcgagttcgccggaactagtggtgttgtcaagactagacgggtcatgctctgtgttttcagaatcttctatctcctctccatgggcattagcaccctcagtagaagtaccactttgagcaatgtgattctcatcagctgttggttgattttttcttgatttactgttattagcagcagcaggctgattaataattcttgatagagattctaaaggttttaatgccaaatttgcagtaaatgcagtgtttggtgatgacaaatctaaatagtgtgtaatcttggctaaatcattaaatattccccttcgcatcaaaagcttaacgatattgctaatactgcaatttgtccacctactagcatgaggcaaaggacaattgtcgatcatattggagataatgtcacaaatacattgaacctgattatgtttctgataagactctggtaaagataatgctctggttagagcaacttttacctcagagactaaagtaatttgagcttctggtgaatgattagaagaagctaaagctgcaactagcattcttcccatagcagcacaatccaaatcagaaaaattatctgctactgataagattttatcaaaaatgaaagctagtgcagatgtctcttcagttatggttccagattcatcaggtttgtatttataatcagtgatgagttttgcaattgggccaaatgatactacagcgtctgctaatatcttcaggataaccgactttggtaacattcgtttcttaggaacagcactttcattttttttagtggaagtattttcacttgtgctggtttcagcattttcagtttcatgtcttcttaaaatttctgcaagagaaacaaacggatttgaatcttctgatgaatcatcacttgtgtccatacctttatcgtcttctagaggttttaataaggcatctaataaatcagagataacttctatggacacaggctcctctaatggtggtgctttcattcgagatggtggctcgactcttaaaggaatcacattttctggatcttcgcctttagcagcaactgtgtcaatccttaaaatagttgttgctacctggaaaaatgactgcggagagcgagtaacagctccaccgacttgtcttgataaatagatcaagtctttataagggggaggaattgtggctaaggtgcgtgctctaattaccttttcaatagcatattttaacgtatttggctcttctaatgcatgtctaatcaaaattgtagctaatataccaaaacctccaaaatctgtgatttgtctcatttttaacaaacattttacacctccttcttttacaaagagtgtagcaagcgcaaagtctctggtatatcttacacagatttgtaaaatcgaatgcaaaagattcttttctactggaagatgtaataatttcacacacgctataataatttgatgttttttgcttctggctaagatctgcgacaagagaacatcttttttcttctttgtcattgagtgatatatgcaatggtctaggtatgtctggtccgtgaatattactgcaagttggatgtgtcaatgtggcaggaatcattgaaattggtctactatttccggtctcatcattcatttgtaacatattacaaaatgaaattgtatacctttttctaccacaagtaacttttacgaattgttctccactccagtatgcttcatttattagttgattattatttatagaatagcgtgtccacttccctgtaactacatcataccatctccaaatacgagtagttgttctatgcatgtaatatttccttgttgtagatgttgcaactttcgaaactgcgtctaatagtaataaacatggagcaagccatttgggttcctccatcttttgcaatgtggac

SEQ ID NO: 4563 - DNA, 2094 bp, Diabrotica virgifera
  SmartBlast Evalue=2E-76; Info=E3 ubiquitin-protein ligase HUWE1 n=1 Tax=Camponotus floridanus RepID=E2AL17_9HYME
cctcattctcttctccatcttcaatattctcatcgtcggcctcgttatcatcattaccctcgtcgtctacttgatctgatggattggaatctgattcaccagaatctgtgctcattagttcctcggttgcttctccttcatcaatatccatgttgcctctgctagttggaacgctattgtattcttgattggtgtcattgcttctttggtctaaaatgtgttccatcatttcttcaagtgcattttcgagttcgccggaactagtggtgttgtcaagactagacgggtcatgctctgtgttttcagaatcttctatctcctctccatgggcattagcaccctcagtagaagtaccactttgagcaatgtgattctcatcagctgttggttgattttttcttgatttactgttattagcagcagcaggctgattaataattcttgatagagattctaaaggttttaatgccaaatttgcagtaaatgcagtgtttggtgatgacaaatctaaatagtgtgtaatcttggctaaatcattaaatattccccttcgcatcaaaagcttaacgatattgctaatactgcaatttgtccacctactagcatgaggcaaaggacaattgtcgatcatattggagataatgtcacaaatacattgaacctgattatgtttctgataagactctggtaaagataatgctctggttagagcaacttttacctcagagactaaagtaatttgagcttctggtgaatgattagaagaagctaaagctgcaactagcattcttcccatagcagcacaatccaaatcagaaaaattatctgctactgataagattttatcaaaaatgaaagctagtgcagatgtctcttcagttatggttccagattcatcaggtttgtatttataatcagtgatgagttttgcaattgggccaaatgatactacagcgtctgctaatatcttcaggataaccgactttggtaacattcgtttcttaggaacagcactttcattttttttagtggaagtattttcacttgtgctggtttcagcattttcagtttcatgtcttcttaaaatttctttatcgtcttctagaggttttaataaggcatctaataaatcagagataacttctatggacacaggctcctctaatggtggtgctttcattcgagatggtggctcgactcttaaaggaatcacattttctggatcttcgcctttagcagcaactgtgtcaatccttaaaatagttgttgctacctggaaaaatgactgcggagagcgagtaacagctccaccgacttgtcttgataaatagatcaagtctttataagggggaggaattgtggctaaggtgcgtgctctaattaccttttcaatagcatattttaacgtatttggctcttctaatgcatgtctaatcaaaattgtagctaatataccaaaacctccaaaatctgtgatttgtctcatttttaacaaacattttacacctccttcttttacaaagagtgtagcaagcgcaaagtctctggtatatcttacacagatttgtaaaatcgaatgcaaaagattcttttctactggaagatgtaataatttcacacacgctataataatttgatgttttttgcttctggctaagatctgcgacaagagaacatcttttttcttctttgtcattgagtgatatatgcaatggtctaggtatgtctggtccgtgaatattactgcaagttggatgtgtcaatgtggcaggaatcattgaaattggtctactatttccggtctcatcattcatttgtaacatattacaaaatgaaattgtatacctttttctaccacaagtaacttttacgaattgttctccactccagtatgcttcatttattagttgattattatttatagaatagcgtgtccacttccctgtaactacatcataccatctccaaatacgagtagttgttctatgcatgtaatatttccttgttgtagatgttgcaactttcgaaactgcgtctaatagtaataaacatggagcaagccatttgggttcctccatcttttgcaatgtggac

SEQ ID NO: 4564 - DNA, 2105 bp, Diabrotica virgifera
  SmartBlast Evalue=0; Info=Beta-galactosidase-like protein n=1 Tax=Tribolium castaneum RepID=D6WCM8_TRICA
aaatatgtactatttatttattaaaaaacacttggaaaaataataaatggtatcaatgtgttacataaatgggatcagctacaaagtttatttcgccactggctctgaaatgttcaaaaatgatgattttattttctccagagtgtaaaaatggcgccggtaaatatatagcttgttgaggtcccaatttgaaatattttcctaccggaaaaccgtttactatcactaaaccttttgtccagttgctcatgtctatgtaagtgtctctgatatccgagtccaggattaatgaagcaagatataaggccggaccagaactggaggttggtgtctgccaagaggttaatgcattgttccatgctttcttgaactccaagggcacgatcttccagtcgaaaagctgttggtcgtttagatatacattgccttgccataatcctttaaacgtttggttatactgatagatagtaccaccatgcattctaccccactcttctacgacgatatctatagtagcatttttaacaggttctgtgtttagtaccaatgtggaatctttcaatctccaaaatccaaatccatccaaatctgctctggatttaaattcaggagaaaccaaaacaccattgaccagaaccatgacggtatcacaaacatgtccttcgattttaagaactgtgtttgcctccaagtcaatattctcctttcgataaacgatgtatccatagctctgcccagatccgttattaatatccaacatttccatcgcaataacatttttactgtttagaaccactggtggttgatcagtgagaacgttacgtagaggaagttgttgtgtgatattaatagggggatacgcaatatttggcttcagctctggcatagagggaagtttagttttgattggattatacttggcaagtagatctttaatgtcgtagtacttttgggtgtatcggccagattcgtccagtggtgagtcgtaatcatagctcgtagtaattggaagaaaagcggaattgtcaagcagttcattatttaaatgagctccatttccaaaagcaaagttacttcctccatgaaacatgtatatatttaccgaagctggatactttaagattcgttcataaagatctctcatctcttttgggtctctcgtttgatggttatctgtccagtggtcgaaccagcctatccaaaattccattaccattagaggtttattaggttgcaattctgacaatctctttaaataattttcaggggaatcaccaaaattagtagtttgaaataaaacccctggcaaagttcccgaatctccttctgcaatagggttatcggacgttactaagaagtctgctaaatcattgtctatatatagctgctgaagaagtcctaggtatcttttagatggtttaaaaaaatctttgtagttagtgtatccatattcgttttcaacttgaaaggctattataggcccgccttttaaaaacttgtaaggcaacagttttttcaagaaataattgaagtatctagaaatatgatggttgtaattatcttcgtcagttcggaaacccataggttttccccttaacaaccagcttggaaatccgccgaaattatattctgcgctaataaatggcccaggtcttaaaataacaaataaatcctcttcttgtgctaacttaaggaaggattcaaggtccagaaagtcttgcatatcagatccactggatccaaagtcaaatgttccattgtatggctcgtggaggttccaaggcaaatacgtttcgactgtattcagtccagctgctctcagttgtcgtagacgggttctccagtaagttcgtggaattcgaaagtagtgaacagatccactgtatataaagaatggttttccattaagaaaaaagtgtgtttcattggtagttatacctgatttaattccggattctgtgaaatattcataatttgttggtaaatcttgggccaaacaaaaagttatgaatgttaataaaattggggacaattttaatattttcattttactattacccatcgttttaattattttgtaatacaggtaacaagacaaaggaaat

SEQ ID NO: 4565 - DNA, 2127 bp, Diabrotica virgifera
  SmartBlast Evalue=0; Info=Beta-galactosidase-like protein n=1 Tax=Tribolium castaneum RepID=D6WCM8_TRICA
aaatatgtactatttatttattaaaaaacacttggaaaaataataaatggtatcaatgtgttacataaatgggatcagctacaaagtttatttcgccactggctctgaaatgttcaaaaatgatgattttattttctccagagtgtaaaaatggcgccggtaaatatatagcttgttgaggtcccaatttgaaatattttcctaccggaaaaccgtttactatcactaaaccttttgtccagttgctcatgtctatgtaagtgtctctgatatccgagtccaggattaatgaagcaagatataaggccggaccagaactggaggttggtgtctgccaagaggttaatgcattgttccatgctttcttgaactccaagggcacgatcttccagtcgaaaagctgttggtcgtttagatatacattgccttgccataatcctttaaacgtttggttatactgatagatagtaccaccatgcattctaccccactcttctacgacgatatctatagtagcatttttaacaggttctgtgtttagtaccaatgtggaatctttcaatctccaaaatccaaatccatccaaatctgctctggatttaaattcaggagaaaccaaaacaccattgaccagaaccatgacggtatcacaaacatgtccttcgattttaagaactgtgtttgcctccaagtcaatattctcctttcgataaacgatgtatccatagctctgcccagatccgttattaatatccaacatttccatcgcaataacatttttactgtttagaaccactggtggttgatcagtgagaacgttacgtagaggaagttgttgtgtgatattaatagggggatacgcaatatttggcttcagctctggcatagagggaagtttagttttgattggattatacttggcaagtagatctttaatgtcgtagtacttttgggtgtatcggccagattcgtccagtggtgagtcataatcatagctcgtagtaattggaagaaaagcggaattgtcaagcagttcattatttaaatgagctccatttccaaaagcaaaattacttcctccgtgaaacatgtatatatttaccgaagctggatactttaagattcgttcataaagatctctcatttcttttgggtctctcgtttgatggttatctgtccagtggtcgaaccagcctatccaaaattccattaccattagaggtttattaggttgcaattctgacaatctccttaaataattttcaggggaatcaccaaaattagtagtttgaaataaaacccccggcaaagttccagaatctccttctgcaatgggattatcggacgttactaagaagtctgctaaatcattgtctatatatagctgctgaaggagccctaggtatcttttagaaggtttaaaaaaatctttgtagttagtgtatccatattcgttttcaacttgaaatgctattataggcccaccttgcaaaaacttgtaaggtaacagtttttttaagaaataattgaagtatctagaaatatggtagttgtaattatcttcatcagttcgaaaacccataggttttcctcttaacaaccagcttggaaatccgccgaaattatattctgcgctaataaatggtccaggtcttaaaataacaaataaatcctcttcttgagctaacttaaggaacgcttcaagatccagaaagtcttgcatatcagatccactggatccaaagtcaaatgttccattgtatggctcgtggaggttccaaggcaaatacgtttcgactgtattcagcccagctgctctcagctgacgtagacgggttctccagtaagctcttggaattctaaagtagtgaatagatccactgtatataaagaagggttttccattaagaaaaaagtgtgtttcgttggtagttatacctgatttaattccggattctgtgaaatattcataatttgttggtaaatcttgggccaaacaaaaagttatgaatgttaataaaattggggacaattttaatattttcattttactattacccatcgttttaattattttgtaatacaggtaacaagacaaaggaaataatcatttactttaatttcttt

SEQ ID NO: 4566 - DNA, 2139 bp, Diabrotica virgifera
  SmartBlast Evalue=9E-73; Info=Glutamate receptor Gr2 n=2 Tax= Bombyx mori RepID=Q2F692_BOMMO
tattttagaaactttctagatttctagaaatttaaggctgacgtcattgacatttgacattgacaagtttaaagtttattggcgaagcgaagcgaagtcaccggagaagtgattgagaaaaattccagaatattgtagtttgccccatttttacaacaaatatttgtttattgattacaacacagtgaaagatgtctcagtggaataaggagcaatatcctccacctcctggcggacaaggatactatggcggtcaaccgggatatggtcaaccaggctaccctcctccacaagccggctaccccccacagggcggttacccaccgcaaggcggctatccaccacaaggcggcggctaccctacggctccacagccgggctaccctccagcgggacctcaacctggatttcagccacctcctccgcagtacggagcagattacgcagcaggtgatgaacatgtacccttctctagtaacgccactgataactatggaactggttacaatggtggtgaagatcccgaggtgaaaggattcgacttcaacgacgcttcgattcgaagaggattcatacgaaaagtttattcgatactctcagtacagctgttaataaccttggccttcatctgttggttcgtctatcacgcgccgactagaaaatacgtccaaactcaccacgctttgttctacatttctttagtgatggttatagtggctttgatcgctttggcttgctgcggagagctgcgcaggaaagcccccgccaactacatcttcctgctgatattcactctggctgagagcttctgtctagcctgcgcctcctccacctacaaagccgacgcagtagccatagcagtgggcataacggctgctgtatgtctgggcctgacactctttgcctttcagaccaggtgggattttaccatgatgggtggcatactttttgttgccgttttgatacttttcctcttcggaatcgtcgctatcttcgttcataataagatcgttcaattggtatatgcctctttaggcgcattgatcttctcggtgtatctggtttacgacacgcagctgatgatgggaggaaaacacaaatattccatatctcccgaagagtacatttttgccgctattaacctctacgtagacgttatcaacatatttatgtatattttggccatagtgggacgcgctcgagattaatcaagtttttatttttttttgttttatttttatttgtttgttaacgttggcaacttaattgttaatgataaaagcggtaaactaagaaccagcgttaggccttttgtttatataataaccaaagaactctggtgtgagaaatgtatatcgcgtctcgagataagtcctttgttgcacataattaacaagaaataccaactcatttaaaaatcttccagataacatttaaggatatttttgattatttcagttatttgctcgacagctgtcaatatcgtcaggtgtcaaaatttgacgcctactacaatttgacgtatgccaatattcacagaagtcaaaacccctcagccatgaacacttaatagctgtcaaaacagttcacagtctcgatttttatcataaattcagtcacgaaattaatttttatcaaccaaattgagattcttttgtttaaaatcttaaaaattaatgttcctaatcaaatggaatggaaccgatgaagcagatctagtgcccgctaaacaggctaatataaggtgtccacaggttgtcataaaattctacgaagaaaagcttaaatggcatgcgccctcgctagaagattcaaaatgcgagtagatgtaatgtttagattatattttaggtttaaatcatcaaattgtgagaagttttaactctaaccacgaacaataattagtttatacttactgattactggtttttaacattctgtaaaaataaaataaagaagtgaacaagttaaaaaaattctcataaagtgctttggattataatctcatttcaatattcttctacgattttttaatagcgttactttttaatgcaatggcatttaaataaacgttgatcttttatttaatttaattgatctttcagtttttttttattcaaaaaatgtaaaaggtggccc

SEQ ID NO: 4567 - DNA, 2103 bp, Diabrotica virgifera
  SmartBlast Evalue=8E-73; Info=Glutamate receptor Gr2 n=2 Tax= Bombyx mori RepID=Q2F692_BOMMO
tattttagaaactttctagatttctagaaatttaaggctgacgtcattgacatttgacattgacaagtttaaagtttattggcgaagcgaagcgaagtcaccggagaagtgattgagaaaaattccagaatattgtagtttgccccatttttacaacaaatatttgtttattgattacaacacagtgaaagatgtctcagtggaataaggagcaatatcctccacctcctggcggacaaggatactatggcggtcaaccgggatatggtcaaccaggctaccctcctccacaagccggctaccccccacagggcggttacccaccgcaaggcggctatccaccacaaggcggcggctaccctacggctccacagccgggctaccctccagcgggacctcaacctggatttcagccacctcctccgcagtacggagcagattacgcagcagataactatggaactggttacaatggtggtgaagatcccgaggtgaaaggattcgacttcaacgacgcttcgattcgaagaggattcatacgaaaagtttattcgatactctcagtacagctgttaataaccttggccttcatctgttggttcgtctatcacgcgccgactagaaaatacgtccaaactcaccacgctttgttctacatttctttagtgatggttatagtggctttgatcgctttggcttgctgcggagagctgcgcaggaaagcccccgccaactacatcttcctgctgatattcactctggctgagagcttctgtctagcctgcgcctcctccacctacaaagccgacgcagtagccatagcagtgggcataacggctgctgtatgtctgggcctgacactctttgcctttcagaccaggtgggattttaccatgatgggtggcatactttttgttgccgttttgatacttttcctcttcggaatcgtcgctatcttcgttcataataagatcgttcaattggtatatgcctctttaggcgcattgatcttctcggtgtatctggtttacgacacgcagctgatgatgggaggaaaacacaaatattccatatctcccgaagagtacatttttgccgctattaacctctacgtagacgttatcaacatatttatgtatattttggccatagtgggacgcgctcgagattaatcaagtttttatttttttttgttttatttttatttgtttgttaacgttggcaacttaattgttaatgataaaagcggtaaactaagaaccagcgttaggccttttgtttatataataaccaaagaactctggtgtgagaaatgtatatcgcgtctcgagataagtcctttgttgcacataattaacaagaaataccaactcatttaaaaatcttccagataacatttaaggatatttttgattatttcagttatttgctcgacagctgtcaatatcgtcaggtgtcaaaatttgacgcctactacaatttgacgtatgccaatattcacagaagtcaaaacccctcagccatgaacacttaatagctgtcaaaacagttcacagtctcgatttttatcataaattcagtcacgaaattaatttttatcaaccaaattgagattcttttgtttaaaatcttaaaaattaatgttcctaatcaaatggaatggaaccgatgaagcagatctagtgcccgctaaacaggctaatataaggtgtccacaggttgtcataaaattctacgaagaaaagcttaaatggcatgcgccctcgctagaagattcaaaatgcgagtagatgtaatgtttagattatattttaggtttaaatcatcaaattgtgagaagttttaactctaaccacgaacaataattagtttatacttactgattactggtttttaacattctgtaaaaataaaataaagaagtgaacaagttaaaaaaattctcataaagtgctttggattataatctcatttcaatattcttctacgattttttaatagcgttactttttaatgcaatggcatttaaataaacgttgatcttttatttaatttaattgatctttcagtttttttttattcaaaaaatgtaaaaggtggccc

SEQ ID NO: 4568 - DNA, 2230 bp, Diabrotica virgifera
  SmartBlast Evalue=1E-151; Info=Single-stranded DNA-binding protein 3 n=2 Tax=Endopterygota RepID=E2AJZ0_9HYME
ggcgtcgaaaacattttgaattgacgtgtgagttgtgatgtgaatttaaagcttattgaagtgttttcaatatgatatgtacgactttaaaggattctaaagcgagtaatgcatgcttacaatagtgatgtgaatttaatcgagtgtatgtgtctgggcaatgcgatgaacagcatcttttatcatgtagaagcagcgtgtttcagcaactaaacaattccaaccgaacggtacattacttcaatgtatgtaggttacattagttaaataagttatagaaaaatgtatgcgaaaggaaagggatcctcagtgccgtccgatgcacaagcgagagaaaaattggcactgtacgtttacgagtatttacttcatgttggtgcacagaaagctgcacagacatttttgtctgagatacgatgggagaaaaacataacattaggagaacctccaggatttttacattcgtggtggtgtgttttttgggatttatattgtgccgctcctgaaaggagggacacttgtgagcattcttcagaagcaaaagcctttcatgattacggtttcgtgaattcgggttatggagtcaatggaattgcccataacactggcccagcaccaagccccttaggacaaatgccaccctcagatgggatgcctagtggtccgttacctcctggattctttccaaattctacattacgtccgtcaccgcctacccacccctcaagtcagccttcaccacattcgcaaccaccaccaccacattcacagataatgacctcacagcccttcatgggaccccgatatccagctggaccgaggccaggggttagaatgccccagattggaagtgattttaacgggcctcctggacaacccctaatgaataatatggaccccactagacaaggtgaaggcggagagtatgtaggttggcaaggacctcctgcagcaatgaacagaatgaacccgccgagagggccttctatgggccctttgggtccagggaactatggcccaggattgcgtggaccaccgcccaatagtagcctaggtccaggagggcccatgccgccgatgaccatgacaggcccaggagggcgaccccagtggcagcccaatacgtcaactcccatgaactactcctcttcgtcaccgggtaattatggcggtcctccaggctcggccggtcccgcaggcccaggaacgcccataatgcccagcccacaagactccagtaattccggaggagaaaacatgtacacattaatgaaaccagcagtgggaggaaatatgcccggtgatttccagatgggaggaggaccagacgggtcgggccccatgggacctatgggacccaactcgatggggccagtattaaacggtgatggaatggatggtatgaaaaattcacctgctaatggaggaccgggaacgccgagagaagacagtggtagtggcatgggagaatacaacataggattcggaggacctggggaaaatgaccaaacggaatcagctgctattttgaaaataaaagagagcatgcaagaggaggccaagaggtttgagaaagactcggaccaccctgagtattttatgcaataactcacttgcctcgcctctttggctggtggacgcctgttttttctacttaacctgtactaacacgggcggtggtgtgctcaatactcagctcttcaatacgccaggccaccgacttcactagtcatgagtgttctgttctgtttgcagatattcctatgaggctgagctgagatagagcaaaccggccctcccctggactgaaccgtcatttgaatacatgtgcgtctcatggttatggttcctctactttccaccaccacttttgtacaccatagtcactacaagacatgaaacatactcgaatgtccaccagcctaggcaaggttggatatagtcattagggatgcaccgaatattcggtttgatgccccatttccattcatttcggacttaggaactatcgtacaacaccttttgcaaccagtttttaatcaatattgttaatccaatcacaatgggcttgttcatttcaaggtactattatatatactattcttatataggacgttaattgttgaattaggcatagagcagttaggcatagagtattatttgcaattttaaatctggcaaagaatttttaaagtcgccaacgtttaaagtttaaagaccaactacgccc

SEQ ID NO: 4569 - DNA, 1978 bp, Diabrotica virgifera
  SmartBlast Evalue=1E-136; Info=Single stranded DNA binding protein n=3 Tax=Culicini RepID=Q17MV1_AEDAE
ggcgtcgaaaacattttgaattgacgtgtgagttgtgatgtgaatttaaagcttattgaagtgttttcaatatgatatgtacgactttaaaggattctaaagcgagtaatgcatgcttacaatagtgatgtgaatttaatcgagtgtatgtgtctgggcaatgcgatgaacagcatcttttatcatgtagaagcagcgtgtttcagcaactaaacaattccaaccgaacggtacattacttcaatgtatgtaggttacattagttaaataagttatagaaaaatgtatgcgaaaggaaagggatcctcagtgccgtccgatgcacaagcgagagaaaaattggcactgtacgtttacgagtatttacttcatgttggtgcacagaaagctgcacagacatttttgtctgagatacgatgggagaaaaacataacattaggagaacctccaggatttttacattcgtggtggtgtgttttttgggatttatattgtgccgctcctgaaaggagggacacttgtgagcattcttcagaagcaaaagcctttcatgattacggtttcgtgaattcgggttatggagtcaatggaattgcccataacactggcccagcaccaagccccttaggacaaatgccaccctcagatgggatgcctagtggtccgttacctcctggattctttccaaattctacattacgtccgtcaccgcctacccacccctcaagtcagccttcaccacattcgcaaccaccaccaccacattcacagataatgacctcacagcccttcatgggaccccgatatccagctggaccgaggccaggggttagaatgccccagattggaagtgattttaacgggcctcctggacaacccctaatgaataatatggaccccactagacaaggtgaaggcggagagtatgtaggttggcaaggacctcctgcagcaatgaacagaatgaacccgccgagagggccttctatgggccctttgggtccagggaactatggcccaggattgcgtggaccaccgcccaatagtagcctaggtccaggagggcccatgccgccgatgaccatgacaggcccaggagggcgaccccagtggcagcccaatacgtcaactcccatgaactactcctcttcgtcaccgggtaattatggcggtcctccaggctcggccggtcccgcaggcccaggaacgcccataatgcccagcccacaagactccagtaattccggaggagaaaacatgtacacattaatgaaaccagcagtgggaggaaatatgcccggtgatttccagatgggaggaggaccagacgggtcgggccccatgggacctatgggacccaactcgatggggccagtattaaacggtgatggaatggatggtatgaaaaattcacctgctaatggaggaccgggaacgccgagagaagacagtggtagtggcatgggagaatacaacataggattcggaggacctggggaaaatatattcctatgaggctgagctgagatagagcaaaccggccctcccctggactgaaccgtcatttgaatacatgtgcgtctcatggttatggttcctctactttccaccaccacttttgtacaccatagtcactacaagacatgaaacatactcgaatgtccaccagcctaggcaaggttggatatagtcattagggatgcaccgaatattcggtttgatgccccatttccattcatttcggacttaggaactatcgtacaacaccttttgcaaccagtttttaatcaatattgttaatccaatcacaatgggcttgttcatttcaaggtactattatatatactattcttatataggacgttaattgttgaattaggcatagagcagttaggcatagagtattatttgcaattttaaatctggcaaagaatttttaaagtcgccaacgtttaaagtttaaagaccaactacgccc

SEQ ID NO: 4570 - DNA, 2110 bp, Diabrotica virgifera
aactgtgtataatttatttcgtacaataggttaacaacgcagagtggtcaacagactttagcagaactaaaaagtttattttgtttgtaagattacaatacacgatttaatcattataaccattaaaataattgtaaaatataagaagtacataaaatttgatttcatacattttaaagaccttcattcaatttatgaattttatctagtgaactaatttaacaaaaatattatataagaaatcaaaatattaacgaaaacaatggtcattggtcacctataaataaattaaaaaatatatgatatacaatatacaataactatacaataatatcaataattatggaaaatttattttgttaaccaatattacagaccttgaattaatgatttttgtttttgattcttaatcaaaacatttttgttacttctaatattctacaatttacagaaaagaaattacagaacggatagatatcacagttcctgataacaaaacatgtttcacttttttaaataaaaataaaggacacaaaaaaatatattcctatcctagttcctatgtacaataaaatatttcacatttgttataaaattcgcttgtttcgcttatttagaaaaatcttaagatcaactaatggcagttattatttttattaatttaaatcgtcttttaaacaatatagacatagaccgtttcaagatattaatgctctaattgtaagacatttgtaagcaatatgtaaactttctataattgtacaacatttatagggttttcacctatatcttttggtggctcaagaatattaaaaacctgttaacagcaatgatgatgaactttttatttcgaaaacgtcgaaaacgcgatgtagggattttactaattttttgtgaataataatatacagccgctacaggaaatcattttaaggattatgtaaaaattaagtttgctaacagtttcattcgacagtattgacaactgatgatttatttcttgaaccaattcataattattgtagattatataaataaatatataatatatcattgtaaatattttcggatttaataaaaattaacgaaccaacgacattattaatcagccctattctgcaacttttaacaaatcgaatagaaagtcgaatcgtaattaccagaaatcggaatgttggatatctatcgcgtcgttttcgtgtttggattggcattccgcaactcacatcgtaatcagtgtaaatcgaaaacgtcaacttctatttgacgcgctcaggaggaggtggcagcaccgcactgtaaagtaaaataagtgttctgtgcggagaattcatcaacaaaagaagaaattttggtttattttggatggttttggttaagtttgacaaattaaataaaaccagaataaaaaatggcaagtggaacaccgattaggaacacgaacaccaaagaaaaaacattgctgagcatttaaattacatggtagactttgaaacacactagatacgttcaaatctacacattctaccagtaaattaattagagcagcaattcttaaaatgtttaatgatttctattaaccttgatgctgcatattttattattggtaccgtaaaatggggtgaataggaacggttttcaactttcaactgaaaaaatgtcactaacacaagacatattgcaaacataaaacttatccattgttatttgagtcttaccttcctcttttgatatttagatgttaataaattaaaaagttaatactttaatcacaaaaaatcaaaacctggtgttgaatgggaacacctgtattaaaaactattgtgttccaattcgtacatttgtagggtcaatagaaacaggtaaaaagtgtctaaggtgtaaagtaacatacacaaataaatatatagtttgtatggttggaaaatagattgttgaaatgaaaaatattttttaaactcgaatttggcatttttctctgaaagactattaaccagtttctttaatagtctaggaaacttgtctttaactattgtggattcattcctgcctggtcctgcttttcattcctcaactattttgcgccacataatcttcatgggccttgttg

SEQ ID NO: 4571 - DNA, 2051 bp, Diabrotica virgifera
aactgtgtataatttatttcgtacaataggttaacaacgcagagtggtcaacagactttagcagaactaaaaagtttattttgtttgtaagattacaatacacgatttaatcattataaccattaaaataattgtaaaatataagaagtacataaaatttgatttcatacattttaaagaccttcattcaatttatgaattttatctagtgaactaatttaacaaaaatattatataagaaatcaaaatattaacgaaaacaatggtcattggtcacctataaataaattaaaaaatatatgatatacaatatacaataactatacaataatatcaataattatggaaaatttattttgtttttgttacttctaatattctacaatttacagaaaagaaattacagaacggatagatatcacagttcctgataacaaaacatgtttcacttttttaaataaaaataaaggacacaaaaaaatatattcctatcctagttcctatgtacaataaaatatttcacatttgttataaaattcgcttgtttcgcttatttagaaaaatcttaagatcaactaatggcagttattatttttattaatttaaatcgtcttttaaacaatatagacatagaccgtttcaagatattaatgctctaattgtaagacatttgtaagcaatatgtaaactttctataattgtacaacatttatagggttttcacctatatcttttggtggctcaagaatattaaaaacctgttaacagcaatgatgatgaactttttatttcgaaaacgtcgaaaacgcgatgtagggattttactaattttttgtgaataataatatacagccgctacaggaaatcattttaaggattatgtaaaaattaagtttgctaacagtttcattcgacagtattgacaactgatgatttatttcttgaaccaattcataattattgtagattatataaataaatatataatatatcattgtaaatattttcggatttaataaaaattaacgaaccaacgacattattaatcagccctattctgcaacttttaacaaatcgaatagaaagtcgaatcgtaattaccagaaatcggaatgttggatatctatcgcgtcgttttcgtgtttggattggcattccgcaactcacatcgtaatcagtgtaaatcgaaaacgtcaacttctatttgacgcgctcaggaggaggtggcagcaccgcactgtaaagtaaaataagtgttctgtgcggagaattcatcaacaaaagaagaaattttggtttattttggatggttttggttaagtttgacaaattaaataaaaccagaataaaaaatggcaagtggaacaccgattaggaacacgaacaccaaagaaaaaacattgctgagcatttaaattacatggtagactttgaaacacactagatacgttcaaatctacacattctaccagtaaattaattagagcagcaattcttaaaatgtttaatgatttctattaaccttgatgctgcatattttattattggtaccgtaaaatggggtgaataggaacggttttcaactttcaactgaaaaaatgtcactaacacaagacatattgcaaacataaaacttatccattgttatttgagtcttaccttcctcttttgatatttagatgttaataaattaaaaagttaatactttaatcacaaaaaatcaaaacctggtgttgaatgggaacacctgtattaaaaactattgtgttccaattcgtacatttgtagggtcaatagaaacaggtaaaaagtgtctaaggtgtaaagtaacatacacaaataaatatatagtttgtatggttggaaaatagattgttgaaatgaaaaatattttttaaactcgaatttggcatttttctctgaaagactattaaccagtttctttaatagtctaggaaacttgtctttaactattgtggattcattcctgcctggtcctgcttttcattcctcaactattttgcgccacataatcttcatgggccttgttg

SEQ ID NO: 4572 - DNA, 2162 bp, Diabrotica virgifera
  SmartBlast Evalue=1E-140; Info="Protein kinase related to protein kinase N, isoform H n=3 Tax=Drosophila melanogaster RepID=E1JH15_DROME"
ttgtgatttgtgattgtgaataaatataaaaatgtctctgcctgccaaatttgtaaatacagtattcttacaataataaaaactgaaaattttttgataataattatagagtattattaagtgtatgtgcattaagatcaacgttatgaagatggataagacccgaagtgtttgaataagttggaaaaaaataataggaagatattttgtgaatttagtgatgtaaaatttggattcaaaatggctgattcttattaccagggagactacataagacatcccgtcatatacgaattatcccacaagtatggcttgccgacggacagtttcaacgagtctcagctgtcgaataaacttgaggaactcaaggagattatcaggcgtgagattcggaaggaactgaagattaaagaaggtgccgagaagttgagaggagtgtcaaccgatcggaagtcgctcagtcatgttgcgaccatagtcaaaaactccaatttcaaattaaccgagttgaagaatgagctcagtgagctggaatcgcagattattctgtctcagggtcagagtacgccatccttaataccttccaatggagattccgtaagttattctacattggcgaatcacaatatggataagtgtaatgctaacctttatagtcgaatagaaaatttggaaaagcagttaaacatagaattaaaggtgaagcagggagccgaaaatatgatacaaagcatcacaggaagagataaaaaattattattagaagctcaacaaatgctacaagactcaaaaaagaaaatagaatatttaaaaatgaaaataacaaagttaaaacatgacatcgattcgaaatcgcggggttccattcaggatttgacggacaatggagacctgtcgcacggagaattagatccacttttagatgatagaatagaagatttaaaacacagacttagagtcgaagcagctgtggttgaaggtgccaaaaatgttattaaacttttacaaaataataataaggacaagagtgagaaaaaagccctcatagaggcacaggaaagtttgagagccagtagtatgaaacttgatcttttaaagaaatctttggaaattaggaaatcggaattgcctgaggattctccggtcgcaatacatttaaaagaagaactagcaaatgctcaagcatttagtccaacgacgatgcattataccagtctacagccattcagggaaggatcggagaacagcaggcatttgacttctttttctatgctcagcaggtgtgcagctgttaccggtactttagaagtacgattaatgggatgtcaagaccttctggaggaagtacctggacggcctaagaaagaatccgacgttccttcgagcccgatggaatttagctttttcaaaaaaacaaaaagttacagcgtcaaagaagaagtcagcgacgatatcatggcggtgttaaaacttgacaataccactgtaggtcagacgagctggaggccgtgttcgcaacaggcgtgggatcagaggttttcgatcgaactagacaaatccagggaactggaaatcgatatttattggagggattacagatcgctctgtgcagtcaagtttttaaagctcgaggatttcatagacgacgaaaggcatggaatggcattgcatttggaaccagaaggattactttttgcagagattaaatttttgaaccctatgatttcgaagaggcccaaattacaaagacaaaaaaggattttcaaacaagtgatgcctagagccaaacaaatgaacatcaacattgtgacatggggtagatggatgaaacaatcttctagaatgcctagtcgacagaatattgtattaagttcaactgaaaatgttactgacgatctcgctcttgaggataaaccagaaacaccgggagaagtcccagatccacaagttgctggtttaggtggacaaagacctctcggcttacacattgaattgcctcaacctccagaacctgtaatattatctcctccttcgccttccgtgcctcctccggtggccaagaaaaggatggcagtcacaccgcctccagtacctccgagacttgatccagagagtgtagcagcactaaaagaattcgacttcttggaggaacaggagatttc

SEQ ID NO: 4573 - DNA, 2013 bp, Diabrotica virgifera
  SmartBlast Evalue=1E-141; Info="Protein kinase related to protein kinase N, isoform H n=3 Tax=Drosophila melanogaster RepID=E1JH15_DROME"
gtgttattcaagaccttaagatttttctatttcctactgtcaaagtttttttaattggggaaaaatgtggaggtgtagtacacatttcagcagtgatgatgacgaaagtgaaggagactacataagacatcccgtcatatacgaattatcccacaagtatggcttgccgacggacagtttcaacgagtctcagctgtcgaataaacttgaggaactcaaggagattatcaggcgtgagattcggaaggaactgaagattaaagaaggtgccgagaagttgagaggagtgtcaaccgatcggaagtcgctcagtcatgttgcgaccatagtcaaaaactccaatttcaaattaaccgagttgaagaatgagctcagtgagctggaatcgcagattattctgtctcagggtcagagtacgccatccttaataccttccaatggagattccgtaagttattctacattggcgaatcacaatatggataagtgtaatgctaacctttatagtcgaatagaaaatttggaaaagcagttaaacatagaattaaaggtgaagcagggagccgaaaatatgatacaaagcatcacaggaagagataaaaaattattattagaagctcaacaaatgctacaagactcaaaaaagaaaatagaatatttaaaaatgaaaataacaaagttaaaacatgacatcgattcgaaatcgcggggttccattcaggatttgacggacaatggagacctgtcgcacggagaattagatccacttttagatgatagaatagaagatttaaaacacagacttagagtcgaagcagctgtggttgaaggtgccaaaaatgttattaaacttttacaaaataataataaggacaagagtgagaaaaaagccctcatagaggcacaggaaagtttgagagccagtagtatgaaacttgatcttttaaagaaatctttggaaattaggaaatcggaattgcctgaggattctccggtcgcaatacatttaaaagaagaactagcaaatgctcaagcatttagtccaacgacgatgcattataccagtctacagccattcagggaaggatcggagaacagcaggcatttgacttctttttctatgctcagcaggtgtgcagctgttaccggtactttagaagtacgattaatgggatgtcaagaccttctggaggaagtacctggacggcctaagaaagaatccgacgttccttcgagcccgatggaatttagctttttcaaaaaaacaaaaagttacagcgtcaaagaagaagtcagcgacgatatcatggcggtgttaaaacttgacaataccactgtaggtcagacgagctggaggccgtgttcgcaacaggcgtgggatcagaggttttcgatcgaactagacaaatccagggaactggaaatcgatatttattggagggattacagatcgctctgtgcagtcaagtttttaaagctcgaggatttcatagacgacgaaaggcatggaatggcattgcatttggaaccagaaggattactttttgcagagattaaatttttgaaccctatgatttcgaagaggcccaaattacaaagacaaaaaaggattttcaaacaagtgatgcctagagccaaacaaatgaacatcaacattgtgacatggggtagatggatgaaacaatcttctagaatgcctagtcgacagaatattgtattaagttcaactgaaaatgttactgacgatctcgctcttgaggataaaccagaaacaccgggagaagtcccagatccacaagttgctggtttaggtggacaaagacctctcggcttacacattgaattgcctcaacctccagaacctgtaatattatctcctccttcgccttccgtgcctcctccggtggccaagaaaaggatggcagtcacaccgcctccagtacctccgagacttgatccagagagtgtagcagcactaaaagaattcgacttcttggaggaacaggagatttc

SEQ ID NO: 4574 - DNA, 3015 bp, Diabrotica virgifera
caaagactaagaagagaaggcttaaagacaaagattacgattttaagaatctagaacagctggatcttgaattagatgatttgaagaaaaaagaattagaaaaagttgatgatgctttcaaatatgaaggtaaaccacgaaaaaaatcagtcgctgaagaagaaccgaaaaagattactaaacagaaaggaaaaatacccgaaaaacaagaagttgacgaggtaattaaactaaaggctgttccagagaaaccggtagaagaggaagaacaaccagaaaagccgaagattaagaaaccaccaaaggagagtgtgcctaaggtgaaaaaggagacagacgaaccagacaaaattaaatttgaaccattcgacattgatagagaagaggtagaattagaaaaaccagagccaatagaattcgaaaaagaagatggcgaaaaacctgtacctgagcccaaaaagattcctaaaaagaaaaaggttaaacctactccagaaacagaagagatcacaattataaaaggaattccaaagccaaaggaagaacctgaagaagaagatattaatcttaaatacaaacaaaaacctaagcctgaaccagctccagaagatattactttaaaaccatttaaaaaacaggaagaacaagaagtattaaaaccagaaacagatgatacaatccatcttcctaaaatgcccacaactgaagaaataactgatgatacggtaaaaattaaacaaccaaccaaaaagaaggttaaaaagatcaagcctaaatcaaaagaacccacgtctgatgttccaggggatcaaccagaggagataattgttgaggaagaagaacaagaagaggaagagaaagatacggtaccggaagttattgaagaagttactatagaaaaactagaaacagaaattaccgaagaagtcgcagaagtgcttaagcctgaggaacaagaagttccagtcgaagatcaaaatacccaaatagacaaaataaagaaaagaccattatcaaaaagaggaaacagaaagatgttttaaaatcaactgaggaagacatagaaccttccgaaggaatagttcaagaagtcgaagaagaagaaatcattacagaagaaaaagtagaacttgtagctgatgaaaccacaagtaaacttcaacagtctactgtaactgtagtggaagagcccgtcaatctagctgaaattaaattaaagaaaccaaaagcaccaagaaagattgaaccaaaaacaaccaaagctcccaaatttttattaaagagcaggatagttcacgttccattcccaccagaaaatgaagccaattctattcctgtaatcaaggaacttcctcctgtatacagggacaatggagttctatctagaaatctaaaagaatctgaaaaggttcccaaaaagaagaagatcagggttaaagatattgaaagggaaattaaatcactggaaaaactggacaaagatttcgaagattctaaaaagggactcgaaaaggttgatgatgaatataaagcacctaagaaaccaaaagaaaagccagaaataattgaagaagaagcaaaaccactaaaaattggaaaaggaaaattacctgaagaagaagaacaagaaaaaccagtaaaacttaagaaaatccctaagaagccttctgaggaggaaaagtcggagccagaaaaagtgcctaaaaagaaagaagacaaaccaaagtccgtcaaaattgaagatgaggaaagtccgacactagaaccatatcaacctcaagatttcgaaaaggatgatgtagaacttgaaaagtatgtacctgcagaagacgaagaaaaccagatgaaaaactgcctgaagaagttactaagaaacctaaaaagcccaaagtaaaaccaaaacctgaaactgaagaaatcactttagaattgggtaaaggcaaaccaaaggaagaagaagaaacccctgaaattaaaaagaaatataaacagaagccaaaaccggaggaagttgttgaaaaacctggactcaagccgttcaaaaaagaagatgataacgagacatatacagtaattgttgaagaaccaaaagaacccttaaaatccacagtactactgattgacgaagaggaagatgaagaagaagaaaaagttactacaatcaaaaagaagattaaaaagattaagaaaccgaaatctaaagatgtgaaagttgacagtactgaggaaatagaagacgttcctacagaaagtgaaattgaaacacctaaagaaaccgaagaaatttcagaagaaccgaaaattgagcaagaagaggaacctgaaaaattagaagaggaagtgccaacacctacacttacagaagagactgttgaagtcgttaaaaaggagacagtaaaggtaaagaaacccaaaacgaaaaaaccagcacctgagactgctgaaattacagaagcgcctgtagaagaaaaaccaataaagttgatgataaaacgtaataaagctagcaaacctcaacaacctgtaataactgaaacagttccagaatttgctgagataaaactgaaaaaaccaaaaccggttaagctggagaaaaaacaagaaaaagtaatgcctaaatttatgctcaagagtagaattaattacgtcgattttccaccattatcagaaacagaaaagaaagcgataataacggagttagagcctgtttatagagaaatggggtattatctagaactatggaagaagcagcaaaggttaaacctaaaaagaagaaagttacaagaatcaaagagttagagaaattagacaaggaattcgaagaattgaagaaatctgaacttgaaaaagttgacgatgcattcaaagaaaaaccaaagtcgaagaaaaaatctaaacctgtcttaatgaaaatagttaaagtagagcaggtagcacaaaaaccgaaaataatcgaaataaaagaagaacctattaaccttgcggatatcaaattgaagaagtccagagtgcccg

SEQ ID NO: 4575 - DNA, 1124 bp, Diabrotica virgifera
caaagactaagaagagaaggcttaaagacaaagattacgattttaagaatctagaacagctggatcttgaattagatgatttgaagaaaaaagaattagaaaaagttgatgatgctttcaaatatgaaggtaaaccacgaaaaaaatcagtcgctgaagaagaaccgaaaaagattactaaacagaaaggaaaaatacccgaaaaacaagaagttgacgaggtaattaaactaaaggctgttccagagaaaccggtagaagaggaagaacaaccagaaaagccgaagattaagaaaccaccaaaggagagtgtgcctaaggtgaaaaaggagacagacgaaccagacaaaattaaatttgaaccattcgacattgatagagaagaggtagaattagaaaaaccagagccaatagaattcgaaaaagaagatggcgaaaaacctgtacctgagcccaaaaagattcctaaaaagaaaaaggttaaacctactccagaaacagaagagatcacaattataaaaggaattccaaagccaaaggaagaacctgaagaagaagatattaatcttaaatacaaacaaaaacctaagcctgaaccagctccagaagatattactttaaaaccatttaaaaaacaggaagaacaagaagtattaaaaccagaaacagatgatacaatccatcttcctaaaatgcccacaactgaagaaataactgatgatacggtaaaaattaaacaaccaaccaaaaagaaggttaaaaagatcaagcctaaatcaaaagaacccacgtctgatgttccaggggatcaaccagaggagataattgttgaggaagaagaggtaatagaggaacaggaaaacctaaacccagaaaagtgaagaagaaagtaccgagtgaagagaaacccgataaaaaagaaacacctgtagaagaggaagaagatgtacaaatagaggaagttaaagaagaagaaatagataaagaaattcccgaagatgaagaaataatagagggagaagaaactaaagagaaaagaacagtaaaaatcaaaaaaattaaaaagaaacccaaggaaaaagccgaagaggataagcctgaagaacaaaaacccgaagaagagc

SEQ ID NO: 4576 - DNA, 2942 bp, Diabrotica virgifera
  SmartBlast Evalue=2E-59; Info=Endonuclease-reverse transcriptase n=1 Tax=Bombyx mori RepID=D7F174_BOMMO
aaaccggagcacgacagctcgattgaagaagacaaagaagagcaacataaaagcaaaaagctccagacacgcgcataaaaaaagtaagtacaatattaacggacatggaggagattaagatattgctgagccagatgaggcaagaaattaaagaagatatcctggaaagcaaaacagagattaaagatgaaatcaaggatatgaaaacgaactggaagatattaagcagaagcttaagcaaaacaaagcagaaacagaaaatttaaaagagaagtagaaaaaaagaacaaaaatgggagaaagaaaacgaagaactcaaaaaagcgttaacactcatggagaatagattagagaagatcgataaagaaaaaatacgcaataaattaatcataacaggaattcaggtagatctggaagatgaagttagactaagagaaaacatacaaaaaatgatggaaacagagctgcaactgaaaatagaagttaaaagtgcgtttaagataggatacaagaaatgtataatagaaacgaagagctgggaagacaaacagaaaatactgcaagaaaaaggtaaactcaaatacacaagagactgtagagaaatatacatagatgcagcgctgacgttcaaggaagcaaagatacaaaaagaaatcagagacatagcaaaacaacagagaagcaaaggagcaaaagtaaaaatcagataccagaaattagaaataaatgacaaagtgctaaaatggaatgcaagagaaaataaacttatagaaattgaaaatgtcccaaaaaactagacaaaagagaatggatggatgaaaaggaaacagacaatgcaaacgaagaggtaaatgagtcacggtatattcaaaataataaaaaatacaaaaaaaaggaagagaattaaaaaaatgacaaaaaaattggaacatggaacgtcaggacactgctagaagaaggaaaaatggaagagctagcgacacagttgaaacaatacaatatagatattgcaggaattcaagaaaccaggtggggggacatggaaacatcgaaaaagaaaattatacagtatggtatgctggagaagaaaaacaaggatatggaggaactgcttttattgtgttaggggaaatgaggcataaagttatggaatttaaacccataagtcaaagattatcatacataagagtaaacagcaaaccgaacaagttgtccataataaatgtctatgcacccacagaaaacagtgatgacttaataaaacaacagttctatgaaacactagaagaaaatgccgaaaaaaatcccgggagaagatatattaattattataggcgatttcaacgcacaaataggtaaagaaaaatgctttagggaggttgcaggggaaaactcattacatagcacaacaaacaataatggagaaagattatgtaatttagcagcggcattaaacatggacataagtagcacgagatataaacacaaaaacatacacaagataacatggatgagaccaggcagtctggaggggaatcaaatagaccatgtacttattaaaaagtcacacaaacagtcgataaatgacgtgagatctcacagaggggcaaacatcgattcggaccatatgctagtgattgcaaaatgtaaaataaaaacaacaaagaatgaaagacgaaaagcacagggaagatgggacgtagataaattgaaagataaaggagtaaaaagaagatttgtaaaagaagtaaatgtagagatgcagttcaaggaggaacaagaaatggaggagcagtggaaaaaaatcaaacaaggaataaacactgcagcagagaaagtagttggaaaaatgcaaaaagaaagaagaaacaattggtttgacgaagagtgcaaactagcagtggacgaaaagaataaaacaagattgaaatggctaagcacaggtaaagaagaggaacgagaaaaataccaagatcaaaggaaaaagacaaagaaattgtttaaatcaaagaaaaataaaaaaagtagacgaaattatgaacgagatcgaaacagaaaataagagacacaattcaaaaccactgtaccaatacttaaagctaggtagtagaaaacggacagctaatgtagccatagaagcagaaacatggcagaagtatttcgaagaaatgtatcaagaaacggatgtagaagaagaaagagaaacaataatgaacccggaacaaggtgaagaagaagaattgacctatacagaagtaaaagatacaatatgcaaactgaaaaacgggaaaacagcgggagacgacggaatatgtgcagaacttataaaatacgggggtgaagcactatacagaaagatttatgaactaatacagaatatatggaataaggaaacaatgcccgaagaatggaagaaaggaattattgtgacaatcccaaaacaaggagaccacaggatatgtaaaaactaccgagcaattaatttactgaatgtaacatataaagtactgactggtataattagagacagactaacaatatacacagaacaaagcataggagactaccagtacggtttcagaaaaggaagatccacgatagatgctatccatacactaaaacaagcgatagagaaaacatacgagtacgacggagaagcacatatactttttctagactttaaacaggcttttgacaaactaagtagaagaaaaatgatccaagacttacaagagagcaaaataccaaataaaattataagaatgatagaaatgacaatgcgagattcccaagcaacaatagacaccggaagagagagaacataaataataaaaataaaaaatggagtaagacaaggaaatgcgctctcaacggtactatttattctattattagacaagatattaaaaaagttgtcaaacgcaggaactataaataaaaat

SEQ ID NO: 4577 - DNA, 1178 bp, Diabrotica virgifera
  SmartBlast Evalue=1E-41; Info=Endonuclease-reverse transcriptase n=1 Tax=Bombyx mori RepID=D7F170_BOMMO
aataaatagttatagaaaagatttcaaagccagagtgcctttaaaaataaggatttctctatattttgacaaaaattagatattaaacagattaaattttgaagacctacttagtgagttcacaccgtagaagaaattagagaagccatcttaaatttaaaaaacaccaaagcccaagttctgatgttctcctcctgccgaactatgtaaatatggctgcgaccaccttttgcaacacgtacgtaagttaataactagatactgacaaaggaaagcaacacccgcggaatgaaaattgggtaaaccttcgcaaaaacaaagagacacgatgatgtacgataattaggtataatatatgcattaacttacttaatatggcatacgcaatactataggcatttgatatgtatcaagaaacggatatagaagaagaaagagaaacaataatgaacccggaacaaggtgaagaagaagaattgacctatacagaagtaaaagatacaatatgcaaactgaaaaacgggaaaacagcgggagacgacggaatatgtgcagaacttataaaatacgggggtgaagcactatacagaaagatttatgaactaatacagaatatatggaataaggaaacaatgcccgaagaatggaagaaaggaattattgtgacaatcccaaaacaaggagaccacaggatatgtaaaaactaccgagcaattaatttactgaatgtaacatataaagtactgactggtataattagagacagactaacaatatacacagaacaaagcataggagactaccagtacggtttcagaaaaggaagatccacgatagatgctatccatacactaaaacaagcgatagagaaaacatacgagtacgacggagaagcacatatactttttctagactttaaacaggcttttgacaaactaagtagaagaaaaatgatccaagacttacaagagagcaaaataccaaataaaattataagaatgatagaaatgacaatgcgagattcccaagcaacaatagacaccggaagagagagaacataaataataaaaataaaaaatggagtaagacaaggaaatgcgctctcaacggtactatttattctattattagacaagatattaaaaaagttgtcaaacgcaggaactataaataaaaat

SEQ ID NO: 4578 - DNA, 2096 bp, Diabrotica virgifera
  SmartBlast Evalue=1E-128; Info="Low-affinity cationic amino acid transporter, putative n=1 Tax=Pediculus humanus corporis RepID=E0VK78_PEDHC"
ttcaatattccacagactataaaaaactaacaatcgccatatgacaatgattatttctaattagtttaccaacagttataaaattatgtcaatatttttgtatattttgtccatttaaagcgcccgtgttgtgggaaattagtgataaatataattttggatgttgcgaacacttggaagatgcccaacaaattatttgctgcaattaccagaaagaagacgttcacatacaatgaagaaactacaagtctagcaagagtgctctccttggtagatctggtcggtttaggcgctggatctacactaggtctgggagtctatgttcttgcaggatctgttgcgaaaacctatgcaggtccagcatcttcgatatcgttttttattgcagctataatatcgctatttggaggattgtgctatgccgaatttgcagctagagtaccaagaactggatacgcctacgcttactgctatgcaggagtaggagaactagtggcatttgtagtgggatggaatttgcttttgggggcagtactgggagctgcaagtgtggctagtggaatgagcagttatattgacgctctgtttgagaagcaaattgctttaaccattggaagctggttttccatggatgtgccttatctcacacacacgccagacattctagctttagcaatcattatacttctaacaattcttctatctgttggtatgaaggaatcttccatgttcaataatatttgcactgtcttgaacctactgacgatatttactgtcattgtggcttgtgcaattaaagctgatatcaaaaactggacaattgccaaagaaagcatcaaacctgagtacaaagaacaagcgggaacaggaggattcttcccatacggggttgcaggagtaatcgcaggaacgcccaattgcttttttggtttcaccggattcgatgctcctgcagcttgcagcgacgaagccaaaaaccctaaaaggaacattcctctcgccattttgatctcgttactgctcgttttcgtcgtctactttagcatatcgacagttttgacgctcgcatggccttattatctgcagaacgagaatgcacccttcccatacgtcttcgaacagttcggatggatagaggtaaaatggatagtgaccatcggagccatttttgctctatcttcaagcgcttttggatcaatgtactttactcctagagtggtgtacgccatggcagatgatggactgatcttcaaatttttagccaacgttcatcctggcacgaagactccgttgatctcgactattttatctggagtgatatcagggttgatggcgacattccttgacttgaatgctttgatggacttaatgactatcggtgctttcttctcttatgtgatagtagctgcatcagttatagtattaaggtatgaaacaacatccactgtgatagagccagtatcggagcagacgtttgctataaaaaggaaaagaaagtacttcggaagcctattcaacatcagcaaaaacaagattcccaataagacatcttctatagtgaccaacatcagcacacttttcttcactatgatgacctgtatattctgtgtgatattcaagaaccctcaattatttggcactcatagggcatactacaccagctgctcatttaccgctgtattaatgatattgatggcacttatcattttcagacaacctcaatctaaagagaagatatctttcaaggttccacttgttccttttattccctgtttgagtatcatgttcaatctttacatgatgatgcagttaagtttattcacttggattggatttctaggatggattgtcattggttgcttcgtatacttcttttacggaattaaacacagcgaagaaaataaacacactcctaaagaaacggcggaatgatgacaaataattaaacacttttgaagacataaaccatgatgagattggattctagtcagtaatattttctacttattattaagtactatgttagcgacacatcttataaaaatgtaattatattataaagattttcacatttataatgaaatatatttatatag

SEQ ID NO: 4579 - DNA, 2019 bp, Diabrotica virgifera
  SmartBlast Evalue=1E-128; Info="Low-affinity cationic amino acid transporter, putative n=1 Tax=Pediculus humanus corporis RepID=E0VK78_PEDHC"
gttacggtatggtggtcgacgataagaacaatctaaccaatattattattattatacacacgatgtgttgttgttgttgttgttaggaaaaacaaaaatcaagatgcccaacaaattatttgctgcaattaccagaaagaagacgttcacatacaatgaagaaactacaagtctagcaagagtgctctccttggtagatctggtcggtttaggcgctggatctacactaggtctgggagtctatgttcttgcaggatctgttgcgaaaacctatgcaggtccagcatcttcgatatcgttttttattgcagctataatatcgctatttggaggattgtgctatgccgaatttgcagctagagtaccaagaactggatacgcctacgcttactgctatgcaggagtaggagaactagtggcatttgtagtgggatggaatttgcttttgggggcagtactgggagctgcaagtgtggctagtggaatgagcagttatattgacgctctgtttgagaagcaaattgctttaaccattggaagctggttttccatggatgtgccttatctcacacacacgccagacattctagctttagcaatcattatacttctaacaattcttctatctgttggtatgaaggaatcttccatgttcaataatatttgcactgtcttgaacctactgacgatatttactgtcattgtggcttgtgcaattaaagctgatatcaaaaactggacaattgccaaagaaagcatcaaacctgagtacaaagaacaagcgggaacaggaggattcttcccatacggggttgcaggagtaatcgcaggaacgcccaattgcttttttggtttcaccggattcgatgctcctgcagcttgcagcgacgaagccaaaaaccctaaaaggaacattcctctcgccattttgatctcgttactgctcgttttcgtcgtctactttagcatatcgacagttttgacgctcgcatggccttattatctgcagaacgagaatgcacccttcccatacgtcttcgaacagttcggatggatagaggtaaaatggatagtgaccatcggagccatttttgctctatcttcaagcgcttttggatcaatgtactttactcctagagtggtgtacgccatggcagatgatggactgatcttcaaatttttagccaacgttcatcctggcacgaagactccgttgatctcgactattttatctggagtgatatcagggttgatggcgacattccttgacttgaatgctttgatggacttaatgactatcggtgctttcttctcttatgtgatagtagctgcatcagttatagtattaaggtatgaaacaacatccactgtgatagagccagtatcggagcagacgtttgctataaaaaggaaaagaaagtacttcggaagcctattcaacatcagcaaaaacaagattcccaataagacatcttctatagtgaccaacatcagcacacttttcttcactatgatgacctgtatattctgtgtgatattcaagaaccctcaattatttggcactcatagggcatactacaccagctgctcatttaccgctgtattaatgatattgatggcacttatcattttcagacaacctcaatctaaagagaagatatctttcaaggttccacttgttccttttattccctgtttgagtatcatgttcaatctttacatgatgatgcagttaagtttattcacttggattggatttctaggatggattgtcattggttgcttcgtatacttcttttacggaattaaacacagcgaagaaaataaacacactcctaaagaaacggcggaatgatgacaaataattaaacacttttgaagacataaaccatgatgagattggattctagtcagtaatattttctacttattattaagtactatgttagcgacacatcttataaaaatgtaattatattataaagattttcacatttataatgaaatatatttatatag

SEQ ID NO: 4580 - DNA, 2309 bp, Diabrotica virgifera
  SmartBlast Evalue=0; Info=Hem n=1 Tax=Tribolium castaneum RepID= D7EI65_TRICA
gtactaaatgcgttttctaactaaagtagaaattatttttatgttctaaatcttacaggttctgctctaacttataaacatcatgataagcattcctgataagggcataagggaaacaagattccaataaatccatagttaggaagggagactcttgaacaatttggtccaacaacaaataaactgattctctatttttgattgcatctttatcagcctcctgtcccaatctaagcaaactagatgaagctaaagccaagaattctttcattctgtcttcaatatctccctgtccacaaatagtaaaaagtgctccgaaaatgtggttcactgctagtgccatgcaatgaatgttatttgtatgtccctctaaagatggtctgtagaatgactgttcagatttagcaagctttggtatactaactgctacaaataccattagtagacagactaagagatgctcgttatcaccttcattttcttgcttttgtaatttcagtgcagctatgagagtaggatcaactttgcatggtaaaccagcagccgaagtcatttcactgacaattttcataggatccccacttagcaaatgatgtctgaaatctagaatagaactcaccaaaaatggaatacgttcttctagtacatctgttaaacaagattgtgccagttgcctgaagctcaatattacaccgactattgtcattctctgaagaacattatcaacatttgagagtttcttaaattgttctttcatcacttcaggtttgtcaaagtttgtacgtaatgaaaggagtacatccttattaatttctgccaatttctttagctcaactacttggctagcaatgtgccacataagagtttcactcagctgcttcataccataaggtcctattaattcagccaaagctctcagttcattaacatcagaatattcttcagggttgaatggtatagaaccttcaacagttacgctaacaaatgatctctgattcattgaaaatatgatattaccaccacttacccttcttaataatacctctgagtaccactgagtgtatatagaagctatcgtttttctccatgactatctacggcttgagtttgctgcagcagacaattattgaaaactcttgttatatctatatgtacataattctcgactgtttgcagcacattcatataagacctaacactcaccaaaagttcagaaggtttagcaatttcatttgtatcttggttatacatgaccattcctactaaagcttttgcaaatctggtttccagatgttggtgcaagtattctctaggtgcaaacgtatattcccagacgttgatattagagaaataatttatagcataacaaagttctgttaatgccatgtgtagtttatccattgttgttaaattttctctggtttttcggtagctttctttacctggtttttcaaattctatagtattctttttgtttttttccttcttttttctattaatctgctgggaaattaaatgtgcacaatttttaggaagaagcttgtcactcattttgcattgtgcatcacaaatagctgttattatatttttggcctcttttgccatttcatcgagaaacatatttacgacagaaagacttctctctctaatatgatgtctttcctctggacaaagttcgtgagtacagttctgaaagtggctacagatcgatggaaaagccactatatatctattctgagctggaaattctaggcacatatggaactgatcttcaaaaattctgttgtaaaaacagaatatagacaagtctgaagtttctctcagcatttcatctaaattatcaaccattttggtgtggaactgaatagaatccaataattctgctagttttttctcatctatcagtctcattggagattttgcagtggaggtatatgcctgcaaccttaaccaatctaaacggaaagcaaaaaagttaaaagtttcattttcttctacctgttttatagaaacactggaaatagtattgcatagggaagacagtatgataccttcatcttctggacaagtctgcagtttttgcataaattcctttaaagttatagcatcccaatgagatagatattgaacgtagtacctctgcattacctgactgtattttcttactaatactctcaaatcttccatgtgaaagagtaattcaggcaaatgcctatcaactaaatcttcagctgatttaccttttgttctatgtataggtggattatcattatgccttaataaccaaagaacttcatctctagcataac

SEQ ID NO: 4581 - DNA, 1787 bp, Diabrotica virgifera
  SmartBlast Evalue=0; Info=Hem n=1 Tax=Tribolium castaneum RepID= D7EI65_TRICA
ctttgcatggtaaaccagcagccgaagtcatttcactgacaattttcataggatccccacttagcaaatgatgtctgaaatctagaatagaactcaccaaaaatggaatacgctcttctagtacgtctgttaaacaagattgtgccagctgtctgaagctcaatattacaccgactattgtcattctctgaagaacattatcaacatttgagagtttcttaaactgctctttcatcacttcaggtttatcaaagtttgtacgtaatgaaaggagtacgtccttattaatttctgccaatttctttagctcaactacttggctagcaatgtgccacataagagtttcactcagctgcttcataccataaggtcctattaattcagccaaagctctcagttcattaacatcagaatattcttcagggttgaatggtatagaaccttcaacagttacgctaacaaatgatctctgattcattgaaaatatgatattaccaccacttacccttcttaataatacctctgagtaccactgagtgtatatagaagctatcgtttttctccatgactatctacggcttgagtttgctgcagcagacaattattgaaaactcttgttatatctatatgtacataattctcgactgtttgcagcacattcatataagacctaacactcaccaaaagttcagaaggtttagcaatttcatttgtatcttggttatacatgaccattcctactaaagcttttgcaaatctggtttccagatgttggtgcaagtattctctaggtgcaaacgtatattcccagacgttgatattagagaaataatttatagcataacaaagttctgttaatgccatgtgtagtttatccattgttgttaaattttctctggtttttcggtagctttctttacctggtttttcaaattctatagtattctttttgtttttttccttcttttttctattaatctgctgggaaattaaatgtgcacaatttttaggaagaagcttgtcactcattttgcattgtgcatcacaaatagctgttattatatttttggcctcttttgccatttcatcgagaaacatatttacgacagaaagacttctctctctaatatgatgtctttcctctggacaaagttcgtgagtacagttctgaaagtggctacagatcgatggaaaagccactatatatctattctgagctggaaattctaggcacatatggaactgatcttcaaaaattctgttgtaaaaacagaatatagacaagtctgaagtttctctcagcatttcatctaaattatcaaccattttggtgtggaactgaatagaatccaataattctgctagttttttctcatctatcagtctcattggagattttgcagtggaggtatatgcctgcaaccttaaccaatctaaacggaaagcaaaaaagttaaaagtttcattttcttctacctgttttatagaaacactggaaatagtattgcatagggaagacagtatgataccttcatcttctggacaagtctgcagtttttgcataaattcctttaaagttatagcatcccaatgagatagatattgaacgtagtacctctgcattacctgactgtattttcttactaatactctcaaatcttccatgtgaaagagtaattcaggcaaatgcctatcaactaaatcttcagctgatttaccttttgttctatgtataggtggattatcattatgccttaataaccaaagaacttcatctctagcataac

SEQ ID NO: 4582 - DNA, 2444 bp, Diabrotica virgifera
  SmartBlast Evalue=1E-18; Info="Viral A-type inclusion protein, putative n=1 Tax=Trichomonas vaginalis RepID=A2FD36_TRIVA"
tggtgattggagaagcaataaaggatgaaatcacttctatttcttctgcttttctatagctggcagatttccttcgcccaaaagtgctccagtccgcaagtgtcaagaaagttatcatttatttatagaacagtaccatcatctaaaattgaactgatagaatgcttctatactgacggtaacccgaaaaataattattacgatattaccaagaactgcgttactgctgccaagaccaaaatattcattgataaatatggcgacgatcatcgtgttaacgtaagaggatccaaagttactcttaaaacgtactatgccgatgctgatacgtcacagaacgtagtttttctcaaatccggaaagaaatgcaggtatgacgctggtttttgctatgacccttcccaaggaaataactacgccgtggtctgggcagtcaatccagtaccaaaagtcgtgtgtcctaatcaactagaacaaattttctacggttacgttgattattggacctttactgccgaaaacagaaaataccttatttactcggttcctctaaaggatgagtcattttcgttaagtctatcaaatacaacagtttgccatggaaaacaagcttggtatgtcgacgaacaaggtttcttagtatcctttactagtttgctacctcgtgttacagcaactcccgttttgaaccgaaatctctttccgacattcaagtctaaaggagatattagtgacagtattattagggactgcactctgaaatcctacaacttaaattttgatacgaagatcgatactgattatttatcagattcagaaaatctaaaaatcattctcagattttatcaacaaaatattgataacaacaaaaatgccataaataaactagcaaaagatatacaagatgacaacagggacaagaaaccatctgaaaatgtactttcagaaattaaccaaataaaatcatcactaagtacaaacttcaataatattaacaaactattcaaagatatcaaccagctgagaactgtagatacagatatttattcgacaataacgaatttagctaatagtattaaacaattaaagatagatattaaagactttactgtaaataataaatacttagacaaatatttaaatgaattgaaaaatgattttaacaagaaattattagactataatacaaatatcaaaatacaattagataaacttgcacattcttcaggatcaaatgttataaacaaacttaatccagcaatacagagtcttaaccacagcagtacaacttgcttaaatagagtgactattctcaaacaagacacaaaaatgtcaatacggcagttgaaaaacgacttgatggtcactcaagactcgctagaaacaaatgtcaagaagtttatattggccaatttaacaaacattgaaatggttttcggtagaaagttaaacgatgttttagcatctgcaaataaaaaatgcgacaaatcactgaatgatgtgactgcgtttaagaatatccttaagaacgatctagcaacgctggaagggaagcttgacaaatgctcaattgatcaaaagacaacttccaatgaactgaaaaaggtagaacaagctttatctgctagaatttcatcttcttcaaacgacattaagcaattaaatgattcgctctacaattacgtaaatatgtcaatttctagtctaacagatgctaccaataaggacttttctaaagaacttagtgatctaaaaagaagcttatcaggcagattatccaacgatgaatctcgtttaagcgaagtagagaaaaatgtacaaaaacttaggagcgatttcaacgagaaaggtaattcgcttgacactgctatccagggcattaaaaaggatatattagttttgcaaggacctaacgacgagctggctcaaacagtagaggcgggagttttggccaaagttatacccttactaaaccctacccttataacaaaaaacgttagccgtgaactaggtggcttaaaagatgaggttgctgcgcaattcgccgattctagtaagacaataaaagaccttaaaacagaagtagattcctgcaagagagtttctggaaccaagttgaaagaaaatgaaaagaaaataggacagattgagaataatttatctagtacacaaatgaatctaaatgatctatcgaaaagttgaacaatggtgttctcaatcaagtcaatactagagtaacatctgctctaacaaaagcgccaaatgtgaaaccaaagtaaagcaactacagatgagattaataagttgagaaatgattttgaaacgaccgtggccatgcttagagaagaacataaagaatttagaaagaaattggaagcagaagacgttcaagttgtgtaatttatatctatataatacccagatataaagtgcagattacctac

SEQ ID NO: 4583 - DNA, 1632 bp, Diabrotica virgifera
  SmartBlast Evalue=8E-12; Info="Viral A-type inclusion protein, putative n=1 Tax=Trichomonas vaginalis RepID=A2DLG0_TRIVA"
gattcagaaatcttaaaatcattctcaaattttatcaacaaaatattgataacaacaaaaatgcaataaataaactagcaacagatttacagaaaaacaacggtgtcaagggaccatcttcaaatgtactttcagaattgaataaaataaaatcatcaataaattcaaacttcaatagtattaacaaactattcaaagatatcaaccagctgaaaattgtagatacagacatttattcgataataacaaatttagctaatagtgtcaaacaattaaagatagacattaaaaacatcaataaaaatgatgagaatttagaaaaatatttaaaagaatttaaaaacgatgtttacaagaaattgaacaactacaatacagatatcaaaaggaattagataaagttaaacagtcgtcaggatcaaatgttataaacacgcttaatccaacgatacaaagtcttaaccacagcagtacaacctgcataaataaagtaaatagtctcaaaaaagacacagaaatgtccatacaacagctacaaaagaacttgatgatcactcaagactcgctagaaacaaatgtcaagaagtttatattggccaatttaacaaacattgaaatggttttcggtagaaagttaaacgatgttttagcatctgcaaataaaaaatgcgacaaatcactgaatgatgtgactgcgtttaagaatatccttaagaacgatctagcaacgctggaagggaagcttgacaaatgctcaattgatcaaaagacaacttccaatgaactgaaaaaggtagaacaagctttatctgctagaatttcatcttcttcaaacgacattaagcaattaaatgattcgctctacaattacgtaaatatgtcaatttctagtctaacagatgctaccaataaggacttttctaaagaacttagtgatctaaaaagaagcttatcaggcagattatccaacgatgaatctcgtttaagcgaagtagagaaaaatgtacaaaaacttaggagcgatttcaacgagaaaggtaattcgcttgacactgctatccagggcattaaaaaggatatattagttttgcaaggacctaacgacgagctggctcaaacagtagaggcgggagttttggccaaagttatacccttactaaaccctacccttataacaaaaaacgttagccgtgaactaggtggcttaaaagatgaggttgctgcgcaattcgccgattctagtaagacaataaaagaccttaaaacagaagtagattcctgcaagagagtttctggaaccaagttgaaagaaaatgaaaagaaaataggacagattgagaataatttatctagtacacaaatgaatctaaatgatctatcgaaaagttgaacaatggtgttctcaatcaagtcaatactagagtaacatctgctctaacaaaagcgccaaatgtgaaaccaaagtaaagcaactacagatgagattaataagttgagaaatgattttgaaacgaccgtggccatgcttagagaagaacataaagaatttagaaagaaattggaagcagaagacgttcaagttgtgtaatttatatctatataatacccagatataaagtgcagattacctac

SEQ ID NO: 4584 - DNA, 2209 bp, Diabrotica virgifera
  SmartBlast Evalue=2E-31; Info=Multiple coagulation factor deficiency protein 2-like protein n=1 Tax=Camponotus floridanus RepID=E2A6P7_9HYME
tacaacagtggcagatcattttaatgctgaactgaaaagctgcaaaaaatgtacaatagtattacataatagcaagtaccataatccaaataagtgtactacataataatatgtatatcacacgaggtgcgttaagtagatggagaaatttttattgaaaataagattgttacacacatatttcagaataaatatttcatcatcagttacatttgagaacaataaatacattcatacatgaaaaccctgcaaagtagattatcttcagtttggaatgataaaaatttaatatttattctaacctaaaatttaaaagtagcaaaaacataaaatacgataaagatacggtaaaataacgaaaaatataacaatattttaaagtaggctatggtagggcagatttggacgtgaggttggttgggtctcagggcgtacagatccaagtgtgtatgtaccacgtcactgtagatatcttaatttgcgcttagtgttcataagagtctaaatatttttctagcataacagccaaatttttggcaaccacaatgaatcttttgagcactcattttaagcttaggttgtcagtgtatcgaaggagggtaatttttgacatgctaagacaaggacaaggcaaaattaatgaatcttgtcaatgattggtatctgaaagttaaaaaccttaaaaaaatgctattttgaggacaaattgttatacagggtcaaagtcaaagataagtttgtagatatagataaactttgcaaagaaagccttcaaaaagtttccaagattttctgggaattgctttgaatatggaaacagcattaagggaacaaggtaacaaagtggaacccctagtggaaaagaaaagaaatagtggagaatcagaagagaagtcagaggataaagtgtaattaatgcaataaaacaaattatatcttcagtgagtgtaaatataaacaatttacttgtaaaaagtgtggtaaaaaaggtcacataatgggagcctgcaaaagtggagaaaaatcatttattagaaaatgcagaatattctttagtgtttagtttagatttgccagaaataaattctatagggccaataggtgtacctgctttagtgaagactgtgccaactcaagtagaacttgatactagggctggaatttcttgtttgtttattcattttataaagacaaactaggtcctgttcctttgtattatctgcttttttctatgtttgcgtaggttattcatagttttgtcgatgactattcaaaaacaacagatacaactattgatttgtgcattttgtcataaaatattatgtcttaaaaatattcctatactgaaaaataatgtccaaatctaccccaacctgccctaaataaaattccatgaaatttcagttcaaacccataacaatttaaatttccattactgtgttttaacagtgtctacatactttcgatattctacataactgatgtatccgtcattgtcgggatctatgcgagttaggaattcatcgacataatcagatatagcctcgtcagatagacttttcgccgagtcgtcaccatcgtgccaatgtataagggatttgattaattcgcaaccatccaatttgttattattgtcagcatcatgcatcttgaagtagtggaattgtaattcttgttcgctcattttacttgtatcaattggtacgtccatatgttcagctatatggtccttttcttggacaacattagcagcatttaaaagttgttgaggttgatcatggttatggtgatgatcgtgatgttgctgttgctgtactggtacattttgttggggtacagggacctgttggggcacctgttgatattgttgttgttgctgatactgttgtggaggaggttgttgatattgttgttgttgtggtgggggctgttgatattgttgttgaggcacttggtgttgttggtattgttgttgaggcacttgcggttggtattgtggagggggaggttgctgataacgctgtggcggtactcctggaggcaccttttgtgcactaataatgagcacaagtacgttcaaaactataagtgaaaaactgtataaatacattctgtttaactgaataaaagttcaattcaaatacttatagaaatgttaacgttatgtttaagttcaaatctagcctctgttgaagaacacgtatttgac

SEQ ID NO: 4585 - DNA, 1869 bp, Diabrotica virgifera
  SmartBlast Evalue=4E-35; Info=Multiple coagulation factor deficiency protein 2-like protein n=1 Tax=Harpegnathos saltator RepID=E2B7V6_9HYME
tacaacagtggcagatcattttaatgctgaactgaaaagctgcaaaaaatgtacaatagtattacataatagcaagtaccataatccaaataagtgtactacataataatatgtatatcacacgaggtgcgttaagtagatggagaaatttttattgaaaataagattgttacacacatatttcagaataaatatttcatcatcagttacatttgagaacaataaatacattcatacatgaaaaccctgcaaagtagattatcttcagtttggaatgataaaaatttaatatttattctaacctaaaatttaaaagtagcaaaaacataaaatacgataaagatacggtaaaataacgaaaaatataacaatattttaaagtaggctatggtagggcagatttggacgtgaggttggttgggtctcagggcgtacagatccaagtgtgtatgtaccacgtcactgtagatatcttaatttgcgcttagtgttcataagagtctaaatatttttctagcataacagccaaatttttggcaaccacaatgaatcttttgagcactcattttaagcttaggttgtcagtgtatcgaaggagggtaatttttgacatgctaagacaaggacaaggcaaaattaatgaatcttgtcaatgattggtatctgaaagttaaaaaccttaaaaaaatgctattttgaggacaaattgttatacagggtcaaagtcaaagataagtttgtagatatagataaactttgcaaagaaagccttcaaaaagtttccaagattttctgggaattgctttgaatatggaaacagcattaagggaacaaggtaacaaagtggaacccctagtggaaaagaaaagaaatagtggagaatcagaagagaagtcagaggataaagtgtaattaatgcaataaaacaaattatatcttcagtgagtgtaaatataaacaatttacttgtaaaaagtgtggtaaaaaaggtcacataatgggagcctgcaaaagtggagaaaaatcatttattagaaaatgcagaatattctttagtgtttagtttagatttgccagaaataaattctatagggccaataggtgtacctgctttagtgaagactgtgccaactcaagtagaacttgatactagggctggaatttcttgtttgtttattcattttataaagacaaactaggtcctgttcctttgtattatctgcttttttctatgtttgcgtaggttattcatagttttgtcgatgactattcaaaaacaacagatacaactattgatttgtgcattttgtcataaaatattatgtcttaaaaatattcctatactgaaaaataatgtccaaatctaccccaacctgccctaaataaaattccatgaaatttcagttcaaacccataacaatttaaatttccattactgtgttttaacagtgtctacatactttcgatattctacataactgatgtatccgtcattgtcgggatctatgcgagttaggaattcatcgacataatcagatatagcctcgtcagatagacttttcgccgagtcgtcaccatattaaacctggggttttcctgtcgctttttgctgagctctaatgaattctggatagtcaatataaccatctttgttagcatcgtccacgtttagaataggatcgatgagattagtcagttcgtcgtcagggaagattctcatctcttcgttagttttttctttgttgccttgctcgtgccaatgtataagggatttgattaattcgcaaccatccaatttgttattattgtcagcatcatgcatcttgaagtagtggaattgtaattcttgttcgctcattttacttgtat

SEQ ID NO: 4586 - DNA, 2296 bp, Diabrotica virgifera
  SmartBlast Evalue=0; Info="CG1513, isoform A n=3 Tax= melanogaster subgroup RepID=A1Z814_DROME"
ctctcatgttgataatatatatcacagttcactaacaataataactcaggcgaaagtgggttgtttttttcaggaaagtttagaaaaagcacaatattattcgtaacaaatacgatacgactcgtattctcaagtgttcgttggttggccggataatatcctctgtctcaaaggctttatgtaggtgaacgcatcttctccaattctgtagaacaactttgtttgccattcttgtccgctttctttcctctccttggcttcgtctctctgtttttgctccaaagattgtttagccgcggtagctctatctatctcgttaaatttcaaaccagctgttacttctttccacaactttcgcgattcgttttcctcctgctgactaatcggttcgacctgtttctttataatgtttaattggttaacgtctacgtgttcttcagtctctctatcagtccatttataatccatgattccactccattctcccgagatagttaggaaaggcttcttttcatccggcccgaacacttcagcgttaattttattctttttatttccgtagaagggttttgtgataaattctatattgcagttgtagcccgtttttggacagttaatggtaaccgtaccacccaattcgatccagggtatggtgagtatagatcggccgtaaccattagggaatgtcaagatgtactcttcgtcgtagtcgatcacgttgacgataccttgtccgatattgtagacacatattgacaggccgaggaattttgacttggtgtatacatgcgcgttgaagctgatccgtttattgtagtgttcggcgtagaacgcagatattggaggatgatgggacacctgttcggcaacaaacgtaagttgggacctcttgcaccacggtacgggaccatcctcggctaaactatcatctgcaccattgtcggaattcggaacgtcccaatggcacctaaatacttcgcctaatatcgggttataaggttttttggctacggtactcttccttcctgcgtgatacgaggacagataccatcgaactacttgtaccatacgttctctagggtctttaatgtttggaatatttataaacatatcgggatgcgcaaaataatctgcgtacatttctaataaagatcttctttctaatataaaggtcggtaaaacaactttcgtcagatccataccgattttaacttgcgacagaaggtgtctaatgacggatccgtggctctccaactccaatccgttctcgtcgctttcttcatataaagcatcataatcgaggtcctccagaattgatctagatctaatactatcttgtctaatgctgtttcccaccgggtcgatgggagatttactaacaggaactggggtttgggcatcattgtcgaaggatcttatactagctggtgaaggaagctggctgccagaagagaaaggagagtcattggcgtcgtagaaatcgtcttccccttcggaactggagtacgacatatccggtaccaccagagaggttgggttatctattgacctactatgccgcctagcattttcaatacattctgaacctaattcgatgcctgattgaactactgcgtcccctggtactgctgtttccgcacccgttgaggcgacatttgagttcgaagtacccgctctctggtgataaataccgtttacagggtgcgccgtatttttagctatttgtaataatactattgagtgtttgatgttatccaacataatatttgcatgatctaatataacttgacatttaactttttcatctgaatctgttatagtcgatattcgttcttctaattgcctagtttggtctatcataagttgtagatatgcatctgcttcagaaactttgttatcaaaatccctgatggtcggcgacggatgatgggtttcatacctcaacctattgccatgtctaataatagtttcttctaaagcatgcacccatttttgtcgttcttccgcgtctctagcttggaagtgaaaggtcttgtggtcaacggtaactgtaaaggtgctgtcgtcttcgtcatcgataccgataaccgccccttttaaccgaacgcagcccctccgaacgccgcgcatcattttttctttagaggtatagtacgacagcaggccggagttatcgtctagcacgaaccatctatattgccaccccttcataacattagtccatttacttaaagaaccttccattgccacaaaatttatgaaaaatcacacaaattcatacaaggtacactgacat

SEQ ID NO: 4587 - DNA, 1754 bp, Diabrotica virgifera
  SmartBlast Evalue=1E-166; Info="CG1513, isoform A n=3 Tax= melanogaster subgroup RepID=A1Z814_DROME"
ctctcatgttgataatatatatcacagttcactaacaataataactcaggcgaaagtgggttgtttttttcaggaaagtttagaaaaagcacaatattattcgtaacaaatacgatacgactcgtattctcaagtgttcgttggttggccggataatatcctctgtctcaaaggctttatgtaggtgaacgcatcttctccaattctgtagaacaactttgtttgccattcttgtccgctttctttcctctccttggcttcgtctctctgtttttgctccaaagattgtttagccgcggtagctctatctatctcgttaaatttcaaaccagctgttacttctttccacaactttcgcgattcgttttcctcctgctgactaatcggttcgacctgtttctttataatgtttaattggttaacgtctacgtgttcttcagtctctctatcagtccatttataatccatgattccactccattctcccgagatagttaggaaaggcttcttttcatccggcccgaacacttcagcgttaattttattctttttatttccgtagaagggttttgtgataaattctatattgcagttgtagcccgtttttggacagttaatggtaaccgtaccacccaattcgatccagggtatggtgagtatagatcggccgtaaccattagggaatgtcaagatgtactcttcgtcgtagtcgatcacgttgacgataccttgtccgatattgtagacacatattgacaggccgaggaattttgacttggtgtatacatgcgcgttgaagctgatccgtttattgtagtgttcggcgtagaacgcagatattggaggatgatgggacacctgttcggcaacaaacgtaagttgggacctcttgcaccacggtacgggaccatcctcggctaaactatcatctgcaccattgtcggaattcggaacgtcccaatggcacctaaatacttcgcctaatatcgggttataaggttttttggctacggtactcttccttcctgcgtgatacgaggacagataccatcgaactacttgtaccatacgttctctagggtctttaatgtttggaatatttataaacatatcgggatgcgcaaaataatctgcgtacatttctaataaagatcttctttctaatataaaggtcggtaaaacaactttcgtcagatccataccgattttaacttgcgacagaaggtgtctaatgacggatccgtggctctccaactccaatccgttctcgtcgctttcttcatataaagcatcataatcgaggtcctccagaattgatctagatctaatactatcttgtctaatgctgtttcccaccgggtcgatgggagatttactaacaggaactggggtttgggcatcattgtcgaaggatcttatactagctggtgaaggaagctggctgccagaagagaaaggagagtcattggcgtcgtagaaatcgtcttccccttcggaactggagtacgacatatccggtaccaccagagaggttgggttatctattggtgatgacgcacgagtaactatttcctgtacaaactatacatagcttaatttggcacaccatctacactataaaaatattttttgcatccacattcacaatataattctgacaacacaaaacgattaaattcttgctaatttatcaccaactagaagctaccaacactgataattctcaacgtaacaatttacgtaacactcacaat

SEQ ID NO: 4588 - DNA, 2100 bp, Diabrotica virgifera
  SmartBlast Evalue=1E-108; Info=Rho guanine nucleotide exchange factor 12 n=1 Tax=Camponotus floridanus RepID=E2ACZ4_9HYME
cgaattaagagagctggctatttccctaactaaactagtgggcacagtgggagcagtcactgtttctccaatgacttcctgttgactggcacaggtctgatgttttccgcctttggcagccatggcgtccaattccgttatgttcagcgaatcgttcacagccttctgtaacagattgacttggaaaatagatgcgaggaccctctccgatggatctcgtccattggaggggtccatggatgccatatcagcgatatgttcgaagtgttcgcgaggtatgctcaacatgtccgctactaggccttctttgtcctccaatgcttgttttaccatagcatctttgcggcgaatttgttctagcggtgtgagcatggactcggcgacgtgaactggaggcactgccacgctgacttgcgacggttgaattaaaggccattcttctgcgctaacttttgtcgattgtataccaccaccagcaaccatttctggcgaagaacaagtcgcatcgacgttgtcctctttactctctcccttcagcgacgtcgggttctttctcctgtgtttcggcactgggtaggtcgctgaccggttccgatgagctttcctcacctccaacggtctcagctcgctcggagacgtcctccgctggtggaagatcctggacgctttcagtttccgaatcggaagcgggatcttggcggtccagggatttaccttggcgtttgttgtaggattctgttgcgtcggtgaaatgtttaaaccacatttctcttttgatttcatcttctactactaaatcatacatttgactattgttggctgaagtgttaacaagaaaaagcgcgtttttacacacagcattggccctagttaaaagcatattcatcttaataattggcgaaaggggttggggttgtgcctgcaaaccggactggaagaatttcaggagaaacctgtcactatccctgtggaggatcataaccgcttcctctagaagtaatatatgaactggtactataggtttattaggccgccttagctgcatactcccttctaaaattaatctaaatttcgataaatctaaagtcctaaattcttgtgctattggttgctcagatctctcgaatccgctggtatccaaatgtttctgtatttcttccagcctgtgtttgttatgtgctagtttggctgcttcgttgacctggttcaagatctctttggacatctgatgagcccttttcaaattcgctagctcctctagttgactaagcgcttgatcgttgtctttatttgattccacgctatgcatcagcctttcaataagaagggggtatttggtaagcctctgcatttctgttggcagaattccttggaaaggtaaccgcctgcactgcctcttcttttcacactccgtaagcacagcatcgaacttagaatccctttcccgtctcttcttaataaattccagcgccatctgttgcctctcacaaaacgttgccgcggccttctttaacgactctccatctcgttcaccgaacatgtttgctaataggcttcctacttctcttactatggcgtcctcccttcgcctttttctcatttctttattgaaatctgtgtggatatcgagaatttctttaatgtttggaaatattagatttagctcgtctggttttagggtatgactctcttggatttttttataaaagatcttgtagagaaccttcaggtttcttacgtgcgagctttcggtatggaagagttcatttatcacatcatgtctttttttctcatgtggaggaaggtttttcaattcttcttgatatcctaaattttgccactgttcagattcggcatcaatatcactgtccgaatccaaagttcctcgtctggcggaatcctgagtgacagcatccacgctgttacttggactttccgagaggcggccattgcaggatatactggaattggaggaactccctgattctgtatgggataaagctgtggatctttccaaatcaacatcgccactataaaaaatagaacttgcaaccgtggtggtagtgttgtgcgagggatcactgatgttccgtctttgtt

SEQ ID NO: 4589 - DNA, 1941 bp, Diabrotica virgifera
  SmartBlast Evalue=9E-90; Info=Rho guanine nucleotide exchange factor 12 n=1 Tax=Camponotus floridanus RepID=E2ACZ4_9HYME
tgccatatcagcgatatgttcgaagtgttcgcgaggtatgctcaacatgtccgctactaggccttctttgtcctccaatgcttgttttaccatagcatctttgcggcgaatttgttctgcatgatcgtgttcgttttgtacattgttagtatcaatatcacacaagcaatcaagtgcagagtgagtgttgtgcatacctagcggtgtgagcatggactcggcgacgtgaactggaggcactgccacgctgacttgcgacggttgaattaaaggccattcttctgcgctaacttttgtcgattgtataccaccaccagcaaccatttctggcgaagaacaagtcgcatcgacgttgtcctctttactctctcccttcagcgacgtcgggttctttctcctgtgtttcggcactgggtaggtcgctgaccggttccgatgagctttcctcacctccaacggtctcagctcgctcggagacgtcctccgctggtggaagatcctggacgctttcagtttccgaatcggaagcgggatcttggcggtccagggatttaccttggcgtttgttgtaggattctgttgcgtcggtgaaatgtttaaaccacatttctcttttgatttcatcttctactactaaatcatacatttgactattgttggctgaagtgttaacaagaaaaagcgcgtttttacacacagcattggccctagttaaaagcatattcatcttaataattggcgaaaggggttggggttgtgcctgcaaaccggactggaagaatttcaggagaaacctgtcactatccctgtggaggatcataaccgcttcctctagaagtaatatatgaactggtactataggtttattaggccgccttagctgcatactcccttctaaaattaatctaaatttcgataaatctaaagtcctaaattcttgtgctattggttgctcagatctctcgaatccgctggtatccaaatgtttctgtatttcttccagcctgtgtttgttatgtgctagtttggctgcttcgttgacctggttcaagatctctttggacatctgatgagcccttttcaaattcgctagctcctctagttgactaagcgcttgatcgttgtctttatttgattccacgctatgcatcagcctttcaataagaagggggtatttggtaagcctctgcatttctgttggcagaattccttggaaaggtaaccgcctgcactgcctcttcttttcacactccgtaagcacagcatcgaacttagaatccctttcccgtctcttcttaataaattccagcgccatctgttgcctctcacaaaacgttgccgcggccttctttaacgactctccatctcgttcaccgaacatgtttgctaataggcttcctacttctcttactatggcgtcctcccttcgcctttttctcatttctttattgaaatctgtgtggatatcgagaatttctttaatgtttggaaatattagatttagctcgtctggttttagggtatgactctcttggatttttttataaaagatcttgtagagaaccttcaggtttcttacgtgcgagctttcggtatggaagagttcatttatcacatcatgtctttttttctcatgtggaggaaggtttttcaattcttcttgatatcctaaattttgccactgttcagattcggcatcaatatcactgtccgaatccaaagttcctcgtctggcggaatcctgagtgacagcatccacgctgttacttggactttccgagaggcggccattgcaggatatactggaattggaggaactccctgattctgtatgggataaagctgtggatctttccaaatcaacatcgccactataaaaaatagaacttgcaaccgtggtggtagtgttgtgcgagggatcactgatgttccgtctttgtt

SEQ ID NO: 4590 - DNA, 2072 bp, Diabrotica virgifera
  SmartBlast Evalue=0; Info=Cytochrome P450 9Z4 n=1 Tax=Tribolium castaneum RepID=D6WWU4_TRICA
atttaaatatatggactagacacagtaggaaaaatgaaagaacacccacgaacgaacacacaaaacacgctgcatcttcccgtcaccgtgtcacacaaaaaattggccagcgcaagtacatgtaacaattattgttacatgtattcccactggacaatttccctgagacacggtgacaggaaaatacagcgtgctccatatgctcgctcatgggcactccttcatccttccgactgtatccaataccaatatattaatattatcaaaatcagtttattgataaatgctttttaatgtaatatatctcatcatttcaacttcagtttatttccttatacgtttcagattgaaccaaaagcccccttcggcagccaaattgaactgcttcttagaaagtttcagcggtatttgtgttttagccgaaggctcaatctcatagttggccaataaatggaagaacacgaccttagtctccaaaagtgcaaatctagatccgatgcagttcctaggtccaacaccgaacgggatgtaagcgtaagtttgaatctttgatttgttttcatcgttaaatctctcagggtcaaacttctcagggtctggatagtactgaggatcacggtgtaaaccatagattggaaaccatattgtcgtgcctttctcgaggtagacaggtttctcatctggtgtggcaggttcaattgtgtatggtttggtgcaaattctgtctactgctacacctgttggccattttcgaagcgcctctgacactaccatatctaaatatttcatttttaatatcgcttcatatggcaccttgccattatactgctctaacgtgtcctctatttctgttctaaggctgttctgaatgtcaggattgattgccaattcataggataggaaacacattaacgaagataccgaatcaaaaccagcaaagaagaagatcatcgcctgagcagcgatgtctatgttggtcatctctttgacgactcctttacctaaatctgcctcttcgacaactgcaaatcctgtatctataactttttcttcatgttgatgaactccttttcttgcttccattaaaagatggatcatgtctggacgtactattcccttttcttctctgactttaattgtgtcatcaataagatcagtgaaaaattttcttacatgtccagtgaacataccaagttttaaaaatgaaaacaatcttggaaaaaatattatgcccaaaaacttaagatttttccaaaatccactgaagttggtgatatctttgcccatgacaaaaaattcgttttctttattcttcatagaatcaattttaataccaaaagcggtcgtagcaataacgtcgttggtaaaacgcgtaaatgtgtctttcatttcgatctctatgacatcttgattgagttctaaaaagtgtttagtaaaagattctgccgtttcagatatcaaaacgaacatcgctctcattttgctgctggtaaaagatgggcttagaattggcctcatgtcccgccatttttgacctgttaaggcaaacagattctttgcccatagtggatcagcatcttcagatatgattgatctgtggtcagtaaagtgatcaaagtctttgacgccgatctgcttgatcaattctaggtcttttataacaagggtgggtatagtgaattggtatgctccagagtatcgtacttctggcactgcattatacactcttattaccatatcagcgaaactttccctttttattgttgtaccgagattatcgccaaaaaaccaggcggttgttccctgttttattcctcgatccttccaatattgcatgggtttgtatcccacataatacattaggaccgccaaggcggtcacaatcaaaactatttctatcatgttgactaacctgacagttactgtttcatgtcacttatatcacttccttcaaaaacaaacaacttgtatatcaatttggtactttggaatctgtggttggtgcctctgatatgcttgttcgcaattaaacgttcaaggattcactactaaaattagccaatatgtataag

SEQ ID NO: 4591 - DNA, 1908 bp, Diabrotica virgifera
  SmartBlast Evalue=0; Info=Cytochrome P450 9Z4 n=1 Tax=Tribolium castaneum RepID=D6WWU4_TRICA
aaaactatataaaactatattttaaaataacaataaccaaactaaaaattaaaaactaaacatttatatttcaaaataacatacctacatctaaaatcagagtttaaaatttaaatcaaacataaaaatttaatataaaagtcgtcattttaattccaccttatttccttatacgcttcatattgaaccaaaagcccccttccgcagccaaattgaattgctgcttgcaaattttcactggtattattgttttcgccgaaggttcaagctcatagttagccaataaatgaaacaacacgactttagtctccaaaagtgcaaatctagatccgatacagttccttggaccaaccccgaaaggaatgtaagagtaaggttgaatcttggttttgttttcatcgctaaatctttcagggtcaaacttctcagggtctggatagtactgaggatcacggtgcatagcaaagattgggtaccatattatcgtgtctttcttcaagtagacaggtttctcacctggagaggtaggttgaatcgtgtatggtttggtgcaaactctgtctactgctacagctggtggccattttcgaagcccctctgacaccaccatatctaaatatctcatttttaatatcgcttcatatggcaccttgccattatactgctctaacgtgtcctctatttctgttctaaggctgttctgaatgtcaggattgattgccaattcataggataggaaacacattaacgaagataccgaatcaaaaccagcaaagaagaagatcatcgcctgagcagcgatgtctatgttggtcatctctttgacgactcctttacctaaatctgcctcttcgacaactgcaaatcctgtatctataactttttcttcatgttgatgaactccttttcttgcttccattaaaagatggatcatgtctggacgtactattcccttttcttctctgactttaattgtgtcatcaataagatcagtgaaaaattttcttacatgtccagtgaacataccaagttttaaaaatgaaaacaatcttggaaaaaatattatgcccaaaaacttaagatttttccaaaatccactgaagttggtgatatctttgcccatgacaaaaaattcgttttctttattcttcatagaatcaattttaataccaaaagcggtcgtagcaataacgtcgttggtaaaacgcgtaaatgtgtctttcatttcgatctctatgacatcttgattgagttctaaaaagtgtttagtaaaagattctgccgtttcagatatcaaaacgaacatcgctctcattttgctgctggtaaaagatgggcttagaattggcctcatgtcccgccatttttgacctgttaaggcaaacagattctttgcccatagtggatcagcatcttcagatatgattgatctgtggtcagtaaagtgatcaaagtctttgacgccgatctgcttgatcaattctaggtcttttataacaagggtgggtatagtgaattggtatgctccagagtatcgtacttctggcactgcattatacactcttattaccatatcagcgaaactttccctttttattgttgtaccgagattatcgccaaaaaaccaggcggttgttccctgttttattcctcgatccttccaatattgcatgggtttgtatcccacataatacattaggaccgccaaggcggtcacaatcaaaactatttctatcatgttgactaacctgacagttactgtttcatgtcacttatatcacttccttcaaaaacaaacaacttgtatatcaatttggtactttggaatctgtggttggtgcctctgatatgcttgttcgcaattaaacgttcaaggattcactactaaaattagccaatatgtataag

SEQ ID NO: 4592 - DNA, 2179 bp, Diabrotica virgifera
gggaattaacaatttgagatgcttagagcaacagtggtcaaacccacaattccaccaaaacgcttttattacatcaaagttatcccttatttgagtatattctaatgcagagtggctcaaggattgattgcttgagccactctgcacctgaaaataccgaaaaaaccagtaggaacacattcgctgcccattgataaagatgtaactcggctaggagccattctattgaacggcacctgactgaaataaccatatgacgcgctggcgtgtcattagcagcgaatgggttaaataagggataactttaatgtaataaaagcattttgtaatattgtgggttagaccaccgttgctctgagcatctcaattatcatttacttgtagagaaaccattatagatttatattttttattaatctcataagaagatgatttcaaagattttaatcaacatgctcaatcagaaaaagtggtacatcattattttccaggcaatggtaaaatcattctttaaacattactacagtagactccctctctaacgagaactgaaatggcagactaattacttcgttataagcagatctcgttatatcagacaacaataatattgtgcaaaccaccaccactgagatgttttgatccctcttacgtagtttattaggtgtcgatggtcgacctcaacaatgaaaagttggccatcttaaattgtaaatttcctacaatattcaatatcggttgatagataaacaagaaggaagaagtttattaccggcggtggaatttattacagcattggtctcaataagcacacagatgttgggcattcctgtatacaggcagttatggtatttatttatggccatcaccacgccaaaaacaggtaaagaaacattcttcgatttcatttttcctagttataaccaaatatgcctcgttatagaggttatatagttcaataggaatttcatgggacatctagtgtacctcgttataagcaaaacctcataatacccgtgttcgttatagagagtctactgtataaggtaatgaatgacctctggaacttcaaactcttgtgcattatttatgataaggttacagccagacaagcgacaattcacagcactgtaagagcagtaaaatgaagtgcaaaaataagtttcatggtgagtgtagtggatggccagactgagctgcaaaatatcgtgcagcaacataggatagaacccatttttcacgcttcattttactgctcttacagcgccgcaaattgacacttgtctggcagtagcctaagagatgaaattgaacaatccaatcagaaaacaagccagctagattctgaatcaaggaaaaaatgggaagataagtgattatgacaagtacaatgggcatttgtcataaatcaaaatcggttaaaattgataaaatacataacgaataatgataaataagcagtggctaataattctcaaaattaatagttcaaaattaccaacacctaaaattttggggtataaaccagacaaattatattctacattaaggatcatatcgaatgttgacaaaaaaagcgtttgtgataagaaataaaccatcccatagttaaaaattgatttaccaagacttaatggattaaaaatttacgctgcttagctatgtgtcataatttttcaaaataatacaaaaatatagaggtataccacataatttaagtaatacaacatacatttcataccaatatcacagtattatgtctttaagcatgtatataaagctgatacattattttgtaaaatattcgaatacattatcacaagtgttttaagtagtagtaactcatctatatttaattgctgatgacaacatttttatttattaatataacagaaaaatgattgtatcaagacataatttgtttcattgtatggcatctcgattattttttcaaatatcttttgaaaatagccacagattgataaataatttttttattatcagtttttaaactaatgtagataaagatctattctatgctctacttaactgtggttacgcattacgagtttactgaaaaaatcaattaacttttaattaccaaaaataatcaaattataccagacttacaaataaaagcactcaatcttctattaatgaataatattctccattaata

SEQ ID NO: 4593 - DNA, 1783 bp, Diabrotica virgifera
cgttagattcaataaatagtcatttaagtcatttagtcgcatttttgttaacttaagaccatctctacatagcacgcacgacatcaccaaagtaagcggtaatttttgtcaagcactaacctagtacagtagactccctttataacgagaactgaaatggcggactaattacctcgttataagctggatctcgttatatcagacaacaataatattgtgcaaaccaccaccactgagatgttttgatccctcttacgtagtttattaggtgtcgatggtcgacctcaacaatgaaaagttggccatcttaaattgtaaatttcctacaatattcaatatcggttgatagataaacaagaaggaagaagtttattaccggcggtggaatttattacagcattggtctcaataagcacacagatgttgggcattcctgtatacaggcagttatggtatttatttatggccatcaccacgccaaaaacaggtaaagaaacattcttcgatttcatttttcctagttataaccaaatatgcctcgttatagaggttatatagttcaataggaatttcatgggacatctagtgtacctcgttataagcaaaacctcataatacccgtgttcgttatagagagtctactgtataaggtaatgaatgacctctggaacttcaaactcttgtgcattatttatgataaggttacagccagacaagcgacaattcacagcactgtaagagcagtaaaatgaagtgcaaaaataagtttcatggtgagtgtagtggatggccagactgagctgcaaaatatcgtgcagcaacataggatagaacccatttttcacgcttcattttactgctcttacagcgccgcaaattgacacttgtctggcagtagcctaagagatgaaattgaacaatccaatcagaaaacaagccagctagattctgaatcaaggaaaaaatgggaagataagtgattatgacaagtacaatgggcatttgtcataaatcaaaatcggttaaaattgataaaatacataacgaataatgataaataagcagtggctaataattctcaaaattaatagttcaaaattaccaacacctaaaattttggggtataaaccagacaaattatattctacattaaggatcatatcgaatgttgacaaaaaaagcgtttgtgataagaaataaaccatcccatagttaaaaattgatttaccaagacttaatggattaaaaatttacgctgcttagctatgtgtcataatttttcaaaataatacaaaaatatagaggtataccacataatttaagtaatacaacatacatttcataccaatatcacagtattatgtctttaagcatgtatataaagctgatacattattttgtaaaatattcgaatacattatcacaagtgttttaagtagtagtaactcatctatatttaattgctgatgacaacatttttatttattaatataacagaaaaatgattgtatcaagacataatttgtttcattgtatggcatctcgattattttttcaaatatcttttgaaaatagccacagattgataaataatttttttattatcagtttttaaactaatgtagataaagatctattctatgctctacttaactgtggttacgcattacgagtttactgaaaaaatcaattaacttttaattaccaaaaataatcaaattataccagacttacaaataaaagcactcaatcttctattaatgaataatattctccattaata

SEQ ID NO: 4594 - DNA, 2081 bp, Diabrotica virgifera
  SmartBlast Evalue=4E-39; Info=Trichohyalin n=1 Tax=Culex quinquefasciatus RepID=B0W801_CULQU
cacgaacaaacactgaccgattacaaggcctctctcgcgtgtttcgagccagaaatagcctaaaatatcagccaccgttcgtgccaacgtgaatttagaagctgactctacgtgcaattaaccgaagtaatgagttttgtgaggagtattttcggtggtagtgataataaagacgcggaagtggatgacgacaccagtgacgagatttcctcgtcctcggatacaggcttcttgagcaaccttagcaccagcgacttggagagcagtttgggctccaatggtaccggggagccggactgttcgaccatttcgaacttctttggatattggaaaagcctggtgaatcaggaagccaaattccaaagtaaactcaatgaactcacgaaggagctcgcaatccgagatgctgaagcacataaactcaaatttcagatggaagaactccaaagagatgcttttgctaaatcagctggaatggacaggttagaatcagaattaaaagaggcacaaaaagaatgcgaaactatcggtcgaaccatacgaatattggaaaatgacctcgaaaaccaaaagaaacgcaacatattaataaatcgggaattagaagaaaaaaccgaatcgtttagtatatcagagaaagactacaaatccaaaatagaatacctagaaaatgttataggagagcttcgaaagcgaatagaaagcttagaagaacaaatacggatcctccaagaagaaaaactacaactaaccaaacgccaagaagaaatatttctcgagagagatgaaaaaaccaaacagataaccgacaacctagaacaggcacagaaacagaaagaacaactggaggaaaaatggaaaaaagacttcgagaatctcagaacggtcaatatggttagggagcaggagatgttggacgatttcgagtggaagctgagggatgtacagcagaactgcaagaaaaagattgatgagaaagaggaaattttacagatgtccctcacacattcacagaataaggacaaggagaccgaagaattgaccaaaaagatggaaagtctgacattactagaaaaagaactaaacgaactgagagaaaaaactagcgaccaaaacacattaatgaaaagtatgtacgacgagcacgaaaaaatgcagcaaaacgaagaaaacctcaaaaacgaagtcaaaaaaactgagaaacatgattgatctcgaaaaagaaaacctacagcacatgcaacggctacatcaccaagacatcttagataaagagaggaaactgcaacaaactctaaacgagaagaaggtggagattgcaatctactgggaggaaaagctactgaacgagatttcaagactgaaggatgagctggagcaggtttacattgaagagaagattacggctattgagaacattaagaggaataaggatgagtgttttcaaaaggcgcaagcgcagtgggaaaagaaatacgcacagtatctaaatgaggttcacacactacaaaatgcactggaagagaaagataagttctacaaagatgaaattgtgaaacagcaatctataacagaccaagacatttttgaactaagaagattgatggataagctggatatgtcacatcacgacaaatatgagaagttaacccaaaaacatgaagcagaattagaacgaatgaaggaagaatatgaaactatggtggaagatagagaacaatattggaaatcagaaatagatacactgaactcaacgatagcaaacatgaggctacaagtagaggacgaaaaccaagaaaaattaaaagttctaattcagagtcatcaaagtgaattggaagaacagtgggagaatctcattcaacagaaaaaggaagctatccaattcctggaagaaaaatacatagccaaatgcgtccagctagaggaccaacttaaccagctccagaaatctcacagtggccgtgaagtggagcttttaaagactgtagattccttgaagaacgaagtagcaaagcaaagaatctatcatacaagatatgcagagtaatatggatatgctggaaggtggtattcaggtt

SEQ ID NO: 4595 - DNA, 1889 bp, Diabrotica virgifera
  SmartBlast Evalue=4E-39; Info=Trichohyalin n=1 Tax=Culex quinquefasciatus RepID=B0W801_CULQU
cggaatatgttaggttaagtctggaagctcactctgtgccggtgattatgtaaaatgtttagtgaaacggcgtttacgaggtgtcaatgaggtctctttaattgggtttttgatatgttgcctgggtggctgacgaggaaaagcctggtgaatcaggaagccaaattccaaagtaaactcaatgaactcacgaaggagctcgcaatccgagatgctgaagcacataaactcaaatttcagatggaagaactccaaagagatgcttttgctaaatcagctggaatggacaggttagaatcagaattaaaagaggcacaaaaagaatgcgaaactatcggtcgaaccatacgaatattggaaaatgacctcgaaaaccaaaagaaacgcaacatattaataaatcgggaattagaagaaaaaaccgaatcgtttagtatatcagagaaagactacaaatccaaaatagaatacctagaaaatgttataggagagcttcgaaagcgaatagaaagcttagaagaacaaatacggatcctccaagaagaaaaactacaactaaccaaacgccaagaagaaatatttctcgagagagatgaaaaaaccaaacagataaccgacaacctagaacaggcacagaaacagaaagaacaactggaggaaaaatggaaaaaagacttcgagaatctcagaacggtcaatatggttagggagcaggagatgttggacgatttcgagtggaagctgagggatgtacagcagaactgcaagaaaaagattgatgagaaagaggaaattttacagatgtccctcacacattcacagaataaggacaaggagaccgaagaattgaccaaaaagatggaaagtctgacattactagaaaaagaactaaacgaactgagagaaaaaactagcgaccaaaacacattaatgaaaagtatgtacgacgagcacgaaaaaatgcagcaaaacgaagaaaacctcaaaaacgaagtcaaaaaaactgagaaacatgattgatctcgaaaaagaaaacctacagcacatgcaacggctacatcaccaagacatcttagataaagagaggaaactgcaacaaactctaaacgagaagaaggtggagattgcaatctactgggaggaaaagctactgaacgagatttcaagactgaaggatgagctggagcaggtttacattgaagagaagattacggctattgagaacattaagaggaataaggatgagtgttttcaaaaggcgcaagcgcagtgggaaaagaaatacgcacagtatctaaatgaggttcacacactacaaaatgcactggaagagaaagataagttctacaaagatgaaattgtgaaacagcaatctataacagaccaagacatttttgaactaagaagattgatggataagctggatatgtcacatcacgacaaatatgagaagttaacccaaaaacatgaagcagaattagaacgaatgaaggaagaatatgaaactatggtggaagatagagaacaatattggaaatcagaaatagatacactgaactcaacgatagcaaacatgaggctacaagtagaggacgaaaaccaagaaaaattaaaagttctaattcagagtcatcaaagtgaattggaagaacagtgggagaatctcattcaacagaaaaaggaagctatccaattcctggaagaaaaatacatagccaaatgcgtccagctagaggaccaacttaaccagctccagaaatctcacagtggccgtgaagtggagcttttaaagactgtagattccttgaagaacgaagtagcaaagcaaagaatctatcatacaagatatgcagagtaatatggatatgctggaaggtggtattcaggtt

SEQ ID NO: 4596 - DNA, 2004 bp, Diabrotica virgifera
  SmartBlast Evalue=9E-24; Info=Leucine-rich repeat-containing protein 24 n=1 Tax=Harpegnathos saltator RepID=E2C4M8_9HYME
agcaatatcccattgataagtcagctcatcaagtcgttgagtatctctatggcacatagatgatcctaattaggattatggcttaaaaaatattttaattctgtagtctagaggtaatttaagagaccctgttttttttttaaatgtcgatcttttgattactctacataattatttaaacgagaaaaaggaattttattcttttggagactattttgcgaacaggatatgaatagttgtggggatttgatgtgaataggtataacgatatattaggaactttcagaaatattgctaaatgaattgtaatattgtgattttagcccaaacgagacctttagagatctaggtcagtctccatgtatcccataaccattcatattctggtcgattagtaccaaaatttaaaaaaaatgtttgtaaataaccgcataaccgccaagagcaagttcaaacacggcaaaattcacgtggtttctgtctgcgcataaagttatttaattcgatgttcgtggtttcgcgtactatatttatatccgtgcggatattcgagcggatatccaagcggaatccgcgtgacacgatccgcacggattagtatgaacatcaattcgaaatatcgcggaatccgctgtgtctgaactagccctaaaaaaaataatatctatttataaatattttcaacagtttttctccgtaaaggagaatcatccccaatactctccagtgttttggtctgtttgtttttatgctttctattttttcggcagtataaaaatatcaagaaactcaatataataataacagctgcagttgcccctacgcctatacaaatacttttcagtaagttgcttcttttgattgcttcaaattgtatattacattgactgaacaactgtaagtcttcatcattcaaagtcacagagcattgtgactcagctataagacaaataaacctagtaaactgtattcctctggtttcaagccagtaattcaatctccaacagtcacaggtatcattaaaagcaacagtaacattatcgttgatcaacttctgcaaattgcacaatcccataaataaaccaggtgtcacattaaaataaaaattaccagtaacattcaacgttgtcaataatggcatcagtccaaaattgggaaagtttgtaggattttcaatgtcagtcgttttgctaatatcgatttgtataagagggctggtaacaggacttgcatcctctacagcctgtactatatctatatttaaattctgttttaggtacagcgagtttaaatatggcaggtggaagatgctgggaggtatggtaacaatggcatttaacgacaaatccaaagttgttaagcgatatgcgtcctcaaataggtctttatctaatttagagataagattgtctcctaagtacaagaattttagactactgaatttgctaaggtcacttcttgttattttccttattctattgtagcccagatcgattacctcgacgtctgaggtcaagcattgtggaaattctctaaactctctgttatagcaatcagctgttttcattttgtgcgaacgggtcatgagacattgtggtccttctttgcaattcatggcatatatgtaaattatttgcaggttcaacagccataatatctcgattttcatatctggtcccctcagcacatgttatttcacgataaaatgaggaaaaaaacaaaaaatcacactgtcaaatccaattacacactcaccgtcacagcactccagagtctagtactaataaaaattaactagctaaattgcagaatgactcttaactgatccatcatatacggagataaacaatgctgtagagatatgcaccgccttccaaaacatccgcgcgtagaactctgttcattttgaaacaattttttcaaaagttttatttaagagtcataggttaataactgttagtaatggttctccttatttactaattaaagatacttctttgtctc

SEQ ID NO: 4597 - DNA, 1935 bp, Diabrotica virgifera
  SmartBlast Evalue=9E-24; Info=Leucine-rich repeat-containing protein 24 n=1 Tax=Harpegnathos saltator RepID=E2C4M8_9HYME
agcaatatcccattgataagtcagctcatcaagtcgttgagtatctctatggcacatagatgatcctaattaggattatggcttaaaaaatattttaattctgtagtctagaggtaatttaagagaccctgttttttttttaaatgtcgatcttttgattactctacataattatttaaacgagaaaaaggaattttattcttttggagactattttgcgaacaggatatgaatagttgtggggatttgatgtgaataggtataacgatatattaggaactttcagaaatattgctaaatgaattgtaatattgtgattttagcccaaacgagacctttagagatctaggtcagtctccatgtatcccataaccattcatattctggtcgattagtaccaaaatttaaaaaaaatgtttgtaaataaccgcataaccgccaagagcaagttcaaacacggcaaaattcacgtggtttctgtctgcgcataaagttatttaattcgatgttcgtggtttcgcgtactatatttatatccgtgcggatattcgagcggatatccaagcggaatccgcgtgacacgatccgcacggattagtatgaacatcaattcgaaatatcgcggaatccgctgtgtctgaactagccctaaaaaaaataatatctatttataaatattttcaacagtttttctccgtaaaggagaatcatccccaatactctccagtgttttggtctgtttgtttttatgctttctattttttcggcagtataaaaatatcaagaaactcaatataataataacagctgcagttgcccctacgcctatacaaatacttttcagtaagttgcttcttttgattgcttcaaattgtatattacattgactgaacaactgtaagtcttcatcattcaaagtcacagagcattgtgactcagctataagacaaataaacctagtaaactgtattcctctggtttcaagccagtaattcaatctccaacagtcacaggtatcattaaaagcaacagtaacattatcgttgatcaacttctgcaaattgcacaatcccataaataaaccaggtgtcacattaaaataaaaattaccagtaacattcaacgttgtcaataatggcatcagtccaaaattgggaaagtttgtaggattttcaatgtcagtcgttttgctaatatcgatttgtataagagggctggtaacaggacttgcatcctctacagcctgtactatatctatatttaaattctgttttaggtacagcgagtttaaatatggcaggtggaagatgctgggaggtatggtaacaatggcatttaacgacaaatccaaagttgttaagcgatatgcgtcctcaaataggtctttatctaatttagagataagattgtctcctaagtacaagaattttagactactgaatttgctaaggtcacttcttgttattttccttattctattgtagcccagatcgattacctcgacgtctgaggtcaagcattgtggaaattctctaaactctctgttatagcaatcagctgttttcattttgtgcgaacgggtcatgagacattgtggtccttctttgcaattcatggcatatatgtaaattatttgcaggttcaacagccataatatctcgattttcatatctggtcccctcagcacgtcacagcactccagagtctagtactaataaaaattaactagctaaattgcagaatgactcttaactgatccatcatatacggagataaacaatgctgtagagatatgcaccgccttccaaaacatccgcgcgtagaactctgttcattttgaaacaattttttcaaaagttttatttaagagtcataggttaataactgttagtaatggttctccttatttactaattaaagatacttctttgtctc

SEQ ID NO: 4598 - DNA, 2386 bp, Diabrotica virgifera
  SmartBlast Evalue=1E-112; Info=L-lactate dehydrogenase n=1 Tax= Camponotus floridanus RepID=E2AWN0_9HYME
agcttttgcgggataacgttgccagtgttgtgctcgtgttttttcagttcgccgcaccaaaatgagtgtcagagatggtctgtttacccccgtgggggaatccattgagaagacttccaatagggtcacagttgttggcacaggagcagtaggaatggctactgttgttagtttgctgatgcagggtataacccacgatgttgtcctaatggatgtaatggaagacaagcttaaaggtgaattaatggatctgcaacacggagctttgtttttgaaaaatcccaaaattgttgcaagcaaagattacaaagattcagcaggctcaaagatttgcatcgtcactgccggagccagacaacaagaaggtgaatcacgtctagatttagtccaaagaaacaccgacatcttcaaacatatcatcccacctctagtgaagtattccccagatacgattttaatgatcgtcagcaacccgtgtgatattttgacgtacgtggcatggaaattgtcaggactgccacaacacaaagtgtttggttccggaaccaacctagatacgtctagatttaggtttttaatttccgaaaggttgggctgcagctccagcagtgttcacggatggattattggagaacacggtgacaccagtgttcctgtctggtctggagtcaacgttgccggagtgcgtctgaaagacgttcaatccaaggttggtacagatgacgatccagaagaatggaaaaagatccatgcgcaagtagtcaattcagcatacgaaatcatcaaattaaaaggatacaccaactgggctatcggtcttagtgcagcctcattggccaatacaattttaaagaatcttcatcacgttcatgcagtatctgtcatggttaagggtcatcatggtgtagccgacgaagtgtacctctctcttccagctatgttgggcgaaaccggtatcgtcagcattgtcaaccagaacttaaacgaggaagaagtcgaggccctccaaaaatctgctaggacgttagcagaatgccaagcagatttaaaaatttaaacgccaaaaagtataaacagaataagtgcacactaaacctataaattacgagggtaattcgttaaataaggtccctatatgccgctgagatagcgtgtggcgtgctgggagaaatctggcaacactgttttacatatcaactttccctctctctcagtccaccagttccgtctcgcttcattgctcagtgtcggcctagcagttttcgaagaggctacggtcgctgttaccgccaatgtgtgattattgctgtgataagttttttaaatgcaaaatggatgtcatctattgacattcatcgtcagttaatcgaactttgtgggtagaggtgcatatctgttcaacattcacgatgaagatgggagcggaaagtcttcagattcatcgtgaatttccgttcggccttcactaaattctctacaccatttgcgaacatgttgaacagatatgcacttttacctaggaacttcgattgactgacgatgaatgtgaataggtgaaatctgttttgcatttaaaaaacgtatcacagcacgaatttcacattggcggtaacagggactgtgatcttcaaaggctgctaggctgacactgagcaatgcagctaggcgaaagtggtgaggtgagatagagagattttatgtataaggcagtgttgacagatttctcccaggacgtcgtactctttcttagcggagtagggaaccttattttatgaatgacccttgtatttatagaaaatagagacgattgtattttattatagtcatcaaatatttttgaactttacagtattagaaaagcaaactatttatacaacacgcttgtttattctatttaatagatgtgatgtatttaaagtaattagtattatattaacacagttaataaataccaaagaatatttaataaattatacataatgactatattatataacgattataactgtcccctagatgaatatactcagttgataaagcatatccttgttttggttatcttataccttatattgatctagaatacatatatcattagcatctttatattagcatctagtagtcagttgtatgatgtgtcgcttctagaaatagaattcctttaaatgtttttaaaagtcaatgttttcaatttaataaaatataaaataatattaaattaaaaaccttattggcaacatttttctggttacacctccgtggcttctaaaaatacaagctaagcggatgctcgagcaaaagaagatgagggaattctataacttgcaattcacatcccatatgtccagggcggaaaaattccaacgaaaaatggactctacatact

SEQ ID NO: 4599 - DNA, 1549 bp, Diabrotica virgifera
  SmartBlast Evalue=1E-115; Info=L-lactate dehydrogenase n=1 Tax= Camponotus floridanus RepID=E2AWN0_9HYME
agcttttgcgggataacgttgccagtgttgtgctcgtgttttttcagttcgccgcaccaaaatgagtgtcagagatggtctgtttacccccgtgggggaatccattgagaagacttccaatagggtcacagttgttggcacaggagcagtaggaatggctactgttgttagtttgctgatgcagggtataacccacgatgttgtcctaatggatgtaatggaagacaagcttaaaggtgaattaatggatctgcaacacggagctttgtttttgaaaaatcccaaaattgttgcaagcaaagattacaaagattcagcaggctcaaagatttgcatcgtcactgccggagccagacaacaagaaggtgaatcacgtctagatttagtccaaagaaacaccgacatcttcaaacatatcatcccacctctagtgaagtattccccagatacgattttaatgatcgtcagcaacccgtgtgatattttgacgtacgtggcatggaaattgtcaggactgccacaacacaaagtgtttggttccggaaccaacctagatacgtctagatttaggtttttaatttccgaaaggttgggctgcagctccagcagtgttcacggatggattattggagaacacggtgacaccagtgttcctgtctggtctggagtcaacgttgccggagtgcgtctgaaagacgttcaatccaaggttggtacagatgacgatccagaagaatggaaaaagatccatgcgcaagtagtcaattcagcatacgaaatcatcaaattaaaaggatacaccaactgggctatcggtcttagtgcagcctcattggccaatacaattttaaagaatcttcatcacgttcatgcagtatctgtcatggttaagggattccatgacatcaaatccgaagtatatttatctttacctgtgatgctgaattcaaacggcgttagtcatgtgattcaacagcctcttacagaagaagaaacaaaggctcttcagaaatctgcggcagtgatggaagaggtgcaaagtggattaaaactgtaatgttggttcctctttgtcactatgtgtgatatatctccaatcctatttaattttaatttatttactgagtgtatagtattatttgaggatagactgtatagtttaagcttatttaagtatttttagaatcttagtatgactaaataatttattaccatttgcgaatattgccgttagtttaattgataattgactgtattggttttatatacagggtggggataaagtatgaaactttgcatgcaagtacaatgacatgtatctaacgcgtatggctgacgctatattttttttactactctacttccggttttatccgaaatactctcaatttatttaatttaattgcgacaccctgtatatgatttcaatagaggatttgcacatttttgttttattatacagggtgcttcatcttattcgcctcggtctctgtgcgggggaccactcgatatttggaaagggtttcttcacagaaatgtatgcagggcc

SEQ ID NO: 4600 - DNA, 1964 bp, Diabrotica virgifera
  SmartBlast Evalue=0; Info="Endoplasmic reticulum mannosyl- oligosaccharide 1,2-alpha-mannosidase, putative n=1 Tax= Pediculus humanus corporis RepID=E0VZD5_PEDHC"
ttaacatatatttctttcgaaaataataaaaacgactagaaatattaacaaaatgttataagtgtatataattagttctaatttaatacttcttcctaatttgagtatatcggcagcggatgtgcttcggaattaacaacgtatttgtctagattcaacaatttaggatcgtcactaaataatagatacaaatacttcaacgtttctgagaggaaaaacgattccattttgtcttgtggtctgacgctcgcttcatttctgacgtttcctatggacgtatagccgttaactactttagtgtatttttcaaagccttggaatatcttccaaccccagtcttggtaggtggtgtttccggtaagttgatacatgtaccacaggctttctacgaattctggacgaagtaagttgtgtgcgtcgtttgattttacatacatatctttggaatttccagtctgcatattaaagtaagtaatctcaggtgctaagaatgtgggttgtgttgcataagtttgatagcacgtgtccaaaagatcttcggctaattgccaatgttttttcggcaacccgttatgaacacccaaagccaaagttcccggcaaataacaggtgagatggtccattttgggtttaaaatctttgccgccacccaaaagttctccgataaacaggtaccgatttggttctgttcttcgtgcaaggtgcgtctccattcctgctatactttctaagtaatctgcttttaagtagtctatagtttttccagtctgtacccattgcttaagtaaatattcgtaataactatcacctcttgctcctaccgttatagtagcgtaagtgcggaactgaccagtatttgcattaataaatataggaactaatccatcttttttgtctaatttgtggattatttttgacaccctttcgacggcattctcatatttgggatcccctgtaaccctactcaggtctctaaattctaattgtatggtagtaacttctgaagtgctactatctggtgaccacttgggtgcatgtggttttctagtaaataagtttatgtcagaatatggaatgccagattcggaatcaaagcatggaagtaacctatctgctaattcagtcgctttttttaagaacatatcatctttactaaagtgatatatactaagtaaccctcccaaaactcggatcgtaacttcaaataaattgacatccctattcacatcgaaatttaaatgtttatcgacccaatttcttgcttcatcatactcttcatcaagacccataatgaaaatagtatctaaggaatccacaatagttaaacctaatccaaaccattcagtaaagccttctgaaataggtttaagattatcatgtccccaggcaaactttttgtagcccttccaagcatgtttgaaggcttcaactacggctgcttgccttggtgttgtaggaccagagaatctatgttcaactttggggacggctagaacatttttatttacatcattattattattattacttttaatttcttgggcctcaacattaacttcttctatttgtttaggttcttcaacatagctctttatagtatacctcttgtcttcaacttcttcaactgttatcactctgctatctttttgtaaatttaataaatatgtacaactcaataatattaaaatagagacggtaactataaagcttttctggcattttgacaaccgattccaccaccttcgaaaacgtaatttccgttttttatcagtagaggagtccagagacacgtcaagtcctaaatcatatctgtaatcgaccattgctttcgtagctgaattaacgtacagttgttttgaatagattcatactgtataatctttttattttcgaatttaatgtattattttccaaaaaatacaacgttgcattacaacatcaacttcgctagaacttatcacaaa

SEQ ID NO: 4601 - DNA, 1951 bp, Diabrotica virgifera
  SmartBlast Evalue=0; Info="Endoplasmic reticulum mannosyl- oligosaccharide 1,2-alpha-mannosidase, putative n=1 Tax= Pediculus humanus corporis RepID=E0VZD5_PEDHC"
ttaacatatatttctttcgaaaataataaaaacgactagaaatattaacaaaatgttataagtgtatataattagttctaatttaatacttcttcctaatttgagtatatcggcagcggatgtgcttcggaattaacaacgtatttgtctagattcaacaatttaggatcgtcactaaataatagatacaaatacttcaacgtttctgagaggaaaaacgattccattttgtcttgtggtctgacgctcgcttcatttctgacgtttcctatggacgtatagccgttaactactttagtgtatttttcaaagccttggaatatcttccaaccccagtcttggtaggtggtgtttccggtaagttgatacatgtaccacaggctttctacgaattctggacgaagtaagttgtgtgcgtcgtttgattttacatacatatctttggaatttccagtctgcatattaaagtaagtaatctcaggtgctaagaatgtgggttgtgttgcataagtttgatagcacgtgtccaaaagatcttcggctaattgccaatgttttttcggcaacccgttatgaacacccaaagccaaagttcccggcaaataacaggtgagatggtccattttgggtttaaaatctttgccgccacccaaaagttctccgataaacaggtaccgatttggttctgttcttcgtgcaaggtgcgtctccattcctgctatactttctaagtaatctgcttttaagtagtctatagtttttccagtctgtacccattgcttaagtaaatattcgtaataactatcacctcttgctcctaccgttatagtagcgtaagtgcggaactgaccagtatttgcattaataaatataggaactaatccatcttttttgtctaatttgtggattatttttgacaccctttcgacggcattctcatatttgggatcccctgtaaccctactcaggtctctaaattctaattgtatggtagtaacttctgaagtgctactatctggtgaccacttgggtgcatgtggttttctagtaaataagtttatgtcagaatatggaatgccagattcggaatcaaagcatggaagtaacctatctgctaattcagtcgctttttttaagaacatatcatctttactaaagtgatatatactaagtaaccctcccaaaactcggatcgtaacttcaaataaattgacatccctattcacatcgaaatttaaatgtttatcgacccaatttcttgcttcatcatactcttcatcaagacccataatgaaaatagtatctaaggaatccacaatagttaaacctaatccaaaccattcagtaaagccttctgaaataggtttaagattatcatgtccccaggcaaactttttgtagcccttccaagcatgtttgaaggcttcaactacggctgcttgccttggtgttgtaggaccagagaatctatgttcaactttggggacggctagaacatttttatttacatcattattattattattacttttaatttcttgggcctcaacattaacttcttctatttgtttaggttcttcaacatagctctttatagtatacctcttgtcttcaacttcttcaactgttatcactctgctatctttttgtaaatttaataaatatgtacaactcaataatattaaaatagagacggtaactataaagcttttctggcattttgacaaccgattccaccactgcttttcttctgtttgctgctgtgaatgcactcctcttgttagctgtatttcttcatccaattcttgcacctgtactttgcacccttcctgtgatttcctttcccatttttcgacatcattcaatggtgtagcctgtgattcattttcttctgtttgctgctgtgaatttgctgactgagtgagatgttcttcttgtatcccttgcacct

SEQ ID NO: 4602 - DNA, 1996 bp, Diabrotica virgifera
  SmartBlast Evalue=1E-176; Info=Casein kinase II subunit alpha n= 1 Tax=Harpegnathos saltator RepID=E2BH98_9HYME
attcaggctgagtcgacctggggattatagatactttaggatagactgttagatttagggactgtagaatattatttttttctccaccaccaaaccatagaatcaattttgattagttgtactttgaaataaattgggtacaacaaaaataattaaaaaaggaatgttttatttgtgagttaaaaataattacactaaaggtagggctgactttatgattctcaggtctccataaatgactcatcaagtatgcgcaaactgtaattttagctgctaataatttccatcagaattacaaaagaaaattgtattaaataagatacaacgttgtaacaatacccagagaaaaagaatttcaaataactttcgttagtaaatggtaacaactatatctaaccttaaacatattatgtttacctttgcagccaatttagtgaaataagttaaacataaagtaaagaacgccagttatttgaaattattttcaaccatacaaaaaatatttatacataatggaaatatatgtaggatcatcgctgcagagagaaaattacatcatcttggaaaaaatattggatggtgtatggcaaatttgacagcacatgaaatgataaggttcttcactgttatgcacgctactcacctactcctgtcaaaggagtaggggacgatgacaccgtagacagcatcctgcactgctcttttaccacgggatagaaatatgaatgatccatcgcatcacgtgctgtaaggcgttctaaatgatcataacgtaacagtttatccaaaaaatctaaagcttcgggtgatactaaatgctgattctcgctatgaacaaatctttcccatcttttcctcgaatgtcttcctaaaatatcgttgaatctagggtctagctctatatgatatttatcaagatattcaaaaagctcttcagtacctaggactttggctatgcggactaattgatcataattatcatgaccatgaaaaaagggttcctttcggaaaatcatagatgctagcatacagcccaaagaccacatatcaagggaataatcatacatctgatagtctacaaggagttcaggtcctttaaaataccttgaagctaccctaacattatattcctgtccgggatgataaaattctgctaatccccaatctattagtcgcaatttcctattttcatgatcaatcattacattatgtggttttacgtccctatgcataatacccatactgtgacagtaatccaatgctttcaataattcatacaagtaataacggatgtcaaaatctgtcagagtttgataaagctgcttaaaatcagtattattgacatgttcaaatattaaagcaggagtcctggacacaggatccttgacgacagcttctagagtgattatatttgtacctccccttagattttctaaaatttttatttctctttttattttcttctttttaacaggctttaaaattttaactacacatttttcattatttgttacattgatagcttcgaacacttcactatattttcctcttcctagctttctcaccaattgatagtcatcttgttgaccccaatcgacaacataactttcatagtcccagtattctcttggcttatgtgaatttacatcagaatatactctagctctactaggtacggccatcgtcttacaaagcactttattatttacaaactgtggtgcataagctctatttccttctttacaaactaattagttcggatgggatcagcatcaacattaaaaaatgcattaagggacaccactgattttaatagaaatctacaggcgaaaggtggcgcacgatagaacttaattgcgggaacatttaaatcatctttttcgagattataatattacacgttacacataaaaatatattattttattattaaataaaaaagtatttaaatatacaatatccaaaataaaacttattttagacgttgcatgtttat

SEQ ID NO: 4603 - DNA, 1912 bp, Diabrotica virgifera
  SmartBlast Evalue=1E-176; Info=Casein kinase II subunit alpha n= 1 Tax=Harpegnathos saltator RepID=E2BH98_9HYME
attcaggctgagtcgacctggggattatagatactttaggatagactgttagatttagggactgtagaatattatttttttctccaccaccaaaccatagaatcaattttgattagttgtactttgaaataaattgggtacaacaaaaataattaaaaaaggaatgttttatttgtgagttaaaaataattacactaaaggtagggctgactttatgattctcaggtctccataaatgactcatcaagtatgcgcaaactgtaattttagctgctaataatttccatcagaattacaaaagaaaattgtattaaataagatacaacgttgtaacaatacccagagaaaaagaatttcaaataactttcgttagtaaatggtaacaactatatctaaccttaaacatattatgtttacctttgcagccaatttagtgaaataagttaaacataaagtaaagaacgccagttatttgaaattattttcaaccatacaaaaaatatttatacataatggaaatatatgtaggatcatcgctgcagagagaaaattacatcatcttggaaaaaatattggatggtgtatggcaaatttgacagcacatgaaatgataaggttcttcactgttatgcacgctactcacctactcctgtcaaaggagtaggggacgatgacaccgtagacagcatcctgcactgctcttttaccacgggatagaaatatgaatgatccatcgcatcacgtgctgtaaggcgttctaaatgatcataacgtaacagtttatccaaaaaatctaaagcttcgggtgatactaaatgctgattctcgctatgaacaaatctttcccatcttttcctcgaatgtcttcctaaaatatcgttgaatctagggtctagctctatatgatatttatcaagatattcaaaaagctcttcagtacctaggactttggctatgcggactaattgatcataattatcatgaccatgaaaaaagggttcctttcggaaaatcatagatgctagcatacagcccaaagaccacatatcaagggaataatcatacatctgatagtctacaaggagttcaggtcctttaaaataccttgaagctaccctaacattatattcctgtccgggatgataaaattctgctaatccccaatctattagtcgcaatttcctattttcatgatcaatcattacattatgtggttttacgtccctatgcataatacccatactgtgacagtaatccaatgctttcaataattcatacaagtaataacggatgtcaaaatctgtcagagtttgataaagctgcttaaaatcagtattattgacatgttcaaatattaaagcaggagtcctggacacaggatccttgacgacagcttctagagtgattatatttgtacctccccttagattttctaaaatttttatttctctttttattttcttctttttaacaggctttaaaattttaactacacatttttcattatttgttacattgatagcttcgaacacttcactatattttcctcttcctagctttctcaccaattgatagtcatcttgttgaccccaatcgacaacataactttcatagtcccagtattctcttggcttatgtgaatttacatcagaatatactctagctctactaggtacggccatcgtcttacaaagcactttattatttacaaactgtggtgcataagctctatttccttctttacaaactaattcattccgggattaaatatttacggcgatctatccagctaacacatcgtaactttgtgaaacaaacgatttatttttaaatttatctgctctattttaacccactaatttaaccggcttcttactaaagaatctgaaccaagatggaaggaagtcccatc

SEQ ID NO: 4604 - DNA, 1982 bp, Diabrotica virgifera
  SmartBlast Evalue=0; Info=Lysyl-tRNA synthetase n=1 Tax=Culex quinquefasciatus RepID=B0XD88_CULQU
cataatataaataaaaaagttcattcttaatttaaaaacatgctgctacttggcaccatctactggagcttctgattcttccttatgcttattaggatcgtctggtttcatagcggggaagagcaacacctccttaatattgttattgtctgtcaaaaacattgtgactctatcaatgcccataccccagccagcggtaggaggtagaccgaattccaaagccttgcaaaaatcttcatctaacaagggtacttcatcatcaccttcggctttaagagctgcttgttgttcgaacctttctctttgcacaacaggatcgtttaattcggtgtaagcattgcaaatttcttttttcattacaaaaagttcgaatctttctgtcaatcccggaatagatctatgccacttggccaatggactcattacttgaggatgttcgataatgaaagtgggattaattgatttttcttcaatgaaatctccaatcagcttgtccagcaacctgttggcagttctagggggcgtgcaatcaacattgtgcttaatacaaaggtcattcaagaacttttgagcttcggcactggtgagatctgttggaaatttaacattcaattctttttctaaagtagatatgatcgaaactctcttaaacggaggagtaaaatctatttcgaccacttggtcgtcgtcaggaccattgggatgatactgtattttatatgagccatgtatactcttcaccattcctgaaaccatctcttcggtaattgtcatgagatcattgtagtcagcataagccatataaaactcacatgttgtaaattctggattgtgagtaagatctataccttcgttcctaaactgtctgcctatttcatacactctatccaaccctccaacaactagagtcttgtgatacaattctggtgctatcctcatgtacaaatccatatcaagttcattatgatgagtgatgaaaggtttagcgacagcgcctcccgcttgcatgttcatcataggcgtttcaatttccaaaaaacccatctcatctaaataccttcgtacataggcaataatcttagctctgacttcgaagattttgcggaccctgttgtttaagataagatcaagatacctctgcctgaatctggtttctttgtctttaagaccaaagtgcaaatgaggaagcatgtgtaaacaaggtgccaaaagtttgattttctttggtaggattgacagctcgcctttctttgtcttggttggaactccttctataccaataatatctcctctccttattttagcggtatcatctacaaatttcgattcatcttcataatatctagcattagccatgacttgtatcttaactccctcacccctcaagtcgtagaaaactaatttaggacctgactctctaatagcatgaattcttcctgccacactaaggtggtcattctctagaatatcaccatctttcagatatgaatacttctcaataaaactctcgagtgatgacgaaacatggaatttatgaggataaggcgactgttcaccccctataccctttagtttatctacagctgttgatctaagtttaaaatattcatttggactaacttcttcttcactgggttttgtttctttagtcttctgggcttgagcaggctgttgggcagctttttcagccttttctttggctttctgttcagccttaagtcgtcttttaagctcacttttacttttttgtattagtcctgaatcgattgaaaataattgttttctcataagcctaagagtttgcatcatggtataggttaaggaaggaaaattatatttctcaattcagatgaacttacttttttgacaaaggttctccagctgcatcagccatcgttttttatgtctctgactctgactaaactaaatggtctaaaacacttatcaaaagataccgtatgcaatattgcaatcggcaactt

SEQ ID NO: 4605 - DNA, 1858 bp, Diabrotica virgifera
  SmartBlast Evalue=0; Info=Lysyl-tRNA synthetase n=1 Tax=Culex quinquefasciatus RepID=B0XD88_CULQU
cataatataaataaaaaagttcattcttaatttaaaaacatgctgctacttggcaccatctactggagcttctgattcttccttatgcttattaggatcgtctggtttcatagcggggaagagcaacacctccttaatattgttattgtctgtcaaaaacattgtgactctatcaatgcccataccccagccagcggtaggaggtagaccgaattccaaagccttgcaaaaatcttcatctaacaagggtacttcatcatcaccttcggctttaagagctgcttgttgttcgaacctttctctttgcacaacaggatcgtttaattcggtgtaagcattgcaaatttcttttttcattacaaaaagttcgaatctttctgtcaatcccggaatagatctatgccacttggccaatggactcattacttgaggatgttcgataatgaaagtgggattaattgatttttcttcaatgaaatctccaatcagcttgtccagcaacctgttggcagttctagggggcgtgcaatcaacattgtgcttaatacaaaggtcattcaagaacttttgagcttcggcactggtgagatctgttggaaatttaacattcaattctttttctaaagtagatatgatcgaaactctcttaaacggaggagtaaaatctatttcgaccacttggtcgtcgtcaggaccattgggatgatactgtattttatatgagccatgtatactcttcaccattcctgaaaccatctcttcggtaattgtcatgagatcattgtagtcagcataagccatataaaactcacatgttgtaaattctggattgtgagtaagatctataccttcgttcctaaactgtctgcctatttcatacactctatccaaccctccaacaactagagtcttgtgatacaattctggtgctatcctcatgtacaaatccatatcaagttcattatgatgagtgatgaaaggtttagcgacagcgcctcccgcttgcatgttcatcataggcgtttcaatttccaaaaaacccatctcatctaaataccttcgtacataggcaataatcttagctctgacttcgaagattttgcggaccctgttgtttaagataagatcaagatacctctgcctgaatctggtttctttgtctttaagaccaaagtgcaaatgaggaagcatgtgtaaacaaggtgccaaaagtttgattttctttggtaggattgacagctcgcctttctttgtcttggttggaactccttctataccaataatatctcctctccttattttagcggtatcatctacaaatttcgattcatcttcataatatctagcattagccatgacttgtatcttaactccctcacccctcaagtcgtagaaaactaatttaggacctgactctctaatagcatgaattcttcctgccacactaaggtggtcattctctagaatatcaccatctttcagatatgaatacttctcaataaaactctcgagtgatgacgaaacatggaatttatgaggataaggcgactgttcaccccctataccctttagtttatctacagctgttgatctaagtttaaaatattcatttggactaacttcttcttcactgggttttgtttctttagtcttctgggcttgagcaggctgttgggcagctttttcagccttttctttggctttctgttcagccttaagtcgtcttttaagctcattttttgacaaaggttctccagctgcatcagccatcgttttttatgtctctgactctgactaaactaaatggtctaaaacacttatcaaaagataccgtatgcaatattgcaatcggcaactt

SEQ ID NO: 4606 - DNA, 2082 bp, Diabrotica virgifera
tggtatacgtaaaatatgtaatgtaagttattaacaaagatcgaatgcgagaaccctatattgttatctagatctacgccatttgtcgatgtagattagatagtagatcttgttatatcggaatacctatacaaaatacttacctaccgagaaatacgattctcgatatgattaccggtactcaaatacaaaagtaacaaaagtaatcatagtaacgaatactgtaaatgattactttatacaaaagtaacgatttgtaacgaatactcgaaagtaactataatcaacatcactagttcacatgttgtgatagcctaattatttttctattaatgtcttatgaatcgtggtgtgataagtctcagaaatacggaaagcaaggtccataatggtgaacctctgatcttcaagcaatactctttcaactttttcgacaatttcgtctgaaactaaagactttccaaacttcatcgtgaatttctgtttggccttcactgaattttctaccccatttgcgaacatgatgaacggatatgcacttttccccataaacttggattaactgacgatgaatatcaataggtgcaatccattttgcggtaactccatcttcgaaggttgctaggccggcactgagcaatgcagcgaggtgagagtggtgggagaagagagagggagagttgttgcgtaatgcagtgttaccagatttctcccagtatgtcgcattctttctcagccatagggaacctctttttatgaatgacctttatactataatgctctgtgatcttaaaatctgcattgtttatatgattttgttcctaggtcactctttctggatgcttgccaatataacaatatcacctgcatacctataagtttctatcgttttatatcgtaacccatatttatatttctttgatataatcattcaccactcgcattgtatttacaacacttccttttgacttaacatctgaaaatttgttaactgctttttaaaatttgactcgcgataaaaatctttggagctacctaaatcatttagctaccgaagtggcccacctcaaaaaaacatctttttgttcgcattatcgaagttgaaccagtttcttttctgagttctgccatgttaaatattgtaacgacattaacaaaaatgtacacagttaaccttacttcaattttataaataatacgtgactgtttaggaaatttacaattaaataggtgggtcaatttatgtagtacgatttctggatgcagattaacgaaatccattctggtggtaaagatcaacaccaaagtggatactatataacttaaaagcattacagccttttgtgtattatatcgaatggataaagaaaatcaaaacttgctttgagatccggaatccgtttgataaaaaaagtgtattttaactttccagatattcacttgatcatgcattagtagctgtattcgcggagcaaatcttggataaaccagagggagaacgcatgcgcattacagaaaacagattctgaacgtgtccgggataccctctagacgttcgaggtttttgtttcggattttaagttaagcaaattttaatggtttttataaagaaaaggcgtccttgtctaaccttgctgtaaacaacccgtcattacattccaaatccgaaaattgttcgcggagaataatgtactgaacatgtccaggataagtttacgtcgacgcctgcgcattggaaactaatcctggacttactctgaatacgttcggggtatgctccgcgaatacaacttatgcttatccgaagctaaaaaaactcacgaacataacagagcaggatgttgacatactatagaaaattcatcctacttctcaaggaaaaactgatatgtatagttgcacgtactgtataacatacagtacagactgtaatacaaggctaagcggactgcgtttacgagaggtactttaaaccaaaaaaatacaaaaaggaacgaatttgcaataacacctttcaaaaatcgggtggtaaaagttaaaacactgcctttgggaatgaagacagcaatcatcctgaagaat

SEQ ID NO: 4607 - DNA, 1736 bp, Diabrotica virgifera
tggtatacgtaaaatatgtaatgtaagttattaacaaagatcgaatgcgagaaccctatattgttatctagatctacgccatttgtcgatgtagattagatagtagatcttgttatatcggaatacctatacaaaatacttacctaccgagaaatacgattctcgatatgattaccggtactcaaatacaaaagtaacaaaagtaatcatagtaacgaatactgtaaatgattactttatacaaaagtaacgatttgtaacgaatactcgaaagtaactataatcaacatcactagttcacatgttgtgatagcctaattatttttctattaatgtcttatgaatcgtggtgtgataagtctcagaaatacggaaagcaaggtccataatggtgaacctctgatcttcaagcaatactctttcaactttttcgacaatttcgtctgaaactaaagactttccaaacttcatcgtgaatttctgtttggccttcactgaattttctaccccatttgcgaacatgatgaacggatatgcacttttccccataaacttggattaactgacgatgaatatcaataggtgcaatccattttgcggtaactccatcttcgaaggttgctaggccggcactgagcaatgcagcgaggtgagagtggtgggagaagagagagggagagttgttgcgtaatgcagtgttaccagatttctcccagtatgtcgcattctttctcagccatagggaacctctttttatgaatgacctttatactataatgctctgtgatcttaaaatctgcattgtttatatgattttgttcctaggtcactctttctggatgcttgccaatataacaatatcacctgcatacctataagtttctatcgttttatatcgtaacccatatttatatttctttgatataatcattcaccactcgcattgtatttacaacacttccttttgacttaacatctgaaaatttgttaactgctttttaaaatttgactcgcgataaaaatctttggagctacctaaatcatttagctaccgaagtggcccacctcaaaaaaacatctttttgttcgcattatcgaagttgaaccagtttcttttctgagttctgccatgttaaatattgtaacgacattaacaaaaatgtacacagttaaccttacttcaattttataaataatacgtgactgtttaggaaatttacaattaaataggtgggtcaatttatgtagtacgatttctggatgcagattaacgaaatccattctggtggtaaagatcaacaccaaagtggatactatataacttaaaagcattacagccttttgtgtattatatcgaatggataaagaaaatcaaaacttgctttgagatccggaatccgtttgataaaaaaagtgtattttaactttccagatattcacttgatcatgcattagtagctgtattcgcggagcaaatcttggataaaccagagggagaacgcatgcgcattacagaaaacagattctgaacgtgtccgggataccctctagacgttcgaggtttttgtttcggattttaagttcgcacaatcgcacaaaatacttgggaagaatttcttgacattatgtctaattttagcctaaaatattgttacagcttgcaaattctggtttttaaagatttaaagttatgtaaagtgttgtatcatttaaatatccttcaacaaattttaata

SEQ ID NO: 4608 - DNA, 2285 bp, Diabrotica virgifera
tgtgacaactgtcagatttaaataaaatgtcatgttagaataaatgttataaatgtgtattatcacggacttacctttttttttctatcattttaaaatcaaaacattaagtgaagcgtacgtcgatatgtaatatcattaatattttactgtcaatataataattaggaaatagtttttatcggtagacgtattttatgtagttctattgtacatttacatttaacgatgttataatatatttaacacaatataactttataaaataaacacaatggggtgtattctgtaacatgtccgttaaatttgagaggcctctaaaatttaagttttaacggtcctttaaaacttttaggttagattgacattctgtaaacacattttatagaggaccgctaaaataatatttttttagaggaatcctctaaaaggttttggaacaaatacggcaacgtcgcacgttgatcgtttttgaactacttttaacccagaaattgaccgaaaactgactgtcagaggccaaaaacgttaagaagaagaagatattgtcagattcctaaagaataatatttattgaatttaattattttttagtaaaactcatattttacaattaaacatttttatttataaagttatacattaaaatattgctgaaaaattgcatatcttatttcttctccccttcgacaataattttggtcaaattaaggtcatcttattaatctgcatctggttataaaccttcttgaacttcacctttataaacatttggtacattttgtaatgttccacaaaacctttaaataattttagctgcattaataggatttaattgctttgacaaacatatttgacttccaacactttttcaatcacatttctaggtaggtaggtacccatggtacaataaattttcctaaaaatttcctaataaattttcataaaatgaaactttattgtaccatggtaggtacctacttcctttgaaatttgaaatggtaattgtagttaatttcaggtcaatggtcaattactttttgtttttgttgtaacctgaaatcagctctacaaaaagaaacaaaaatttgaattttgttacttaaaaggtgtagtgtgtcgattgcaaagtaaaatgagacacttacctttcattattatttattaagtacttcttcaccaaatacattataaaaagccatttgccatttttaaatatttatctccagtataatagaataataacaaactactattcatacaaacataacccaacaaaaataatcaaaccacatttaacggaccgctaaaaatttagcgggtacattttgacatcctctaaaatatttttatttagcgggagttttaacggtttaggttatgattttaacagatatatgatttacagaataccaaaatatttttagcgggcgttaaaattttagaggcctctgaaatttaacggaggtgttacagaatacaccccaatataagttatatattataaataaacacaacgaatgcgctaatgtcactgtcactgaaaatgataatcttcaaaattcatagtaaacaaggtatcaaagacatgccgtagtgtttatccttgtttaacttattgtggtttctatggacaaggggcttaattttgcgatattataatagtttctgtgagtaaaaaatatacctagtataaaaagtaattcgtgaataatttcatgaatgtgcaaatatatacctaatggaagaactataaaactaactagcccagttgctttcttactgtaaagatcataaaataatattcctactaactatgaagtgtcacttaaacgcatgaaatgtattttttaattaaaatatgtctaaaacgtatatttcaactgttaggataattattctgaagctattttcttatggcattttaatattatttactacatttaatggacattaaaccacaatttcagtttaaaatacgtttattttgacttttcgatttccactccggaaataggttttttgagaatattgagaattttaaacaataattattgtggttaatttccattaaatatagtaaataatattgggattattttggaaatgttagaaataatttttttaataatataatctattgtaaccaaacttttatatttataaccaaacagaggctaatattttttgtaacggaaagaaatcaatctttacttgagagactttaaagttgtttttaagttccatgctattttggacacaccagaacatttccaaatatatct

SEQ ID NO: 4609 - DNA, 1546 bp, Diabrotica virgifera
tgtgacaactgtcagatttaaataaaatgtcatgttagaataaatgttataaatgtgtattatcacggacttacctttttttttctatcattttaaaatcaaaacattaagtgaagcgtacgtcgatatgtaatatcattaatattttactgtcaatataataattaggaaatagtttttatcggtagacgtattttatgtagttctattgtacatttacatttaacgatgttataatatatttaacacaatataactttataaaataaacacaatggggtgtattctgtaacatgtccgttaaatttgagaggcctctaaaatttaagttttaacggtcctttaaaacttttaggttagattgacattctgtaaacacattttatagaggaccgctaaaataatatttttttagaggaatcctctaaaaggttttggaacaaatacggcaacgtcgcacgttgatcgtttttgaactacttttaacccagaaattgaccgaaaactgactgtcagaggccaaaaacgttaagaagaagaagatattgtcagattcctaaagaataatatttattgaatttaattattttttagtaaaactcatattttacaattaaacatttttatttataaagttatacattaaaatattgctgaaaaattgcatatcttatttcttctccccttcgacaataattttggtcaaattaaggtcatcttattaatctgcatctggttataaaccttcttgaacttcacctttataaacatttggtacattttgtaatgttccacaaaacctttaaataattttagctgcattaataggatttaattgctttgacaaacatatttgacttccaacactttttcaatcacatttctaggtaggtaggtacccatggtacaataaattttcctaaaaatttcctaataaattttcataaaatgaaactttattgtaccatggtaggtacctacttcctttgaaatttgaaatggtaattgtagttaatttcaggtcaatggtcaattactttttgtttttgttgtaacctgaaatcagctctacaaaaagaaacaaaaatttgaattttgttacttaaaaggtgtagtgtgtcgattgcaaagtaaaatgagacacttacctttcattattatttattaagtacttcttcaccaaatacattataaaaagccatttgccatttttaaatatttatctccagtataatagaataataacaaactactattcatacaaacataacccaacaaaaataatcaaaccacatttaacggaccgctaaaaatttagcgggtacattttgacatcctctaaaatatttttatttagcgggagttttaacggtttaggttatgattttaacagatatatgatttacagaataccaaaatatttttagcgatcgctaaaattttagaggcctctaaaatttgacggaggtgttacagaatacaccacagtatagtacactatgttttaaactgtttcatataaagcttgtatgatcaagtggtgtcg

SEQ ID NO: 4610 - DNA, 1984 bp, Diabrotica virgifera
  SmartBlast Evalue=0; Info=Protein disulfide-isomerase A5 n=1 Tax=Harpegnathos saltator RepID=E2BE86_9HYME
gcaggataacattgtttctttcgaagacttcttcaacgatcgagatcaatcagtgccaaaaaatcctttcttggcctttcctttgccttcctttgctccggctttgtccttgttaccgcgttcctccttcgttttgatgggatggttagctttggatatggttttcaggggtgtggagtcttctttgaccgctttctttggcgaggatgacttagcagttacctgcttggatggttttggagccggtgtgggcttggcttgaagcttggcaaccttgctggcctttgcggggggtttgggacagcattgatacggttggtactgtgttggattggcgagggcagtcttacctcccattccgatgtagaagcagccatctcttttttggtctacaagccattccaaaactttgtcctcgtttaaaaggtccccgtcatacatgatcggaaccccagtttcatagtaaaccaaagcaggaaaactgaaaatgccgatttcggatgccaatttggcatccatggatttgacaaattgtatgttgtgtttatcagtgtcatcgtcgatggtttcgagttcttctaagatttgtttgcagtcctcgcagtcgtcgctatagaataagacagctagatgttcaacgtcgtttatgagtacctgtaaagtttttctgtccacattttcgataacgtccggatcagagtctctcaggttcaatacccaatccaaaatggcttcttcgtgcatcaagtcacccgtgtaaatttctctaaatctatttctatagaacacaacagctggtagagatgggagatcatattccttctggatgccatcgtctgagattttcacgaaatctatgctttgtcctcacattcgtcgtcgatgttttctagctcttgcagaatcttttgggatctcttgtcgccttctttataaaagtaaactactacatgttcattttccccaaggattttatccaacatcttggagttcacttcttcaattctatccggtatttccaaagtatcctcatcagttaaccaagcaagaacttcatcttcatcttcaatgtcaccggtgtacaccaaaggttctttgtttctgaagaatactaacttaggatacgttttgatgttgtattttttggcaatcaccaagtcttccgtagtgacgaatatgataccagtttcgtccaactcatcatcgatgttttctagttctttcaagatattatcacattcttgaccttcttcacaatttccactgaagtaaacaactacgtactcatgttcctggatcagatcctcaagaatctcatcagtgacttcctctatagttgctgtttgcttttgttcaattaaccattttaatacctcatcttcattcattagatcaccttcatataaagaagggattttatcttcgaagtagatcaaagttggcaagtgatctataccgaattccttggcttctgcatcattatcgattctgatcatagtaattccttctttttccagatcgtcatcgatattttctagctcatttaatactctgatgtcttgtttatcgtctttgtcatagaagagtacagctaggtatttctcagagttgattagcagctccatcatttcatcagtgacatctggaatttcgctgtgccttttctggtgcaataaccaacccaacagctcttcttctttggtcaagtcgccttcgtacaaatggggaatgcgcttttcgaaaagaaccaaactgggaatcgtgtcgataccatattctttggcctcatctggattgtcgattttgacaaatgctatattgttggtatcgcattcgtcatcgatattttccaattctgctaggactttctggcttttcttttggtttttgtcatagaacaaaacggctacatgtgtctttctcttgatcaacagatctagcatttcgtccgtaacatcctcaatttcgtcatgtttaacctggt

SEQ ID NO: 4611 - DNA, 1849 bp, Diabrotica virgifera
  SmartBlast Evalue=0; Info=Protein disulfide-isomerase A5 n=1 Tax=Harpegnathos saltator RepID=E2BE86_9HYME
gtcatcgtcgtcatcatcatcgtcgtcatcatcatcatcacctagagaattacagcaacatgcagccgacacatgcaacacacctcgcatctcctcgcatgtattaagccaatgttttttttatttttcaaattgaatttttatttaatattttaatcagttgttttagaaaaaaatccattacgatttagactaaatattgatgaagttacaaattaagaatagttaaattcgtttattcttacttttttggtctacaagccattccaaaactttgtcctcgtttaaaaggtccccgtcatacatgatcggaaccccagtttcatagtaaaccaaagcaggaaaactgaaaatgccgatttcggatgccaatttggcatccatggatttgacaaattgtatgttgtgtttatcagtgtcatcgtcgatggtttcgagttcttctaagatttgtttgcagtcctcgcagtcgtcgctatagaataagacagctagatgttcaacgtcgtttatgagtacctgtaaagtttttctgtccacattttcgataacgtccggatcagagtctctcaggttcaatacccaatccaaaatggcttcttcgtgcatcaagtcacccgtgtaaatttctctaaatctatttctatagaacacaacagctggtagagatgggagatcatattccttctggatgccatcgtctgagattttcacgaaatctatgctttgtcctcacattcgtcgtcgatgttttctagctcttgcagaatcttttgggatctcttgtcgccttctttataaaagtaaactactacatgttcattttccccaaggattttatccaacatcttggagttcacttcttcaattctatccggtatttccaaagtatcctcatcagttaaccaagcaagaacttcatcttcatcttcaatgtcaccggtgtacaccaaaggttctttgtttctgaagaatactaacttaggatacgttttgatgttgtattttttggcaatcaccaagtcttccgtagtgacgaatatgataccagtttcgtccaactcatcatcgatgttttctagttctttcaagatattatcacattcttgaccttcttcacaatttccactgaagtaaacaactacgtactcatgttcctggatcagatcctcaagaatctcatcagtgacttcctctatagttgctgtttgcttttgttcaattaaccattttaatacctcatcttcattcattagatcaccttcatataaagaagggattttatcttcgaagtagatcaaagttggcaagtgatctataccgaattccttggcttctgcatcattatcgattctgatcatagtaattccttctttttccagatcgtcatcgatattttctagctcatttaatactctgatgtcttgtttatcgtctttgtcatagaagagtacagctaggtatttctcagagttgattagcagctccatcatttcatcagtgacatctggaatttcgctgtgccttttctggtgcaataaccaacccaacagctcttcttctttggtcaagtcgccttcgtacaaatggggaatgcgcttttcgaaaagaaccaaactgggaatcgtgtcgataccatattctttggcctcatctggattgtcgattttgacaaatgctatattgttggtatcgcattcgtcatcgatattttccaattctgctaggactttctggcttttcttttggtttttgtcatagaacaaaacggctacatgtgtctttctcttgatcaacagatctagcatttcgtccgtaacatcctcaatttcgtcatgtttaacctggt

SEQ ID NO: 4612 - DNA, 1912 bp, Diabrotica virgifera
  SmartBlast Evalue=1E-103; Info=Salicyl alcohol oxidase n=1 Tax= Chrysomela tremulae RepID=B4F334_9CUCU
aaattttatttattttatttattttaattctaaacttccaaattattaatatatttttctttaatagcatcagcgattttttcagccatggcccaaataaccgccaatggatgacctcgaactagcttgggcatcgatcctgcatccactactctcaagtttgaaataccatgaactttcatatttacatccacaactgagttagattcactagtgcccattttagttgtagttgaaggatggtacagagttgaagtgagagagcggatagcacagtaccaatattctttttctgattcttctcttaagtactcacaatcgggagcttgagcaactacagttgcgtttatagcttgaagaggttcacttttggtgaggtttaggacgaactggatactctcgtagagaacttgaatgtcttcatcgttagggtctgatagataagctggatttataagtgggaaatcagcaggattatttgattttagttttaaccaacccctggattttggttgcaagtttatgcagtacactaagaaatcagtcagcgtattaaatgttgagaatacagtggcgtagtcgtcattcaggttgtagaaagtagctggcggtacactagttggattgttaatagttaggatttcagcattgggtggttcaactcctgggtttttggtattaatgaaagcaatattatcagctgaaaaaacagtggtgtaatatcctaaaccttttgtccatccctccaaattagacttgacagtaccaggatcagcagtgagatttgtcctgatatacaatccaacgtagactggatgatctactaattcaacaccaacaggcaagtccttaaccacttttattcccaattcttccaattcatttttaggtcctactccactaagcataagaagttggggactgttgattggtccagctgagaggattacttccttactagcggtagccctgtatttttttccatctttaacaaattgtactcctgtagcttttaagtcagaaaaattgatattggtaacaaatgcattcagcacaacttctaagttggtctgtgtatctagaattggtgtgaggaaggcatttcctgctgtaacttttgtgttaaaagcaacagtccattggaatttggagatacctatttgattttttccgttataatccaggctctttagacctgacaattgacttgcctccaagtatgcatcatagtctaagggattgggatatgtgtagttgactcgaagtaatccgtcagttccatgataatctttttcgtagtcttttatttcgattttttcagtcttcttataatatggaagaaggtcctcgtaaccccatccatctaaacctaatgattcccattcatcaagatcggctctgtttccccttgcatatacactgtctcctatgattgaagttcctcctaagccttttcctgtaggataaacgcattgtttgtttaccattcctaaacaactgttactttgtggtactgttttgtagccccaattaaattcagaatttcttgtaaacagattcataaaaggaatatcagtaaaatcgttgccgttcgaaccagcttctagtaccagtaccttccagtctgaaacttcgcttaatcttctggccaggagtgatcctgcagtgcctccaccgacgataacgaagtcataggatccatgctcataaatagtctcatcggtaacacttacagaatcagaattgtcggtgggcagtgtatagtaatttgtataattaatgtaatcattcacataatcaaccaatgtatcaatatcatctcgatataataatgccccattcgaggcattaacgagcaggacaaaagatagaaattttagaaacattttattttatcaaaaccacattttat

SEQ ID NO: 4613 - DNA, 1905 bp, Diabrotica virgifera
  SmartBlast Evalue=1E-103; Info=Salicyl alcohol oxidase n=1 Tax= Chrysomela tremulae RepID=B4F334_9CUCU
aaattttatttattttatttattttaattctaaacttccaaattattaatatatttttctttaatagcatcagcgattttttcagccatggcccaaataaccgccaatggatgacctcgaactagcttgggcatcgatcctgcatccactactctcaagtttgaaataccatgaactttcatatttacatccacaactgagttagattcactagtgcccattttagttgtagttgaaggatggtacagagttgaagtgagagagcggatagcacagtaccaatattctttttctgattcttctcttaagtactcacaatcgggagcttgagcaactacagttgcgtttatagcttgaagaggttcacttttggtgaggtttaggacgaactggatactctcgtagagaacttgaatgtcttcatcgttagggtctgatagataagctggatttataagtgggaaatcagcaggattatttgattttagttttaaccaacccctggattttggttgcaagtttatgcagtacactaagaaatcagtcagcgtattaaatgttgagaatacagtggcgtagtcgtcattcaggttgtagaaagtagctggcggtacactagttggattgttaatagttaggatttcagcattgggtggttcaactcctgggtttttggtattaatgaaagcaatattatcagctgaaaaaacagtggtgtaatatcctaaaccttttgtccatccctccaaattagacttgacagtaccaggatcagcagtgagatttgtcctgatatacaatccaacgtagactggatgatctactaattcaacaccaacaggcaagtccttaaccacttttattcccaattcttccaattcatttttaggtcctactccactaagcataagaagttggggactgttgattggtccagctgagaggattacttccttactagcggtagccctgtatttttttccatctttaacaaattgtactcctgtagcttttaagtcagaaaaattgatattggtaacaaatgcattcagcacaacttctaagttggtctgtgtatctagaattggtgtgaggaaggcatttcctgctgtaacttttgtgttaaaagcaacagtccattggaatttggagatacctatttgattttttccgttataatccaggctctttagacctgacaattgacttgcctccaagtatgcatcatagtctaagggattgggatatgtgtagttgactcgaagtaatccgtcagttccatgatagtctttttcgtagtcttctatttcgattttttcagtcttcttataatatggaagaaggtcctcgtaaccccatccatctaaacctaatgattcccattcatcaagatcggctctgtttccccttgcatatacactgtctcctatgattgaagttcctcctaagccttttcctgtaggataaacgcattgtttgtttaccattccgaaacaactgttactttgtggtactgttttgtagccccaattaaattcagaatttcttgtaaacagattcataaaaggaatatcagtaaaatcgttgccgttcgaaccagcttctagtaccagtaccttccagtctgaaacttcgcttaatcttctggccaggagtgatcctgctgtgcctccaccgacgataacgaagtcataagatccatgctcataaatagtctcatctataacacttacagaatcagaattgtcggtgggcagtgtatagtaatttgtataattaatgtaatcattcacataatcaaccaatgtgtcaatatcatctcgatatactaatgccccattcgaggcattaacgagcaggacaaaagatagaaattttagaaacattttattttatcaaaaccac

SEQ ID NO: 4614 - DNA, 1899 bp, Diabrotica virgifera
  SmartBlast Evalue=0; Info="Probable methylmalonate-semialdehyde dehydrogenase [acylating], mitochondrial n=3 Tax=Culicidae RepID=MMSA_ANOGA"
gtgagtttgtgagtgttcattaggccggtttgacgatgataaaatcaacagtatcacctgtagctacccttctacgaagaagctattccaacgtagctcccaccacaaaattattcctcgacggaaaattcgtagactcaaaaaccacggaatggatcgacctacacgacccagccaccaataacgtggtcaccaaagttcccaagagcacagctagcgaaatggaagctgcggtagaatcgtcgaaaaatgccttcaagagttggagtcaaacatcagttttaaccaggcaacaattgatgttaaaactccaagctgtcctcagaagggacctcaaaaaaattgcccagaacatcactttggaacaaggaaagacgttggtagatgctgagggtgatgttataagaggattgcaggtcatcgaacacgcctgtgccgccggaactctcctccaaggtgaatctctccagaacatctccaaggatatggacgtagtatcttataaactgccactgggagtaacagcaggtatatgtcctttcaatttccccgctatggtgcctctctggatgataccgttagctctgattaccggaaataccatgattatgaagccctcagaaagggatcctggtgcgactatgttaatagcagagcttcttaacgaagttggatgtccaccaggtgtagttaatgtcattcatggagctcatcaagcggtagactttatttgcgataacaaagatatcaaagcgatcagttttgtcggatctgatgtagctggaaagtatatttattcaagaggaactgccaatggaaagagggtccagtcaaacatgggtgccaaaaatcatgctgttattctgccagatgctcacaaagaatctgcattggaccaaatcatcggagcagcattcggagcagctggccaaaggtgtatggctctcagcgtagtaattatggtcggagaagctcaacaatggatccccgacctagttgctaaagctaaacaactaaaagtaaatgctggacatgaaccaggaactgatgttggacctgtcatcagccctcaagctaaagaaagaatcttgcgattggtagcccaaggcattgaacagggagccaaatgtgcattggacggaagaaacatcaaagtagagaaatatccaaacggcaacttcgtaggtccaacaatcttgaccgacgtccaaactaaccaagtatgttacaaagaagaactatttggacctgttctttgcgttatgtctgcagacactctggacgatgctatcaaaatcattaatgccaatccatacggaaacggaactgccattatgacaaccaacgggaaccatgccagacagttcgtacatgaaacggatgttggacaggttggagtgaacgtgcccataccagttccactgccgatgttcagtttcaccggatccagaggcagtttccacggagatcttcacttctacggcaaacaaggattaaacttctacactcagacaaagactgttacttctttatggagaaaaggacaagtagactctagaccatcagtcaacatgcctgtccagaactaaacaagaccaaatatgatattttttagctgttaggtccaaaataattcatccgatttataaaggtatggtaacatggtctcgaaaatattgtcaccaataatggtagctggaataagttacgttacattaggtaattctggtatatattgattgctcaattttttttttaaatacgtacctttgtaaatttgataatttctgaaaatacattttagttgtaaattaaaagtattacttttcgtatcatgtaattgtctgattgtctgttcttcaaatgtcctacgactgtaaatatgatgtaaacctattt

SEQ ID NO: 4615 - DNA, 1914 bp, Diabrotica virgifera
  SmartBlast Evalue=0; Info="Probable methylmalonate-semialdehyde dehydrogenase [acylating], mitochondrial n=3 Tax=Culicidae RepID=MMSA_ANOGA"
gtgagtttgtgagtgttcattaggccggtttgacgatgataaaatcaacagtatcacctgtagctacccttctacgaagaagctattccaacgtagctcccaccacaaaattattcctcgacggaaaattcgtagactcaaaaaccacggaatggatcgacctacacgacccagccaccaataacgtggtcaccaaagttcccaagagcacagctagcgaaatggaagctgcggtagaatcgtcgaaaaatgccttcaagagttggagtcaaacatcagttttaaccaggcaacaattgatgttaaaactccaagctgtcctcagaagggacctcaaaaaaattgcccagaacatcactttggaacaaggaaagacgttggtagatgctgagggtgatgttataagaggattgcaggtcatcgaacacgcctgtgccgccggaactctcctccaaggtgaatctctccagaacatctccaaggatatggacgtagtatcttataaactgccactgggagtaacagcaggtatatgtcctttcaatttccccgctatggtgcctctctggatgataccgttagctctgattaccggaaataccatgattatgaagccctcagaaagggatcctggtgcgactatgttaatagcagagcttcttaacgaagttggatgtccaccaggtgtagttaatgtcattcatggagctcatcaagcggtagactttatttgcgataacaaagatatcaaagcgatcagttttgtcggatctgatgtagctggaaagtatatttattcaagaggaactgccaatggaaagagggtccagtcaaacatgggtgccaaaaatcatgctgttattctgccagatgctcacaaagaatctgcattggaccaaatcatcggagcagcattcggagcagctggccaaaggtgtatggctctcagcgtagtaattatggtcggagaagctcaacaatggatccccgacctagttgctaaagctaaacaactaaaagtaaatgctggacatgaaccaggaactgatgttggacctgtcatcagccctcaagctaaagaaagaatcttgcgattggtagcccaaggcattgaacagggagccaaatgtgcattggacggaagaaacatcaaagtagagaaatatccaaacggcaacttcgtaggtccaacaatcttgaccgacgtccaaactaaccaagtatgttacaaagaagaactatttggacctgttctttgcgttatgtctgcagacactctggacgatgctatcaaaatcattaatgccaatccatacggaaacggaactgccattatgacaaccaacgggaaccatgccagacagttcgtacatgaaacggatgttggacaggttggagtgaacgtgcccataccagttccactgccgatgttcagtttcaccggatccagaggcagtttccacggagatcttcacttctacggcaaacaaggattaaacttctacactcagacaaagactgttacttctttatggagaaaaggacaagtagactctagaccatcagtcaatatgcctgtccagaactaaacaggaccaacgatgatattttttagctgtaaggtccaaaataattcatccgatttataaaggtatggtaacatggtctcgaaaatattgtcaccggtaatggtagctggaatgagttacgttagattaggtaattctggtatagatggattgctcaatttttttttaaataggtacatacatacctttgtaaatttgatcatttctgaaaatacatttcagttgtaaattaagaccaaagtattacttttcgtatcatgtaattgtctgattgtctattctttaaattttctaccaatgtaaatatgatgtaaacctattttta

SEQ ID NO: 4616 - DNA, 1911 bp, Diabrotica virgifera
  SmartBlast Evalue=0; Info=Utp-glucose-1-phosphate uridylyltransferase 2 n=4 Tax=Culicidae RepID=B0WFJ8_CULQU
cactttcctggacctcttcttataataacttaataaagtctaataaaaaaaaacgtgaatgtactatctttgttataaataatctcatatcacttttagataagaatgttaactgtaaacgaggataaaaaagtacgtggtcatagcagaaatgctagcgactctagccaattcatcgaagccaccaaacgagacgccctcaatagattacaaaaagaattagagaaaatagtccaaagcagtgaacctagtaaggtagcggaaaacaaaaaacagttagatggcttcactaaactattcacgaggttcctcgatgaaacgggaccttcactcaactgggagaatatcgagaaattacctggagacgctgttagagattacaaaaccttagaacaaccaacatcagacttagtccaccaaatgttaaacaaactggtcgtggtaaagcttaatggaggtttgggtacctcgatgggttgccatggaccaaagtctgtgattactgtcagaaatgatctcacgtttttggacttgacagtacaacagatcgagactcttaacaaaaccttcaaagtgaacgttcctctagtactaatgaactctttcaacacggatgatgacacagagaaaatcataagaaaatacaaaaacctgcaagtagaaattcacatgttcaaccaatcgtgctaccctcgagtcaacagagactcacttctgccagtacccaaagatgccaaagtaaacaacaatttggaagcgtggtaccctccaggtcacggagatttctacaacagcttccaagactcaggattattacaaaagtttttaaaggaaggacgggagtactgtttcctatcgaatattgataatttaggagctaccgtagatttaagtattttgaatttgttactcaaccctaaccaagaacaggcgcagcatgagtttgttatggaagtaaccgataagaccagagctgatgttaagggtggtactttaatccaatacggagggaaattaagactgcttgaaatcgcacaagtacccaaagagcacgtagatgaatttaaatctgtcaaaaccttcaaattcttcaataccaataacttgtgggttaaattagatgctatcgacagggtactccaagaagatttgttgagcatggaaattattgtaaacaacaaaagtttagacaacggccaaaacgtaatccaactagaaacagctgtaggagcagccatgaaatcattcgaaggtggtatcggtatcaacgtaccaagaagcagattcttgcccgtcaagaaaacgtccgatcttttcctcgttatgagcaacttatataccttcaaaaacggttcattgacaatgtcaccgcagaggatgttccctaccacacctttggtaaagttgggcgacaaccacttctccaaagttcagcagttccttgccaggttcgccaacattccggatattttggagttggaccatttgacagtatctggtgatgttacgtttggtaaaggagtatctttaaggggtactgtcatcattattgccaaccatggtgacagaatagacatacctgccggtgccattttggaaaacaaaatagtttcaggaaatatgagaatattggatcattaaacagccatagccagcaagagtacttaaacgatatagaacttataagattctaaattaagattgttatttaatgtcatacaatatttaaatgagattgaaaagattgtgcgaacgatatttaaaaaattatactatatttttgttgttattttttggtaactactttgttatgaaaatcgttgtttttatttacattgcacaaaattgtatcttatataaaaaatgtatattttctcatgttttgttgtataataaaaatctcgtgatgtg

SEQ ID NO: 4617 - DNA, 1896 bp, Diabrotica virgifera
  SmartBlast Evalue=0; Info=Utp-glucose-1-phosphate uridylyltransferase 2 n=4 Tax=Culicidae RepID=B0WFJ8_CULQU
gatatgtttttaattatatattagcccgagactaaaccatctcgcaatttgtttttctggtgcccgattaggtggtggtgtacgcggtttttgtaacacatggatttactagaaagggtacgtggtcatagcagaaatgctagcgactctagccaattcatcgaagccaccaaacgagacgccctcaatagattacaaaaagaattagagaaaatagtccaaagcagtgaacctagtaaggtagcggaaaacaaaaaacagttagatggcttcactaaactattcacgaggttcctcgatgaaacgggaccttcactcaactgggagaatatcgagaaattacctggagacgctgttagagattacaaaaccttagaacaaccaacatcagacttagtccaccaaatgttaaacaaactggtcgtggtaaagcttaatggaggtttgggtacctcgatgggttgccatggaccaaagtctgtgattactgtcagaaatgatctcacgtttttggacttgacagtacaacagatcgagactcttaacaaaaccttcaaagtgaacgttcctctagtactaatgaactctttcaacacggatgatgacacagagaaaatcataagaaaatacaaaaacctgcaagtagaaattcacatgttcaaccaatcgtgctaccctcgagtcaacagagactcacttctgccagtacccaaagatgccaaagtaaacaacaatttggaagcgtggtaccctccaggtcacggagatttctacaacagcttccaagactcaggattattacaaaagtttttaaaggaaggacgggagtactgtttcctatcgaatattgataatttaggagctaccgtagatttaagtattttgaatttgttactcaaccctaaccaagaacaggcgcagcatgagtttgttatggaagtaaccgataagaccagagctgatgttaagggtggtactttaatccaatacggagggaaattaagactgcttgaaatcgcacaagtacccaaagagcacgtagatgaatttaaatctgtcaaaaccttcaaattcttcaataccaataacttgtgggttaaattagatgctatcgacagggtactccaagaagatttgttgagcatggaaattattgtaaacaacaaaagtttagacaacggccaaaacgtaatccaactagaaacagctgtaggagcagccatgaaatcattcgaaggtggtatcggtatcaacgtaccaagaagcagattcttgcccgtcaagaaaacgtccgatcttttcctcgttatgagcaacttatataccttcaaaaacggttcattgacaatgtcaccgcagaggatgttccctaccacacctttggtaaagttgggcgacaaccacttctccaaagttcagcagttccttgccaggttcgccaacattccggatattttggagttggaccatttgacagtatctggtgatgttacgtttggtaaaggagtatctttaaggggtactgtcatcattattgccaaccatggtgacagaatagacatacctgccggtgccattttggaaaacaaaatagtttcaggaaatatgagaatattggatcattaaacagccatagccagcaagagtacttaaacgatatagaacttataagattctaaattaagattgttatttaatgtcatacaatatttaaatgagattgaaaagattgtgcgaacgatatttaaaaaattatactatatttttgttgttattttttggtaactactttgttatgaaaatcgttgtttttatttacattgcacaaaattgtatcttatataaaaaatgtatattttctcatgttttgttgtataataaaaatctcgtgatgtg

SEQ ID NO: 4618 - DNA, 1958 bp, Diabrotica virgifera
  SmartBlast Evalue=3E-83; Info=Ca2+-binding protein n=1 Tax= Glossina morsitans morsitans RepID=D3TQQ6_GLOMM
aaaaattccagtgcataaacagtacactattgcaggtaatttgggtggattgtttaccttctagcttctgggatctgttgttgtatgataatctaaaaataatattccagatttttttcgaattgtgcaatcaagtaaataaaacgagccgcgtaacctcaaaaaattccagttttataaaaacttcagtccacaatgagccaatttgcctcggcgatgcccagtaggcaattcctttgggatgtctttcaaagggttgatagggatagaagtggattcattaatgccgacgaacttgggtccgccctttccaatggaacctggagtccctttaatccagaaactgtcagactgatgattggtatgttcgatagaaacaatagaggccaggtcagttttgaggatttcggagctctttggaagtatgtcacagactggcaaaactgcttcagatctttcgatagggataactcaggcaacatagataaagaagaattgaaaacggcacttgtgtcattcggttatagactctctgatagtttaattaatattcttcttaggaagttcgacagacacggtcacgggacaatactgtttgatgattttattcaatgctgcattgtattatatacactcacatcctccttccgccagtacgacactgatcaagacggctacatcacaatccactacgagcagttcttaactatggtattcagtctaaaagtttaatacgctttcaatcagctttttagtcaaagtttacgaaagagacaatgatcatgaaacaaataatgtgtcgcaaatgaactcaaaacaactttttgtatatcaaacacatttccaaataacttctacaacttaggataacttattcttaaacatttacaccaaactctgcccggaatttgaaatatctgtactaatactgttttacgaaatatttcaagaaacggttaagtagatagtaccctaaatcatcatcatcatggttgaaagatcggctggtgatttttaaacgtcatatagaaagaacagtattcaaaaaagtacaaaataatggccaaattttaactagccacctgtttacctgtagcctatacagattttgttgtcagtaggtttctagtttaactatactgtagaataaatatttacatagaaaaaaattaaaataagaatagattaaaaaagagatgtgttacacccgctgaacaacacaacacaataaagcgaagcacatcaggaagtttactgaacccaatcccactcacagaaggggaaatcatactccttattgctcaaacattaagcgtattatatcatattatattaccaaagcaccattttaacaaatctctcaattaaaaaacttcactattctgaggtagcctatgatgtatgtcataaattcaaggaagaacaaaatcatccggctcgaaggaccaatgtacaaaaggtttacgaattgcgaccgcccacttcatcgcaattctatttgccatttaagttttctccgggacctttaaagttcttaacacgttcggtgtccatgacgcacgtcacgaaggttttatcaaaggtaccgatgacgcataagtggcgtcagtagtagtgtgttactaaatgaacgatttaagtacatggtaccagctaagtggcgcttgttcaagatgggcaccgaacgtgttaaccccagttgtgagttcctctttattttcaactgttcttgcatatggaactgtctgctgatgatcctcaactttgttttgaaatgttaaactctactcctctcccactctgttgttattcttcaccatcttaagtaattttgtttctagttaatcttgtacatgttccaacgctctatttctttgggtttagagcgttataatatgaatattgcatctatatattaaacacgcaacagcagtagtgtggttcagttatgtatgaga

SEQ ID NO: 4619 - DNA, 1824 bp, Diabrotica virgifera
  SmartBlast Evalue=3E-83; Info=Ca2+-binding protein n=1 Tax= Glossina morsitans morsitans RepID=D3TQQ6_GLOMM
aaaaattccagtgcataaacagtacactattgcaggtaatttgggtggattgtttaccttctagcttctgggatctgttgttgtatgataatctaaaaataatattccagatttttttcgaattgtgcaatcaagtaaataaaacgagccgcgtaacctcaaaaaattccagttttataaaaacttcagtccacaatgagccaatttgcctcggcgatgcccagtaggcaattcctttgggatgtctttcaaagggttgatagggatagaagtggattcattaatgccgacgaacttgggtccgccctttccaatggaacctggagtccctttaatccagaaactgtcagactgatgattggtatgttcgatagaaacaatagaggccaggtcagttttgaggatttcggagctctttggaagtatgtcacagactggcaaaactgcttcagatctttcgatagggataactcaggcaacatagataaagaagaattgaaaacggcacttgtgtcattcggttatagactctctgatagtttaattaatattcttcttaggaagttcgacagacacggtcacgggacaatactgtttgatgattttattcaatgctgcattgtattatatacactcacatcctccttccgccagtacgacactgatcaagacggctacatcacaatccactacgagcagttcttaactatggtattcagtctaaaagtttaatacgctttcaatcagctttttagtcaaagtttacgaaagagacaatgatcatgaaacaaataatgtgtcgcaaatgaactcaaaacaactttttgtatatcaaacacatttccaaataacttctacaacttaggataacttattcttaaacatttacaccaaactctgcccggaatttgaaatatctgtactaatactgttttacgaaatatttcaagaaacggttaagtagatagtaccctaaatcatcatcatcatggttgaaagatcggctggtgatttttaaacgtcatatagaaagaacagtattcaaaaaagtacaaaataattgccaaattttagctagctacctgtttatacagattttatcgtcaataattttatagctcaattttgtaccgtagggtaaatattaacatacaaaaaaacttaaaataaaaatagattaaaaagacatgtgcacccgcttaacaacacaacaaagcgaagcacaacagggcgtttacagatcctaacaccactcacagatggagaagtcacaccttgaagaggtaaacagcataaacgaggttttctttacttgtgaaaatcttaatggcacacttggtcaatttgatgagttgatattcgtttggtcatcagaaataataccaaggcatcagtaaaacttggttttaataaataatgctactaaaaaacctgtaagggtaagaaaccggttcaaatactcctccctgcagcatttctgcttcaattctccttctgcttttagagttaaatccgtttttccgttgtacttggaacataatcattatatgatctttatatgatgtatgtgtatatatttttcaattcttgcggttgaagatgtctctcttttcaagactttttttcacatgtttttcactttatccttattgctcaaacattaaccttattatataaagtattgccaaagctccaattttaacaaataactacagtattctgagataacctaagatgtatgccataagttcgagaaagaacaataacatccggctcgaaagaccaatgtataaaagagaaggggattgcgaattgcgacaaact

SEQ ID NO: 4620 - DNA, 1898 bp, Diabrotica virgifera
  SmartBlast Evalue=1E-135; Info=Alpha-amylase n=1 Tax=Aedes aegypti RepID=Q17NL5_AEDAE
tagactgtgacataatgttcaagtgtatcacatatctgtccgctatattagtggtagctgtcgtatgttcggaaaacgataaagattggtggaaaacggccactttttaccaaatttacccgaaatcatttaaagacactaatggtgatggagtaggagatttaaaaggtattattgagaaattagactacgtaaaagatcttggagtaacgggagtatggctttcacccatatacaaatcaccattggtggacgaaggatacgacatcagtgattttagagacattaatccgatatttggagacttggagactttcgttaaacttgtaaatgaaacacattcacgtggactaaaaatcgtgctggattatgtaccaaatcataccagcgatcagcacccatggtttacgaaatcagaaaacagagaagaaggatatgaagacttttttgtttgggtcgatgggaaaaatggagataagaatgaacctccaaataattggcgcagtgtctttaaaaattcagcgtgggaatggagcgataaacgaaagcaattttacctacaccagttcttcaagcaacagccagatcttaacttttttaatgatcaagtccagaaagaaatgaaggatattatcaactactggttggaagaatacggtatagatgggatcagaatagattctatgccttacttggttgaaaaccaaacttggccagatgaacctagatcatatgatccaagcgcatccgaagatgaatatgaatatttggatcacatctattcacgaagtcaaaaggaaagctatgacataatctacgactggagaagacacattgatgatatatctaaaaatacgtcgaacaccaaagtatgcatgacagaagctgtggttgacctgaagcacataataccatattacggaacacctgatggttcaaaactaggtgctcatttctcgtttaatttcatcttgcttgtgttgaacactacttccacagcaagtgacctttctaccttaataaacttatggatggatagtctccctaaaatatacacatctaattgggtgctaggaaatcacgatcaacacaggatagcaacaaaagtcggtacagaaaaagtggatggtctaaatatgttgatggctttcctccctggcattcaaatcacgtacaacggagaagaaattggaatggaaaacggagaagtaaactgcgaaacacaaggtctagatcacgctgagaattgctcagattattacaggatctccagagatttccaaaggacaccattccaatgggacagcagtgagtttgcaggatttaccagtggaaataaaacatggttgcctgtcagttcgaaaaagactaaatgcaatgtggctgatcaaattaatgacgaaagaagccatttgaatatatataaaaaactccaaaggctgcgacctcaatggcgtcaaagtgaatacgaaataaaaactttggacaattcaaagaatgtacttcaagcacttcggtataacaaagggggaactaatgaagtacaatttgtatttaactatggatctgaaccagttaaaagtattgatcttaatagagaaaaatcttacgaagtagttataagcagtggtaattcaccaaagaatgatggagatgttgttgatggaaaatccttaactttaaatggaaatgaagcattgatattaaaaccaaaaccgtgaactagaaattattaagcacactacatattttatttatttatatatttttttaaatagttttaaaaattaaaaaaaaacatgcaaaaataacaatattaggccaaattgatgttattaaatataatgtaatatattattggttagattattacgtatataaatacaatgttttattgg

SEQ ID NO: 4621 - DNA, 1881 bp, Diabrotica virgifera
  SmartBlast Evalue=1E-135; Info=Alpha-amylase n=1 Tax=Aedes aegypti RepID=Q17NL5_AEDAE
tagactgtgacataatgttcaagtgtatcacatatctgtccgctatattagtggtagctgtcgtatgttcggaaaacgataaagattggtggaaaacggccactttttaccaaatttacccgaaatcatttaaagacactaatggtgatggagtaggagatttaaaaggtattattgagaaattagactacgtaaaagatcttggagtaacgggagtatggctttcacccatatacaaatcaccattggtggacgaaggatacgacatcagtgattttagagacattaatccgatatttggagacttggagactttcgttaaacttgtaaatgaaacacattcacgtggactaaaaatcgtgctggattatgtaccaaatcataccagcgatcagcacccatggtttacgaaatcagaaaacagagaagaaggatatgaagacttttttgtttgggtcgatgggaaaaatggagataagaatgaacctccaaataattggcgcagtgtctttaaaaattcagcgtgggaatggagcgataaacgaaagcaattttacctacaccagttcttcaagcaacagccagatcttaacttttttaatgatcaagtccagaaagaaatgaaggatattatcaactactggttggaagaatacggtatagatgggatcagaatagattctatgccttacttggttgaaaaccaaacttggccagatgaacctagatcatatgatccaagcgcatccgaagatgaatatgaatatttggatcacatctattcacgaagtcaaaaggaaagctatgacataatctacgactggagaagacacattgatgatatatctaaaaatacgtcgaacaccaaagtatgcatgacagaagctgtggttgacctgaagcacataataccatattacggaacacctgatggttcaaaactaggtgctcatttctcgtttaatttcatcttgcttgtgttgaacactacttccacagcaagtgacctttctaccttaataaacttatggatggatagtctccctaaaatatacacatctaattgggtgctaggaaatcacgatcaacacaggatagcaacaaaagtcggtacagaaaaagtggatggtctaaatatgttgatggctttcctccctggcattcaaatcacgtacaacggagaagaaattggaatggaaaacggagaagtaaactgcgaaacacaaggtctagatcacgctgagaattgctcagattattacaggatctccagagatttccaaaggacaccattccaatgggacagcagtgagtttgcaggatttaccagtggaaataaaacatggttgcctgtcagttcgaaaaagactaaatgcaatgtggctgatcaaattaatgacgaaagaagccatttgaatatatataaaaaactccaaaggctgcgacctcaatggcgtcaaagtgaatacgaaataaaaactttggacaattcaaagaatgtacttcaagcacttcggtataacaaagggggaactaatgaagtacaatttgtatttaactatggatctgaaccagttaaaagtattgatcttaatagagaaaaatcttacgaagtagttataagcagtggtaattcaccaaagaatgatggagatgttgttgatggaaaatccttaactttaaatggaaatgaagcattgatattaaaaccaaaaccgtgaactagaaattattaagcacactacatattttatttatttatatatttttttaaatagttttaaaatttaaaaaaaacatgcaaaataggccaaattgatgttattaaatataatgtacctatatattagttagagtattacgtatataaatacaatgttt

SEQ ID NO: 4622 - DNA, 2134 bp, Diabrotica virgifera
  SmartBlast Evalue=2E-56; Info=Selenoprotein T n=1 Tax=Culex quinquefasciatus RepID=B0WDA6_CULQU
ctgactgtcatcacatgagaagcaaaaattgtggaatttttgtttttatcaatttaatatttgaataaacctgtaaaacagtaaagtaagtttatatacttgtgaacaattagagaacgatctctttttataaacttttatagaactctaaagaaattaagtgtgtgtttttttctcgaaaagttatatgaacttgtccaataatggggaggctagtcaatatgcaatatttgtttagtttaactacgttgttactattttcttcaataatttctactcaagcgctgaagatgtacctttatcgaaacttagccaacatattgggactcctactttaagatttctatattgttactcatgtggatacaaaaatatgtttgatcagttctccaccataataaaccaaaaatatccagagattcttgtagatggggcaaattatgatccacctggcatgaacatgttcatagcaaaaatgataggatggataaaaatggcgataattctatgtatattggccaacatcaacgtattcgagtatttcaatcaaccaagaccaggctggtggatttggtgcgtggaaaacaaattatatgcctgcatgatgctgttcttcttgtgcaatattctagaagggcagctcatccaatcaggagccttcgagatcacattgaatgacgttccagtttggtcaaagttagaaacaggacgtattccacaaccagcagagctgttccagatcattgatagccacatgcagttcgacacaaaaatagaatacaataatttcgctaaataatatttggaaaacacaagatactagaggagatttaagaactgtatattgcgagtgtcaaaacagtacgaagaatattgtaaatcctcgaaacaagttttttagatgtcatgttcatttgtattgttattttcttaatatttcacatatttctttgtactgtataggagaggattgatgcaaaatgaatttatcaaaatataaagttgtggtgtccaaaattgtacgattgttatttaatgtagtagtataaagacagtaaaatatgtttggttgtttcttcataaatccattgcacgtcagccaattttgacattttgatttccatacaacgttgccataatgtcataataagtaaaaatctaaggaattatgaaataaaaaataatatctaattatattattatgatgatataatactaaattatttaaataaattgtattttgttaaggatatgatgtatataaataaggtgacatatattatatgtaattaatgatgtgcaacagacctaaaaaggtataataatagagatattttaagaagtatcacaataacgaatatttttactatcacttgatctagtatacatgttaatgtactacatagaagttaaagtaaagtctaacaagctatctaagagactcatttgttcgaggtttgaaattatatagacaagggatcatctcatcacttgtttatggaatttcacacctcgaaacagtagcagcctgctcagctgaatattattgagtcccttagagaccttgctagactataatatgttacataattgttaatacaaaactataaaaattgtccttgatagtattttttaattatttctatgtaaaaaggagactttagacagttcctgtacataattatctgtacaagatcgtcacatataattcaggcggagccttctttcacttaagtgtcgtatatgggcagttggtgtatcatttgttaattctgaattttatacttataaactgttcagcactaatgttagagttattttatttttccttttttgtttttttattgttgaagaagcattgcaaatttttccactgcttagttttatcaatatattcgtgataaactgtcgtaaacatttaaaaattcattagaatctagggacacattgataaattttattttgttgttatcttttaattttgttttgttgtgactagtttttatatcaatatgtactgatcaacgtgattttatatttcaaatggagaaagtatatgcatattaatgaaaatattgtttatttgtgaaatattatagctccaaatgacttttttaataaaacaactattgaa

SEQ ID NO: 4623 - DNA, 1633 bp, Diabrotica virgifera
  SmartBlast Evalue=1E-56; Info=Selenoprotein T n=1 Tax=Culex quinquefasciatus RepID=B0WDA6_CULQU
ctgactgtcatcacatgagaagcaaaaattgtggaatttttgtttttatcaatttaatatttgaataaacctgtaaaacagtaaagtaagtttatatacttgtgaacaattagagaacgatctctttttataaacttttatagaactctaaagaaattaagtgtgtgtttttttctcgaaaagttatatgaacttgtccaataatggggaggctagtcaatatgcaatatttgtttagtttaactacgttgttactattttcttcaataatttctactcaagcgctgaagatgtacctttatcgaaacttagccaacatattgggactcctactttaagatttctatattgttactcatgtggatacaaaaatatgtttgatcagttctccaccataataaaccaaaaatatccagagattcttgtagatggggcaaattatgatccacctggcatgaacatgttcatagcaaaaatgataggatggataaaaatggcgataattctatgtatattggccaacatcaacgtattcgagtatttcaatcaaccaagaccaggctggtggatttggtgcgtggaaaacaaattatatgcctgcatgatgctgttcttcttgtgcaatattctagaagggcagctcatccaatcaggagccttcgagatcacattgaatgacgttccagtttggtcaaagttagaaacaggacgtattccacaaccagcagagctgttccagatcattgatagccacatgcagttcgacacaaaaatagaatacaataatttcgctaaataatatttggaaaacacaagatactagaggagatttaagaactgtatattgcgagtgtcaaaacagtacgaagaatattgtaaatcctcgaaacaagttttttagatgtcatgttcatttgtattgttattttcttaatatttcacatatttctttgtactgtataggagaggattgatgcaaaatgaatttatcaaaatataaagttgtggtgtccaaaattgtacgattgttatttaatgtagtagtataaagacagtaaaatatgtttggttgtttcttcataaatccattgcacgtcagccaattttgacattttgatttccatacaacgttgccataatgtcataataagtaaaaatctaaggaattatgaaataaaaaataatatctaattatattattatgatgatataatactaaattatttaaataaattgtattttgttaaggatatgatgtatataaataaggtgacatatattatatgtaattaatgatgtgcaacagacctaaaaaggtataataatagagatattttaagaagtatcacaataacgaatatttttactatcacttgatctagtatacatgttaatgtactacatagaagttaaagtaaagtctaacaagctatctaagagactcatttgttcgaggtttgaaattatatagacaagggatcatctcataaaacaggtacatcacttgtttatggaatttcacacctcaaacagtagcagcctgctcagctgaatattattgagtcccttagagaccttgttagactataatatgttacataattgttaatacaaaactataaaattgtccttg

SEQ ID NO: 4624 - DNA, 2003 bp, Diabrotica virgifera
  SmartBlast Evalue=4E-34; Info=Endonuclease-reverse transcriptase n=1 Tax=Bombyx mori RepID=D5LB38_BOMMO
taataatttgatgtataatttacttaaattaaaactttttacagagctatccaatatcaaatcacctaaaagaacaaaaaatacagcatttctcaaaaatctccaaaacagatttccattttctacattagtttgagtggcatctaataatggaacactctgtattatgaacaaggtagtatataacaaacataaattattattctaagtctacctataaaaaataattttagattggtattaatgttccttaaaggagactgtcttgttttctaaagaaaatcttggaattttaccgaagttgtcaaaaactaaccaaattgcttcttcgcgctgaagtataatacatattttatatcgttttcagttcattaaaaaataaagaaatgttacaacttatggggcttgttaaatttttaattgcttgaaatgtgtcacatggtacaaaatgttctttttattattaacgcaaacgtagctaacgaagtacaaaaatttattttaaatgggcaactaaaaatataacattttatgagagactgtgcagcactgatcttcaaatcaattacgtcctataaatataagccatgataccctaaaaaagtacacaacagaaccttaaaaaaacatgtgtttacttaaacggtgatacaatatggagcatagaaaagatattaacaaagaaaccgcttgtaaactagaaggcctaaacgaaacaaccgatatatttcactctaccgtacctctcgtaccgttcacacctcacgtacctattatatcataggtagtattaacaaaacagcaatcttcttcttaacgtgccctatcaagtccccttgacgttggcgattaacatggtgaaactgtctgtctcgagctattctaaatagttgttctgctttcttcattcctgtccactcccggatattcttcaaccaagaggcctgctttctaccaattcctctgcgtccttcgattttacccatcataataagttgaagaatattataccggtctccctttactacgtgtccaaaataggccatctttctaaatttgatgttatcaagcagctcgcgggcagcatttgctctcttaaggactgccacatttgtcagcatagccgtccatggtattttcagtatacgtctgtgcagccacatttcaaaggcctccaaacgattaatggtggatatttttaatgtccatgcttcgacaccatacaagaggactgaccaaatgtaacatttaatcatgcgctttcgaagttgaagttgcaagttatcattacagaagaatgacctcatcaatcattgctcaaacagcaataacaacattaattatgaaatttttagaagatttgcatgacagctataaaattcctcatgttccatcggtacgttaatgctgtatggtatggtggatcggtgaagaatacagtttgctgagcgtttgtttatctgaaggaaggaatatctctgttggcgacaaaacaatagcaaaattaaggtcatcatcaactgttttacctaaaaatttgataacttttctgtactttcatcaaaacctattactgttctaatctgtcgataatccggcatagaccaagaattacaaacaaaatgtaatttaagacataggtacatgtcaagacaaatattttacaagataaaatatattgaaaatattacaatataatatttattcaagaaatatgaaatttattaaaatagcttgcagggttatttttctattatatgtaatgaatgaaccttcatcttttcaagtccacgtaaagttgttttttgttgatgatgttatttagaaccgttatgtgatcggttttgaatccattgttatatggggcaataatacaggaatcaaaattcaaatctttctctaatgacatggtgtattgattttgagtagttacggatatgcaagggaaaaaattactagcactctacgtctcaatatggtctccattgaaaattatatttaac

SEQ ID NO: 4625 - DNA, 1767 bp, Diabrotica virgifera
  SmartBlast Evalue=3E-46; Info=Endonuclease-reverse transcriptase n=1 Tax=Bombyx mori RepID=D5LB38_BOMMO
taataatttgatgtataatttacttaaattaaaactttttacagagctatccaatatcaaatcacctaaaagaacaaaaaatacagcatttctcaaaaatctccaaaacagatttccattttctacattagtttgagtggcatctaataatggaacactctgtattatgaacaaggtagtatataacaaacataaattattattctaagtctacctataaaaaataattttagattggtattaatgttccttaaaggagactgtcttgttttctaaagaaaatcttggaattttaccgaagttgtcaaaaactaaccaaattgcttcttcgcgctgaagtataatacatattttatatcgttttcagttcattaaaaaataaagaaatgttacaacttatggggcttgttaaatttttaattgcttgaaatgtgtcacatggtacaaaatgttctttttattattaacgcaaacgtagctaacgaagtacaaaaatttattttaaatgggcaactaaaaatataacattttatgagagactgtgcagcactgatcttcaaatcaattacgtcctataaatataagccatgataccctaaaaaagtacacaacagaaccttaaaaaaacatgtgtttacttaaacggtgatacaatatggagcatagaaaagatattaacaaagaaaccgcttgtaaactagaaggcctaaacgaaacaaccgatatatttcactctaccgtacctctcgtaccgttcacacctcacgtacctattatatcataggtagtattaacaaaacagcaatcttcttcttaacgtgccctatcaagtccccttgacgttggcgattaacatggtgaaactgtctgtctcgagctattctaaatagttgttctgctttcttcattcctgtccactcccggatattcttcaaccaagaggcctgctttctaccaattcctctgcgtccttcgattttacccatcataataagttgaagaatattataccggtctccctttactacgtgtccaaaataggccatctttctaaatttgatgttatcaagcagctcgcgggcagcatttgctctcttaaggactgccacatttgtcagcatagccgtccatggtattttcagtatacgtctgtgcagccacatttcaaaggcctccaaacgattaatggtggatatttttaatgtccatgcttcgacaccatacaagaggactgaccaaatgtaacatttaatcatgcgctttcgaagttgaagttgcaagttatcattacagaagaatgacctcatttttaaaaatgtcgtgcgggctatctcgattctacattttatctctttatctggatctagttgttcagtaggtaatatggcaaccaagatatttaaaactggatactctttgaattatatgaccatcagcatataaccgtgaatcttgatgtgccaaacggctaaataccatgtattttgtttttgaagtttatgttcaggcctaatatcatagttaaatgtaaacattgtttggctaattggtctttaccaaagccatcaaattaaatttaaaaaaatagttcaggccaaactctcttcccactgtgtcaatggcatttaggggccatgtaatccattcatgtcatcacttaaaataactgtatcatctgcatatatgattgtattgatcagaattccattaactttcacgccctattccaaattatgcagcgcttctttaaatattatatctgaatat

SEQ ID NO: 4626 - DNA, 1881 bp, Diabrotica virgifera
  SmartBlast Evalue=0; Info=Glucose-6-phosphate dehydrogenase isoform A n=2 Tax=Ips typographus RepID=Q2TLW4_IPSTY
tatatacatatatatatacatatatatatatacacatatatatatatatatattattgtctttaggtaaaattttcggtaactttacatttttggcttccatttgtatgaaccagtatatttgaagttattgttatacaatagttcatcggcttcttttggtcctctgctaccatatacgtatggaacaggtttcactctctctttttcaatataatgtaatagaggggtaaatattctccaggcttcagtcaattcatcagcacggacaaagtgcatctgggaaccgcaaaatacgtctaatattaagcgttcatacgcttccggaagtttaacattagcgtatctattactatatgtaagatctagttcagtttcttccatatcaaaagccataccaggagtttttaccataagctttacatacagggcttctccaggttggacccggataactagttcatttctcttgggttttccatcaaatatatcaccaggtacattcttaaattgtattcttacttcagcctttctttcattcaatgcttttccacatttaagtatgaaaggtacaccatcccacctctcattattgatatgaacaacggctaaggcatatgttggtgtaacagaatctttaggaacactcggatcatctaagtatcccaatttcgcattaccttgtccatcaggatttccaacgtactgacccaacacaacgtccttgagctttattggagctatactttttaatacctttaccttttcatttcttatatcgtctggttgaactgaagctggtttttccatagctactagagctagaatttgtaaaatatgattctgcattacatccctaataatgccgaattcgtcaaaataccctcctctgccttcagttccgaagggttccttacaatttatttggatggaagctatatggtcactgttccatgtggggttaaagattctgttaccaaatcgaagtgtcattaaattctgtaccatttccttacccaaatagtggtctattctgtataattgttgttctgtgaataattgactcaaatgtgaggagagcttgttagatgtttccagatcacgcccgaatggtttctcaatgataatacgtgtccatcctttttgtcccatacagttgttttttatatgcactgtgacatcttcgtatactgagggtggcaatgccaaataaaacaatctgtttgcaactggtcccttttcaaatttttctacctccttgttcaatagttcaaaatcagtcctggatgtatactgtccagacatataatgattaagtttccagaaatcttcatacttttctttttcctcgggtttcacatccatccatggtgaacatttctgtctgacttcactcagagtaattttacttctggcataaccataaaatattgtattgactggtaggacattgtctctatacaaccaccataatgtaggatagattttcttttttgctaaatctccggaagcccctagtattacgaaaacgtgagggtattgaccatcaaagtgagtcccatcatggtccatatcttttgatttcaaggagtctctgtatagtgagagacataattcggcgctttttgattgtagttttccgttttccattgcacttaataattgaatttatgaggagcgattggactgtgctgcgttgctacctagctagagaaaaaccgacgatagtaaaacttatcagcaggagataacacgctagatgcgaataaatagcagcaatcagcaccttctaatccttccagaaatcaaaatgacccgagtggactaatttgaacttcgcgatgtaaagctttatatgttcaccgcttcgttaggaattgac

SEQ ID NO: 4627 - DNA, 1877 bp, Diabrotica virgifera
  SmartBlast Evalue=0; Info=Glucose-6-phosphate dehydrogenase isoform A n=2 Tax=Ips typographus RepID=Q2TLW4_IPSTY
tatatacatatatatatacatatatatatatacacatatatatatatatatattattgtctttaggtaaaattttcggtaactttacatttttggcttccatttgtatgaaccagtatatttgaagttattgttatacaatagttcatcggcttcttttggtcctctgctaccatatacgtatggaacaggtttcactctctctttttcaatataatgtaatagaggggtaaatattctccaggcttcagtcaattcatcagcacggacaaagtgcatctgggaaccgcaaaatacgtctaatattaagcgttcatacgcttccggaagtttaacattagcgtatctattactatatgtaagatctagttcagtttcttccatatcaaaagccataccaggagtttttaccataagctttacatacagggcttctccaggttggacccggataactagttcatttctcttgggttttccatcaaatatatcaccaggtacattcttaaattgtattcttacttcagcctttctttcattcaatgcttttccacatttaagtatgaaaggtacaccatcccacctctcattattgatatgaacaacggctaaggcatatgttggtgtaacagaatctttaggaacactcggatcatctaagtatcccaatttcgcattaccttgtccatcaggatttccaacgtactgacccaacacaacgtccttgagctttattggagctatactttttaatacctttaccttttcatttcttatatcgtctggttgaactgaagctggtttttccatagctactagagctagaatttgtaaaatatgattctgcattacatccctaataatgccgaattcgtcaaaataccctcctctgccttcagttccgaagggttccttacaatttatttggatggaagctatatggtcactgttccatgtggggttaaagattctgttaccaaatcgaagtgtcattaaattctgtaccatttccttacccaaatagtggtctattctgtataattgttgttctgtgaataattgactcaaatgtgaggagagcttgttagatgtttccagatcacgcccgaatggtttctcaatgataatacgtgtccatcctttttgtcccatacagttgttttttatatgcactgtgacatcttcgtatactgagggtggcaatgccaaataaaacaatctgtttgcaactggtcccttttcaaatttttctacctccttgttcaatagttcaaaatcagtcctggatgtatactgtccagacatataatgattaagtttccagaaatcttcatacttttctttttcctcgggtttcacatccatccatggtgaacatttctgtctgacttcactcagagtaattttacttctggcataaccataaaatattgtattgactggtaggacattgtctctatacaaccaccataatgtaggatagattttcttttttgctaaatctccggaagcccctagtattacgaaaacgtgagggtattgaccatcaaagtgagtcccatcatggtccatatcttttgatttcaaggagtctctgtatagtgagagacataattcggcgctttttgattcttcaaattcactcataggctgtcttcggaacattgttagggattaaattcaaataataaatggaatgttaaatagattttgcaagtggcggttagaacggttgtaattaaaaggaaactaagtttgtggtttttagataacccagcctaaaataattatctatttgaagatatacatgtatatctgtgcgtaatttgactttgaagtatctttcaataacaaaaatgtctacgtctgaggttatgg

SEQ ID NO: 4628 - DNA, 1918 bp, Diabrotica virgifera
  SmartBlast Evalue=0; Info=Phosphatidylinositol 3-kinase catalytic subunit type 3 n=2 Tax=Formicidae RepID=E2B101_9HYME
gggtatgttggatttaagagtgtggccaaatagggaggctgatggaaattttcctacatctacccctgggaaaaccaaaaacggtaaagaacagatgcagagattggccaagctagctaagaaacatagaaatggttatatcactaaggtcgattggttagacagactcactttccgagaattagaagtagtaaatgaaaaagagaagaggtcctctgaatacttgtacttaatgatagaattccctaccattaacgttgatggtatgccacatcatattgtttacttcgagcaaaatggggaagaaatcctttcggtgaggttgcaagctgatttagttacagtaccagatcaagaaatattaaaggaaaatcttgtcgagagcaaacatcacaaactcgccagatctctgcgaagcggccattgcgataaagatgccaaaccgaacgcaacaatgcgcgacatcctcaacaccatcgtctcctatccccctaccaaaaacctttccaacgaagagcaagatcacgtctggaagtaccgcttttacctcagcacccagaagaaagccttagcgaagtttttgaagtgcgtcaattggaaccagcacaacgaagttcggcaggctctacatatgatggaaatgtgggctccaatggatgtggaagatgcgttggaactactgagcccgaatttcgcgcatcccgctgtgcgcagatacgctatttcgaggctacagcaggcgcctgacgacgagattatgttgtatctcttgcagttagtacaggctttgaaatacgaaaactttaagaccattcaagatggttacacaaggatctcaccaggtcgcgatgcttactttcttacagaagataaagaagcgcagctagaaaagaaagacagtaaagagagtaacagcaccattactaacgaacctttgttgcacagatcttcaagctacaatcaagatactattctagctgatcaaatcgccgcttctaacgtcaacagcgtcatcgaaaatccagaacaaaaacccagcggtctaccagaaaaccttcttcaaaatcccataactgacagcggaaatacagatactttaaggagccatatgaacgacgaagaagaggtccaagatttggcctctttcctaattcatagagcctgcaagaatttcagcctagctaattatttttattggtatttattgctggaatgtgaagatcaggatactaatctacgccaagatgttgctgatgaagcagttagaaacatgtaccttactgtcatgaaaaccttttcgcaaaccctcgcacgtggctcagattcgatgcaaaagaaacgccacattctcactaaacaacagaagttcatcgacaagctggttaagttgatgaaaacggtttcgagagagagcggcaaccgcaagaagaaagccgaaaagctacagcaacttctggccgattccgatagtttcaaatttaatttttcgaaattcgaagccatacctttccccttggatccggatgttatgatcaacggtatcattccagagcaagcgagcttgtttaagtcggcgttgatgccttccaaattgtattttaagacggttgaaaacgaagaatatgtagcaatatttaaattgggagatgacctacgacaggatcagttgatattacagatgatcactcttatggataagctcttgagcaaagaaaatttggacttaaaactgacgccttacagagtactcgctacgagtacgaagcatgggtttgtacagtttatagattctgtcacagttgccgaggctctggctacagaaggtagcatacacaactactttagaaaatatcatcctcaagaaaacagcccctatggtatagcccccgatataatggacacgtacgtccgttcttgc

SEQ ID NO: 4629 - DNA, 1843 bp, Diabrotica virgifera
  SmartBlast Evalue=1E-152; Info="Phosphatidylinositol 3-kinase catalytic subunit type, putative n=1 Tax=Pediculus humanus corporis RepID=E0VQ65_PEDHC"
tcgattgtgcgatagcattataaaaactagtgcgataaaatgttcgaagtgttcgtgttatttacataccaagtgtttcgaaaaggtggcagaaattttcgatatagaaaaagacgcatggcagtgtagatcgtgttttcaaaaccgtaagcttttggaaatcgatttgattaggatcgaaaatcagtgtttgaaagatcaagttaggattttgactaagttagttagcgaacaggattatttgaattgtttgcaaaaagagaggttgcaggggtttcaggaaaacggcgaagaaaatcttgtcgagagcaaacatcacaaactcgccagatctctgcgaagcggccattgcgataaagatgccaaaccgaacgcaacaatgcgcgacatcctcaacaccatcgtctcctatccccctaccaaaaacctttccaacgaagagcaagatcacgtctggaagtaccgcttttacctcagcacccagaagaaagccttagcgaagtttttgaagtgcgtcaattggaaccagcacaacgaagttcggcaggctctacatatgatggaaatgtgggctccaatggatgtggaagatgcgttggaactactgagcccgaatttcgcgcatcccgctgtgcgcagatacgctatttcgaggctacagcaggcgcctgacgacgagattatgttgtatctcttgcagttagtacaggctttgaaatacgaaaactttaagaccattcaagatggttacacaaggatctcaccaggtcgcgatgcttactttcttacagaagataaagaagcgcagctagaaaagaaagacagtaaagagagtaacagcaccattactaacgaacctttgttgcacagatcttcaagctacaatcaagatactattctagctgatcaaatcgccgcttctaacgtcaacagcgtcatcgaaaatccagaacaaaaacccagcggtctaccagaaaaccttcttcaaaatcccataactgacagcggaaatacagatactttaaggagccatatgaacgacgaagaagaggtccaagatttggcctctttcctaattcatagagcctgcaagaatttcagcctagctaattatttttattggtatttattgctggaatgtgaagatcaggatactaatctacgccaagatgttgctgatgaagcagttagaaacatgtaccttactgtcatgaaaaccttttcgcaaaccctcgcacgtggctcagattcgatgcaaaagaaacgccacattctcactaaacaacagaagttcatcgacaagctggttaagttgatgaaaacggtttcgagagagagcggcaaccgcaagaagaaagccgaaaagctacagcaacttctggccgattccgatagtttcaaatttaatttttcgaaattcgaagccatacctttccccttggatccggatgttatgatcaacggtatcattccagagcaagcgagcttgtttaagtcggcgttgatgccttccaaattgtattttaagacggttgaaaacgaagaatatgtagcaatatttaaattgggagatgacctacgacaggatcagttgatattacagatgatcactcttatggataagctcttgagcaaagaaaatttggacttaaaactgacgccttacagagtactcgctacgagtacgaagcatgggtttgtacagtttatagattctgtcacagttgccgaggctctggctacagaaggtagcatacacaactactttagaaaatatcatcctcaagaaaacagcccctatggtatagcccccgatataatggacacgtacgtccgttcttgc

SEQ ID NO: 4630 - DNA, 1914 bp, Diabrotica virgifera
  SmartBlast Evalue=0; Info=Vacuolar proton pump subunit H n=2 Tax=Formicidae RepID=E2B688_9HYME
ttttttttaaacgacaacatatactttattataatactaacaatcagaaaaaagttactttaaaagcaatatttttaaatgtttaaaatgtgcatggttgattattggttatcgtaacaataataaaatatgacaggaatgtatacctatacagctatgtacagaaatcgatataatttttacaattatttttaaagtttctacaattattgcagtaaatatctttaaatacttttcatggtagtatttacgccttgcctgcgacaggagctccaccctttggcgcgtttttatctgtactttgctctttttcaagttgacgaccaaggtattcccaattgtggaccatcaatttttggactgccaacagagcttcatatcgtacattgggatcttcgtgggctaagagttgcataactaattgctttcctcccaactgctcgattatgtgtttgccgcgaggataatggcgaacatactctccaatatcgaaactagctacgctcaataccaaggggtccttgctggtttctaacaaatgaatgagaatacggagtaattcgtagtttttctcgttgaggcgctgcgcattttcccgccagaacttgctcttgtgtactggagaccattccaaacgtccagatttgacttcagttgaatattcatcgaaggaactcagatcctgaacagaactctgtagtttttcagttagaaattcgacatcagctgtcacatcttcatcatcgaacttgcgctgttctaaaatggccaattgtttcaatactttgcattgcaccatagctatacaatgttcttttgaaacttgttgatcttcgggtttttcgatcaaattcctgaaaacagctaaaataattctggttactttctcctttaccgaatcgctcaaaatatctgccaatataggaataacgttgaatttgttcatcttttcggctaacaacgggttgaaagtgagtacccacaagcagaatatcagctggtactgaacttggaaatttactcttccagagagtaccgacaacagagtggatattccatcgacggacacgaaggcaaaacggtagtcgtcaattcggagcatcatttgaaggcatcttgcaaccgattggatgtattcgttgttcgatatctcttgagaggaggattgctgatcgaatcctgattccgtgtaatgttccgtagccgctccctttagagtatctgaaactgcttgcgatgcagccagtgcttcgtactgagtttttagttggtcttttaaccaggtcaagtaaaaatgaaggtcagaacgatccataagtgtctgcgaccaacaagcaattttagcgatgatcctagaagtcatgttggtaataaatccatcctggcggttaagaaggttcaaaaatggaccccaaacagattctttcttttggttggcatattcgtgaaatatctctacacgacttctgttctcctgtaacatatcatcaaccaaaactaaaatgtactgcagagtttggtccttggatacatgccccaaaaggttcaacaatgtttgagcacattggtttctgtcgcttttcaggagagcttctctttttgcactatcagtcacatcaaaagctactatgaagttgtagtcttcctgcgaaatcatttgtgactggaaataggattgccagtttacatgttgatttcttatatctgtagctctttgctgcaatacacttgtagcagccaacatatctgttttgtcatcgtccaaagacgacattatatcctgtattttaggatttgctcccgcaactaaattggatgccatttttttaaattaaaattacaacccttttaatagaagacctaaaaaattaactctgacccaactcccaactggaagtcttgtgatataaattt

SEQ ID NO: 4631 - DNA, 1803 bp, Diabrotica virgifera
  SmartBlast Evalue=0; Info=Vacuolar proton pump subunit H n=2 Tax=Formicidae RepID=E2B688_9HYME
ttttttttaaacgacaacatatactttattataatactaacaatcagaaaaaagttactttaaaagcaatatttttaaatgtttaaaatgtgcatggttgattattggttatcgtaacaataataaaatatgacaggaatgtatacctatacagctatgtacagaaatcgatataatttttacaattatttttaaagtttctacaattattgcagtaaatatctttaaatacttttcatggtagtatttacgccttgcctgcgacaggagctccaccctttggcgcgtttttatctgtactttgctctttttcaagttgacgaccaaggtattcccaattgtggaccatcaatttttggactgccaacagagcttcatatcgtacattgggatcttcgtgggctaagagttgcataactaattgctttcctcccaactgctcgattatgtgtttgccgcgaggataatggcgaacatactctccaatatcgaaactagctacgctcaataccaaggggtccttgctggtttctaacaaatgaatgagaatacggagtaattcgtagtttttctcgttgaggcgctgcgcattttcccgccagaacttgctcttgtgtactggagaccattccaaacgtccagatttgacttcagttgaatattcatcgaaggaactcagatcctgaacagaactctgtagtttttcagttagaaattcgacatcagctgtcacatcttcatcatcgaacttgcgctgttctaaaatggccaattgtttcaatactttgcattgcaccatagctatacaatgttcttttgaaacttgttgatcttcgggtttttcgatcaaattcctgaaaacagctaaaataattctggttactttctcctttaccgaatcgctcaaaatatctgccaatataggaataacgttgaatttgttcatcttttcggctaacaacgggttgaaagtgagtacccacaagcagaatatcagctggtactgaacttggaaatttactcttccagagagtaccgacaacagagtggatattccatcgacggacacgaaggcaaaacggtagtcgtcaattcggagcatcatttgaaggcatcttgcaaccgattggatgtattcgttgttctgagtttttagttggtcttttaaccaggtcaagtaaaaatgaaggtcagaacgatccataagtgtctgcgaccaacaagcaattttagcgatgatcctagaagtcatgttggtaataaatccatcctggcggttaagaaggttcaaaaatggaccccaaacagattctttcttttggttggcatattcgtgaaatatctctacacgacttctgttctcctgtaacatatcatcaaccaaaactaaaatgtactgcagagtttggtccttggatacatgccccaaaaggttcaacaatgtttgagcacattggtttctgtcgcttttcaggagagcttctctttttgcactatcagtcacatcaaaagctactatgaagttgtagtcttcctgcgaaatcatttgtgactggaaataggattgccagtttacatgttgatttcttatatctgtagctctttgctgcaatacacttgtagcagccaacatatctgttttgtcatcgtccaaagacgacattatatcctgtattttaggatttgctcccgcaactaaattggatgccatttttttaaattaaaattacaacccttttaatagaagacctaaaaaattaactctgacccaactcccaactggaagtcttgtgatataaattt

SEQ ID NO: 4632 - DNA, 2019 bp, Diabrotica virgifera
aagaccatcacacccaaaattaccatttttgtttttttatgaatctaatggcaattctgagccgtgatagtcctgcattgatggtgcgacttatacaaaaacaataataaagcaattttataaatgtaaggttagattgctctggttatcaccgcacaccactagatggcgctatattgtttgcttcctcaaatttaatgggaaatgtcaaaagttgtatgtattacagtcaatagtatttggtgaaacatagttttttccaaaatatttttgtactgagctctttacaacgatacataaaattggtacaaggctgcgcactattttggaattaactatctaaaaatttgtacagagtaacatttacattattgtgaaaagtgttttctttctgaagttttcatgaaggttctaactactggagataaaaatacttacaggatatccacacaactgattcccaacgataaactaaactaatttaaggcccatcgtatagacatagaccatgatataatgaaaccgaagaatatgacaccacgcatctcctgtcaaatgtcaagtgacgtcaatacgtgacgatcccgacattttgtcatttgttgttgtttgtttctgctatttatataacaggttaaatatttggaaaaactggttgtcagaaacgagttcaattgcctctacaatacctccttatagaaaataattctaaaaatgaccatcattatatagctatttctcaattagaacaaaatgagatcgatactgaaataatctcacagaatggtgaagatgaccataaaagaatcggtagatatggaaacaggaagatataacctaagaaattgtgatcaaactaaaaagccttcacacaaatttccactgcagaacaagttacagatgtgatgaccaaacctctaacgaaaataagattccacatcctctcaaagacggactgatgtagatgcgaaaaacctttctaataacggaaagtattgaaatttagtaggtattaataaggtttttctcattgtattcagtgaatgtcataattacgttagtgtgataataattttaatgaaaacatcactattttaagtgcacatttgcctattttatctttaataatccataattactttatcattacgtttggtaaaaagaaatttaacgtaactaatccgtaattttgttaccagaatggtactctaaataaataataaactcttcatgttatccataggttatttcaaattggtgccgctaactagtcacgtattgacgtcatgcgcagaaccggacgaatttgaaacactttggtgtcatgacataaactatataaaaaagtgtgacaagtgacatcagcctacgtgatcacgcccacaactcaaacttttcttggattctgacatatcatcaaattttaaagggtagaaaaagcattagaggctttggaaaacgccgataaaccgtcaaattgtggacaaatcgtggatattagtgagattagtcaagacgtgcgtcgttttactcttggtttgcagttggtaataagttgtgcgaatatatttactaaattctgctcttcgacctaattacacctgatagctttttatacaaaacttaacattaagctgtgatactgttgtaatactaatagataaaagaaatctcaagaggaatgttcgtttcatacaaaggttttgttggttttatagtttcgcgatcctaatatctcaaattgctaacttaagggggtacggtttgaaatcaacatatcaagcccatttttgtgaattgttttcgaagctatggtgcaattattttatttttaaattaaataaacatattagtacaattcaaagaatacttagaaaaaaaattcaatccaaaatattgaaaaataagccattggtgacaaattttgacaggcagctcacaaaaaaatggattttgcggtgaacatcagaactcgtcactagatcatacgaaacaaaaaattcaaaaagatttaattag

SEQ ID NO: 4633 - DNA, 1671 bp, Diabrotica virgifera
aagaccatcacacccaaaattaccatttttgtttttttatgaatctaatggcaattctgagccgtgatagtcctgcattgatggtgcgacttatacaaaaacaataataaagcaattttataaatgtaaggttagattgctctggttatcaccgcacaccactagatggcgctatattgtttgcttcctcaaatttaatgggaaatgtcaaaagttgtatgtattacagtcaatagtatttggtgaaacatagttttttccaaaatatttttgtactgagctctttacaacgatacataaaattggtacaaggctgcgcactattttggaattaactatctaaaaatttgtacagagtaacatttacattattgtgaaaagtgttttctttctgaagttttcatgaaggttctaactactggagataaaaatacttacaggatatccacacaactgattcccaacgataaactaaactaatttaaggcccatcgtatagacatagaccatgatataatgaaaccgaagaatatgacaccacgcatctcctgtcaaatgtcaagtgacgtcaatacgtgacgatcccgacattttgtcatttgttgttgtttgtttctgctatttatataacaggttaaatatttggaaaaactggttgtcagaaacgagttcaattgcctctacaatacctccttatagaaaataattctaaaaatgaccatcattatatagctatttctcaattagaacaaaatgagatcgatactgaaataatctcacagaatggtgaagatgaccataaaagaatcggtagatatggaaacaggaagatataacctaagaaattgtgatcaaactaaaaagccttcacacaaatttccactgcagaacaagttacagatgtgatgaccaaacctctaacgaaaataagattccacatcctctcaaagacggactgatgtagatgcgaaaaacctttctaataacggaaagtattgaaatttagtaggtattaataaggtttttctcattgtattcagtgaatgtcataattacgttagtgtgataataattttaatgaaaacatcactattttaagtgcacatttgcctattttatcttcaataaatccataattcacaaaagtttatatccattactttatcactacgtttcgtaaaaagaaatttaacataaatgatccgtaattttgttaccagaatgcttccattcttcatgctatctataggttatttcaaattggcgaagctaactagtcacgtattgacgtcatgcgcagaaccgaacgaatttgaaacactttggtgtcatatctggtggcacgtagtggagttgcgcccgtatggaaccacgtacgattgtcttctgacgagctgttgatcttctgaaccctgggctgcagccatcatatcattacaatatgtatttatatttatagatatatccagaaaggtgcattgttactgaaataagtgtcatggatgcattaataaattttttgaaaatctcaaaagcggtactttttacgttttaattatatttttttttaacattgactaaatccatcaactatatttaaagtagggttccaacggaacgtggcgtagcacgctttgagaaataggaaatttataatacactcaccggcac

SEQ ID NO: 4634 - DNA, 2090 bp, Diabrotica virgifera
agattaattgccataaagctcgtgaagttgggtttgcttcaatggctaaaatgacaggtgaaatatttaataatataaaattaaaacgctctgaaaaagtactccctcttttagctgcgagtagcaccgtgaaagttcacgaagaagaagtagctatagatcctgtattattatttcaacgcatgagtatcactgaagcttttgaggatgagattgaaaaattttttgagtatgaattagctccttaccccttatcacttttcgatgcagctggaatgcgtaaaacaacaaagtcagaattatgattgagaaagcaaatttatgattgctttgaatcagtcaatactgaggttgatcgtagaaacgctacttacactattgatggagggtacctactacatcacgttgtgtgggatcgagaagaaacctttagcgttatttttgataaatatgttcagtatctacgcagacattacgggcttacagtgacagtggtatttgacggctacaatgacttgacaaagaatattaaagctgcagaacaacgtcgtcgaactacaaaaacatcatcgggttccgagattatctttgatgaaaatataacagttccagcgaatcaacaacaatttttcgccaatattaataataaatctcgtttcatttccatgttaactgacaaattaacagctgcgaatattgaagtgaacaagctaaaaatgacgcagatgtccttataattgagacagcaattgaaaaatttaaggcaacaaacacaacaattgtagttggtgaagatgttgatttgttgatactgattactgcaaggactccagtagataaagttatttattttctgaaacctggaagggctcaacagcgaacagagatatattcttcgaatagtttatcggcttatcccaaatgccaaaagtacattttatttttacatgcgataactggctgcgacactacgtccgcaatgtacagaaggggcaaaacgtcagtacttaaattattcgaaaaaaaaaaagatttgactgactgctgtacagtttttaagaacttgattcacaccgcaaacaataattacggaaggaattcgctttcttcttgcggtttatggagctccaaaaaaattatttgtcttgataaataccgatacttaacttttgtaaaaaatacgcgaaacaagaaacaagtacaactatcatgtcttcctccaacatcagcatctgcttttcaacatttgtatcgagtatattatcaagttcaaacatggctaggcaatgaactgaatccagaagactggggttggaaattaatagataatactctggaaccgattaaaaccttactcccacctgctccagaaaaactccttaacactattttttgcaattgcaaaaaaggttgcagtgccaaatgtggatgtaaaaaagtcgggttgctgtgttctctagtgtgtaccaactgccaaggtcagtcttgctcaaatgtccagtttagtacaacagaggaagactcctgtgattttaatgaagagaccaatgactcagtcacatttgaacaatttttgaacatccagcaagaggaagaggaagaagatgaaatcgaagaagacttgactgttgaagtagactttcaagaatatgaatctgattaaaatatctaaagaaatcaaaacaatagttaacctaataatcaatagcaatatcaataatcaatatcaataataaggtaatatctagaacttgaccggtattgtttccttaaattatcctaaaattgtcaaaacagttagtggagtaggcctacaggggaaaccacggtaaatataaaacgcgccgagtacactacctcacaggtggtgtggaaacgtgtgcatatcatgtataatgtgactctttgaatcgcgatgtctcaggaatggcggctttaggaaaaggatagtaaggactatttttgtagagaattttaagatctacaactttggtttgaggtttttttttggtagaacttaccgttttcgaaaaatccagaaaatctcaaatgttttgacctttgaccccaatagcttttgacgcacacat

SEQ ID NO: 4635 - DNA, 1584 bp, Diabrotica virgifera
gtgttgaagagcagatgctgatgttggaggaggacatgatggttgtgcttgtttcttgtttcgcgtattttttacaaaggttaagtaggtatttatcaggacaaataattttttttggagctccataaaccgcaagaagaaagctgaaagaaagctgaaatgttaactgacaaattaacagctgcgaatattgaagtgaacaagctaaaaatgacgcagatgtccttataattgagacagcaattgaaaaatttaaggcaacaaacacaacaattgtagttggtgaagatgttgatttgttgatactgattactgcaaggactccagtagataaagttatttattttctgaaacctggaagggctcaacagcgaacagagatatattcttcgaatagtttatcggcttatcccaaatgccaaaagtacattttatttttacatgcgataactggctgcgacactacgtccgcaatgtacagaaggggcaaaacgtcagtacttaaattattcgaaaaaaaaaaagatttgactgactgctgtacagtttttaagaacttgattcacaccgcaaacaataattacggaaggaattcgctttcttcttgcggtttatggagctccaaaaaaattatttgtcttgataaataccgatacttaacttttgtaaaaaatacgcgaaacaagaaacaagtacaactatcatgtcttcctccaacatcagcatctgcttttcaacatttgtatcgagtatattatcaagttcaaacatggctaggcaatgaactgaatccagaagactggggttggaaattaatagataatactctggaaccgattaaaaccttactcccacctgctccagaaaaactccttaacactattttttgcaattgcaaaaaaggttgcagtgccaaatgtggatgtaaaaaagtcgggttgctgtgttctctagtgtgtaccaactgccaaggtcagtcttgctcaaatgtccagtttagtacaacagaggaagactcctgtgattttaatgaagagaccaatgactcagtcacatttgaacaatttttgaacatccagcaagaggaagaggaagaagatgaaatcgaagaagacttgactgttgaagtagactttcaagaatatgaatctgattaaaatatctaaagaaatcaaaacaatagttaacctaataatcaatagcaatatcaataatcaatatcaataataaggtaatatctagaacttgaccggtattgtttccttaaattatcctaaaattgtcaaaacagttagtggagtaggcctacaggggaaaccacggtaaatataaaacgcgccgagtacactacctcacaggtggtgtggaaacgtgtgcatatcatgtataatgtgactctttgaatcgcgatgtctcaggaatggcggctttaggaaaaggatagtaaggactatttttgtagagaattttaagatctacaactttggtttgaggtttttttttggtagaacttaccgttttcgaaaaatccagaaaatctcaaatgttttgacctttgaccccaatagcttttgacgcacacat

SEQ ID NO: 4636 - DNA, 2736 bp, Diabrotica virgifera
  SmartBlast Evalue=1E-101; Info=Ras-related GTP-binding protein Rab11 n=2 Tax=Obtectomera RepID=Q19KB8_BOMMO
cctctgtttcatcttctatcttctcctcaccattacacccttaaaacgcttcataccgataacggtattagataaaactcgtgaaataccggtcccgtccgttactcgctgggatacgatggtagaaagtaatcaagtgtactggttgtagatacaatagtcgttactcgctctgatacgattggtacgaagtaacgagtaatcagagtaatcaaagtaacgatttgcttctctgtataggatccgttactttcagtattagtaagtaacgagtactttgtaacgaatagatactttttcaacatctctaatgtgaacaggcaccatgtcgagtgtgaccagcagtttttgcaacaatgtgaatacaacaaggaagaatttttggattccattattacaggtgacgaaacacgggtgtttcactttatcctcgaagccaagcagcaaccacgtgaatggcatcactcaacttcgctgaagccgaagaaatgtaaacaaatgcagttgactgggaaacttatagtaaccgtcttttgggacagaaaagccatttcatcgactttttgcctcatggaacaacagttaaatcctaaagacattgcgaaacatgaaaaagactgagacatgatccacaacggacggtgaggacgattgcccagtggtgtgaggcttctccatgacaacgctcgacctcatgtcttacatcaaactgaactgatggtggggaattttggctggactgttgtgttccatccccctccacattccaggcctagcaccaaatgattattactgaattatccccaaaattaaaagaacacttgggtggcttacttcactatcgatgatgaagtcaaggaagaagttactcgattcctcaaaagattgtaggtagaattctataacggttcaagtatcgtctgcaaaagtgtttggacagaaatggcgactatctggaaaaatagcgttttaaaagttttaaaaatatgtataacaaaaagagcaaaaataaaactgtctttttttaaatttatgggagtatacgaatggctctagtatatttgggactgctatctagatgacaagtgagctacaaaagttacgaaattactgcaacaaaactgtacatcgtaaacaaatcgagcgactatttaaaacagaattattgcatagtagctatgagaacccaatttgtttatttaaagttttatgtccaacgaggcatctgatttttgggatcatcagtatatagaaaatatcttttgaccaagggaaaataactgttttgttaagatctatgttttaaaaatcttttttgctctcatatcaatgaaaccagggaagttacatttttgtctaaggaaaaaagaaatagatattccagcatattttaatacagtaaaatacacatgatttcaacataatttaacaataaatatgcacctgttgaaggttataaatacaaatagagtatatacgtcttcgattctaagacatacacttttataaacataaataatgtaaacctcttttattatttttaattatatataatattttccatatatattcaaagtagtatcaaatgagagatataattataatgtacaaacttataatggatagcatactaagtgctcagcatataaataaagttttggtggtaatccgcattgccaattgtttagctaaacgagaagtgtagagcttctggtaatacttaaaataaatgataaatagccacagtgagttggacaaggcggcactaccggctgaaatccatatttagtgtaacatgcatattattgctaattatttattattactgacaacactgtttgcgcacgccatcagagttcatagttggttttacatctattggttctacgttttgtggtcggattacgtcaccttccggagggtctctgatctgtttttgggaaacaattctatagatctctgtgagtatattttggaaagcattatcgacattggtcgaatctagggctgaagtctcgatgaagctgaggccgtttctttcggcgaaagccttagcttcttctgtcagcacggcgcgcaaatgcctcagatcggatttgtttccgaccaacatgatcacaatgttctgatctgcgtggtcgcgcaattcgcgcaaccaacgttcaacgttttcgtatgtcagatgtttggcgatatcgtagacgagtagagcaccgactgcaccacgataataggccgccgtgattgctcggtatctctcttgacctgccgtgtcccatatttgtgctttaatagttttaccatccacctgtatacttctggtagcgaattcgacacctatagtagatttagactccaaattgaattcatttctagtaaatcttgacaataagttactttttcctacaccagaatcaccaataaggacaactttaaataaataatcgtattcatcatctttcgtactcatgtttaaatcactaatagtttttcttctttagctacgtttaactctctttaataacacaaaagataaatttaatacatatcagtttcgacgaaaatatcgctttaatattttttactatttatcacagacacattacttccgatacgttcccaaaaaaaagtttggatgttttagatttatttaaaatctctttctactttgttggatatttcaattttagcaaaatggcgtctgttttgttgataatttgtacgcccctttgacaa

SEQ ID NO: 4637 - DNA, 905 bp, Diabrotica virgifera
cctctgtttcatcttctatcttctcctcaccattacacccttaaaacgcttcataccgataacggtattagataaaactcgtgaaataccggtcccgtccgttactcgctgggatacgatggtagaaagtaatcaagtgtactggttgtagatacaatagtcgttactcgctctgatacgattggtacgaagtaacgagtaatcagagtaatcaaagtaacgatttgcttctctgtataggatccgttactttcagtattagtaagtaacgagtactttgtaacggatagatactttttcaacatctctagtgggaagaccacaaaaacgatggaacgacaacttactggaggtacattgaaaaacagacaagagtctagtagttgtacctcgaaaatgcattgcctggtggtattttatgaatttaagagtactaagaataaaaaataatttatatattccttcctagaactcttctaattctttaagatattatggaactttatagctgctctatacaacactttacgagatgtaacacatttttctccccaacagattattgttcactaatattttacatacatttacataataaacttcaaagaagtcagtcttcaaaagtattactaaagttctcacaatttcaaaacaaatttgaatacaagaagaatcaaaggtgcacattccaatttaaatatactacataccacgtctacttgttgctctatatgtttgtacacccttgatttaaacaaatatgttctcataatacttgtttttatattattattttggtagagcaccaattgactatttcaaacttaaagcgtacaaaatgttccaaaatgaagtgattcaaggtggtagaaaactgatttagctaatggtaaataaagcacggt

SEQ ID NO: 4638 - DNA, 2120 bp, Diabrotica virgifera
  SmartBlast Evalue=9E-32; Info=Probable RNA-directed DNA polymerase from transposon X-element n=1 Tax=Drosophila melanogaster RepID=RTXE_DROME
ttagaatcagtatgtttgtaaattgcaagcgggtttgccattctgtgaattttcataaataaatcttcctttagtattccacagcagttaacagcgataatcctctacaagtacctgcctaatactacctttcacggctgataccgtggacagcggcaacgttgtcactaagattctcatttagtttgcattggaggtctcctccatacactgaatctcatgtctgaaactgaaacgcggtatagatggtttgttgatcgggtaagttatgaaataagccatttggaagcaaggcggttcactacgtttaccaaagttcaaaaaatttctattaaaataataatgtatttctctaatgtctacaatagttcagtggcacacaatatttcttgagtaaaatttctattaaaataataatgtatttctccaatgtctgcaatatttcagtgacacacagtgacggaataagccatttggaagccagatggttcactatgtttaccaaagttcaaaaaatttctattaacctgggagcagtcatgctcacttctgtcatgtaagcagtcgtgcgcagagaaaaaatctcacaataagaatttaagacaaatttctattttataatatttttatttacttgttatgttaaaaatatctatttctaacaatgttaaagctaattggttctcaccaaagccataaattcaaaaaaaaaataaaagaaaattcccacgcattactacaatcttcctcgaggcacttacgagtggaaagttatgttgcaaaacttttcatcaagttatcacggaaaagaataaaatgttatgattttttctaaccgcgcgactgcttccggattaaaataataatatatttctccaatatctacaatatcactcctctcaccacgatccaaatacagcatgcagaacccttcagaaagaccttaataatatacaaatatggcttaaaaaatggaagataaaggcgaatgagagtaaatccatccatgtaaccttcacgatgagaagacaaacatgtccatctgtaacactaaatgaaacgcaactcccacaaaccgatactgtcaagtacctaggaatccatcttgataagagattaacttggcaaaaacacatttttacaaaaagcaaacgactaggaataaaatttcgagaaatgtactggatcatcggtcgtaaatctcaactatcacttgaaaacaaactgctgatatataaaactatattaaaaccagtgtggacctatggtatccaactttgggggacagccagtcaaactaacctagaaatactgcagagatttcagaacaatgctgaatgccccttggtacgtgccaaactatgtgatagagaaagacctcaatgtgccatccataaaaacagtaataacggaatattacaaaaaatattccaagagactagaatctcatccaaacgagttagccagcaacctcactgatgatcacaatgatgtacgacgcctgaagagattcaaagtagtggacctagcaagaagattcaaataatctgtgataactaaactttttgttttaatttaatttatgtaaagagggtgatcactggatctccctctacaggtcaaattttcaatttttatcaaataatttacctattgttcttagttgaggacagattgtaaatattacaacattaaaaaaaaagttatcacggaaaaggataaaatgttagattttttcaaaccgcgcgactgctcccggattaaaataataatatatttctccaatatctacaatatttcaatgacgcacaacatttcttgagtaaaatattttcatcagtggcgactcgtgatttttaccaggggaggctatacctaactgtaaaatatctagacaaatttgcactagcaaaaaaaaatccgccgaaaaaatctaatttaagtccccatttttttgaccattttttatttacattttataatatcatcataattcataatatcatatcattttaaaagtagttagtcaaattgtaaaagtgtgttaccaaagtttgtgtcgtttatttgttaacaaatctatctctgtaagtagatatgcatatcaaaataaatacaga

SEQ ID NO: 4639 - DNA, 1456 bp, Diabrotica virgifera
  SmartBlast Evalue=1E-49; Info=Probable RNA-directed DNA polymerase from transposon X-element n=1 Tax=Drosophila melanogaster RepID=RTXE_DROME
aactaaagaaaaaccttccccatcctttttatcaaatcctaaaaagctatatttccaaccgacatttcctagtcaagcaggataatgaatacacaagcctaagaccaataaaagccggagtaccacaaggaagtgtcttgggaccgatattgtacttgctctacactgctgacctacccacaagtaacagaacaacgtgtgcaacttttgctgattacactgctgtactagcctctcaccacgatccaaatacagcatgcagaacccttcagaaagaccttaataatatacaaatatggcttaaaaaatggaagataaaggcgaatgagagtaaatccatccatgtaaccttcacgatgagaagacaaacatgtccatctgtaacactaaatgaaacgcaactcccacaaaccgatactgtcaagtacctaggaatccatcttgataagagattaacttggcaaaaacacatttttacaaaaagcaaacgactaggaataaaatttcgagaaatgtactggatcatcggtcgtaaatctcaactatcacttgaaaacaaactgctgatatataaaactatattaaaaccagtgtggacctatggtatccaactttgggggacagccagtcaaactaacctagaaatactgcagagatttcagaacaatgctgaatgccccttggtacgtgccaaactatgtgatagagaaagacctcaatgtgccatccataaaaacagtaataacggaatattacaaaaaatattccaagagactagaatctcatccaaacgagttagccagcaacctcactgatgatcacaatgatgtacgacgcctgaagagattcaaagtagtggacctagcaagaagattcaaataatctgtgataactaaactttttgttttaatttaatttatgtaaagagggtgatcactggatctccctctacaggtcaaattttcaatttttatcaaataatttacctattgttcttagttgaggacagattgtaaatattacaacattaaaaaaaaagttatcacggaaaaggataaaatgttagattttttcaaaccgcgcgactgctcccggattaaaataataatatatttctccaatatctacaatatttcaatgacgcacaacatttcttgagtaaaatattttcatcagtggcgactcgtgatttttaccaggggaggctatacctaactgtaaaatatctagacaaatttgcactagcaaaaaaaaatccgccgaaaaaatctaatttaagtccccatttttttgaccattttttatttacattttataatatcatcataattcataatatcatatcattttaaaagtagttagtcaaattgtaaaagtgtgttaccaaagtttgtgtcgtttatttgttaacaaatctatctctgtaagtagatatgcatatcaaaataaatacaga

SEQ ID NO: 4640 - DNA, 1853 bp, Diabrotica virgifera
  SmartBlast Evalue=6E-52; Info=Pol polyprotein n=1 Tax= Schistosoma mansoni RepID=Q6IFU0_SCHMA
gtttgaaagaatagctttggatattgccgggccatttccagaaagtgacaatggatgcaaatacatgttggtggtaatggattacttcacgaagtgggtggagatctacgcaattccagaccagaaggccgccactattgcagatgtgttaatcaaagactgcatcagccgatttggagtacctctggagatccatagtgaccaaggaaggaactttgagagcgatctatttcaaggaatctgtgataaactaggcatgaagaagacaagaaccacggcctatcacccgcaatcggatggaatggtggagcgtatgaataggacagtcggcaagtatttgacaaagatggtgtccaatcatcaacgagactgggaccagtaccttccgttcttcgcaatggcctatagatctgctgttaatgaatcaactggccaaacaccagcaaaagtcctatttggacgtgagatgcgtctaccctgtgatctagagtttggatgtcgacctggagaagatgttgctggtgaggattacgtgaatgaattacgaagaagaatggacgatatacatgagttggtccgttctaatcttcagatcgctagcgaccgaatgaagaaacgatacgatacccaagctgagaaggggatgtttcaaggagaacgacaaagtctggctttataatccaaagaagcgaacaggttgttctcccaagttgcagcagttctgggaaggtccgtacctcattgtcaagaaaatcaatgacgttatctaccgaataagcaagattcctaggggaaagccgatgatagtccaccataaccggttggcgccgtacgagggagaccacgacgtagatgaagaagtggaagtcaaccaagttcgagaaatacctgaccttacctttgaagagttcatgggtgcctacggaggtaccggtaaagcaagacatggtgttaccactgaagaaaagcgagatcttctcgcacttcccgatgactattcgctggcccatacctatcccggccagtatcaaagacgcacgagggttggcatccgccttccgaaggaagtttggtcgagttgcagaacttcaatgccaactgccagctcctggcaaagcattgaaactccaagatgcatcacgttacctattctatctggtaacaaaagacactgtccgtgaccaacctacctaccaagatgtatgggatgcattaattcaattgagagagcacgtgttggagtccgacgtgcaaaagttagccatgccaaagttagaatgcagccaattagactggagagttatccgaaatatggtagaagaaattttccaagacaccgaggtccaggtgttagtctgttgcaatccgcatagttactggtgcggagagaagaccgtcccctgtcacttttatacaactgggagttgtaaaagagggtccagttgcagataccagcatccagttccagtcccgacaaggttccaggaggaaccatcttttaaggagggggcaatgtgacactatttagtccgctcacgaattggcctatttcttcccgaagcttctcggcgttacgagacaataccattcctatccatggcgttcgagacgaccgctgccgaagtatatatagaaccgagattcgagcacaggccagtcattcattcattgaagcgcgtcgcgtaatttattgtattcgaatcgaagatatgaaatgtatttattagttatcggaattattatgtttagttaattaaatcataaatttgagtttgtaaataaattagatgtgttagttggtgttatttgtaattattaaaataaataagtgacgtaaataaaataatataagt

SEQ ID NO: 4641 - DNA, 1703 bp, Diabrotica virgifera
  SmartBlast Evalue=5E-52; Info=Pol polyprotein n=1 Tax= Schistosoma mansoni RepID=Q6IFU0_SCHMA
gtttgaaagaatagctttggatattgccgggccatttccagaaagtgacaatggatgcaaatacatgttggtggtaatggattacttcacgaagtgggtggagatctacgcaattccagaccagaaggccgccactattgcagatgtgttaatcaaagactgcatcagccgatttggagtacctctggagatccatagtgaccaaggaaggaactttgagagcgatctatttcaaggaatctgtgataaactaggcatgaagaagacaagaaccacggcctatcacccgcaatcggatggaatggtggagcgtatgaataggacagtcggcaagtatttgacaaagatggtgtccaatcatcaacgagactgggaccagtaccttccgttcttcgcaatggcctatagatctgctgttaatgaatcaactggccaaacaccagcaaaagtcctatttggacgtgagatgcgtctaccctgtgatctagagtttggatgtcgacctggagaagatgttgctggtgaggattacgtgaatgaattacgaagaagaatggacgatatacatgagttggtccgttctaatcttcagatcgctagcgaccgaatgaagaaacgatacgatacccaagctgagaaggggatgtttcaaggagaacgacaaagtctggctttataatccaaagaagcgaacaggttgttctcccaagttgcagcagttctgggaaggtccgtacctcattgtcaagaaaatcaatgacgttatctaccgaataagcaagattcctaggggaaagccgatgatagtccaccataaccggttggcgccgtacgagggagaccacgacgtagatgaagaagtggaagtcaaccaagttcgagaaatacctgaccttacctttgaagagttcatgggtgcctacggaggtaccggtaaagcaagacatggtgttaccactgaagaaaagcgagatcttctcgcacttcccgatgactattcgctggcccatacctatcccggccagtatcaaagacgcacgagggttggcatccgccttccgaaggaagtttggtcgagttgcagaacttcaatgccaactgccagctcctggcaaagcattgaaactccaagatgcatcacgttacctattctatctggtaacaaaagacactgtccgtgaccaacctacctaccaagatgtatgggatgcattaattcaattgagagagcacgtgttggagtccgacgtgcaaaagttagccatgccaaagttagaatgcagccaattagactggagagttatccgaaatatggtagaagaaattttccaagacaccgaggtccaggtgttagtctgttgcaatccgcatagttactggtgcggagagaagaccgtcccctgtcacttttatacaactgggagttgtaaaagagggtccagttgcagataccagcatccagttccagtcccgacaaggttccaggaggaaccatcttttaaggagggggcaatgtgacgaatttctaactgaggccggccctgcccctagtagtcaacaaacaacagcgacacgtcatcgacgagtattgtctccgctaatccagaagtttccccgatgataggcgtggacccgcctcaggccttcctgactgttctcgaagcagagccgtatctatataagcggatgattttaagcagcag

SEQ ID NO: 4642 - DNA, 1796 bp, Diabrotica virgifera
  misc_feature (61)..(63): n is a, c, g, or t
  SmartBlast Evalue=2E-11; Info=Endonuclease-reverse transcriptase n=1 Tax=Bombyx mori RepID=D5LB38_BOMMO
ttatcaaacaatttatattactaatataatatacaggagacgatatcacaatgtagtatannntatatactaggtaaaattaacaaagcaaaactgcatataaaacatttttaaaatcttcagactttatttctataacctttatgtctttaaaatatgtacttagtcactcgaatctcttacaaatgatcttcttgtagatataattagccttccagtgcaatttagatttatttttaacaaataatttaaaaatgcataatagggcttttcaacgcttctcatttgtgtcggacacttgtcatatgaagggtgaaggaaaaaaacagggaatgtcacactttataagaaattgagatagtgacactatctaacagatattttatgtatttactatttacagtagactggtagataataacttggaccgtccgataaatatgcctagttaaaatagtactgcgaaggataaaaactggaaatgtccacgcgtgaaaggtaaaaacaaggagagtccacttgaacagaaacaaattagctacgtttttatttcgagtttaatcgtttagtttcctttgtttatgtttgttagaaacatcttcataacgtgcctgtccgttccgaacgttgacgatcattctggcgatgatgactttgttgctatacggaatagttgtgttgagatctttctataccatgctctcaggttagcaaggcaggatattcttcgtcctggggctctttttccttcaatgttaccttgtaaactggattggagtagctcgtatgtgcattgatttctcattatatgtcccaagtactgcagcttactgttcttcactatgttgaccaaatctgcggttgtgttcatcatttgtagccgtagtacttgttcattggtgactttgtctgtgcatggtatcttcaggatccttctgtacaacttcagctccaaagcctgaagtgttagaacacggccaatgaagttacagttaagcgtaatggagtttcccaagaaattaatgtgtgttttaaagcattcatgtcaacacatggcgtaactaagggcaaaattgaacacctacaaaaaaatttaaaagctgcaggaacttttggacaagacaaacgtggtaaacgtagttcccagcatagaaagttgcatccagaatcgcgtgaagcaatatattataaccacaaagtcttttaaaactagattatcccattacagtttacacgaatctagtatttaccagagagtttgaatattacaaaaatgttcaacttgtttaaagaaaaacatccgaccaataaagtttattacgttacatatcggcaaatttttaacacgaaatttaatttgtcctttggttacccaagatcagacaaatgttcagcatgtgatgaattccagacgaaattaaaatcattaaaattatgacaaggttgctacagagattcgtaattaacaattcaaaatgagttacacaaacgtaaggcacagacattctataattttaaaaaggctgctagcaaaaagtcaaaaaaatcaggcgaccattgcattagaccaccaaaaaaatattgcattgccctttgttataatctttattgcaatttttgttggaataattttgttttcagcctttctatcagctggcgcaactaatgtttgtaacgtaaagtaatattgtaatgtaaaatacaacgtgacatttggacagtccttgtttttttcagtttttatttgtagttaggtacttttttaatttttttatctctgttctttgaaaatttga

SEQ ID NO: 4643 - DNA, 1765 bp, Diabrotica virgifera
  misc_feature (61)..(63): n is a, c, g, or t
  SmartBlast Evalue=2E-11; Info=Endonuclease-reverse transcriptase n=1 Tax=Bombyx mori RepID=D5LB38_BOMMO
ttatcaaacaatttatattactaatataatatacaggagacgatatcacaatgtagtatannntatatactaggtaaaattaacaaagcaaaactgcatataaaacatttttaaaatcttcagactttatttctataacctttatgtctttaaaatatgtacttagtcactcgaatctcttacaaatgatcttcttgtagatataattagccttccagtgcaatttagatttatttttaacaaataatttaaaaatgcataatagggcttttcaacgcttctcatttgtgtcggacacttgtcatatgaagggtgaaggaaaaaaacagggaatgtcacactttataagaaattgagatagtgacactatctaacagatattttatgtatttactatttacagtagactggtagataataacttggaccgtccgataaatatgcctagttaaaatagtactgcgaaggataaaaactggaaatgtccacgcgtgaaaggtaaaaacaaggagagtccacttgaacagaaacaaattagctacgtttttatttcgagtttaatcgtttagtttcctttgtttatgtttgttagaaacatcttcataacgtgcctgtccgttccgaacgttgacgatcattctggcgatgatgactttgttgctatacggaatagttgtgttgagatctttctataccatgctctcaggttagcaaggcaggatattcttcgtcctggggctctttttccttcaatgttaccttgtaaactggattggagtagctcgtatgtgcattgatttctcattatatgtcccaagtactgcagcttactgttcttcactatgttgaccaaatctgcggttgtgttcatcatttgtagccgtagtacttgttcattggtgactttgtctgtgcatggtatcttcaggatccttctgtacaacttcagctccaaagcctgaagtgttagaacacggccaatgaagttacagttaagcgtaatggagtttcccaagaaattaatgtgtgttttaaagcattcatgtcaacacatggcgtaactaagggcaaaattgaacacctacaaaaaaatttaaaagctgcaggaacttttggacaagacaaacgtggtaaacgtagttcccagcatagaaagttgcatccagaatcgcgtgaagcaatatattataaccacaaagtcttttaaaactagattatcccattacagtttacacgaatctagtatttaccagagagtttgaatattacaaaaatgttcaacttgtttaaagaaaaacatccgaccaataaagtttattacgttacatatcggcaaatttttaacacgaaatttaatttgtcctttggttacccaagatcagacaaatgttcagcatgtgatgaattccagacgaaattaaaatcattaaaattatgacaaggttgctacagagattcgtaaattaccaattcaaaatgagttacacaaacgtaaggcacatagattatatatcattttaaaaaggctgctcgcaaaaaaatcaaaaaaatcaggcgaccattgcattagactatcaaaaaaatattgcactaccttgtgttataatttttattgccatttttgttgccatagttttgttttcggcctttctatcagcttgtgcaaataaatgtttgtaacataaaataaaaatgtaatgtaaaatacaacgtgatttttggacagtccttgtttttttcagtttttatttttagttagatattt

SEQ ID NO: 4644 - DNA, 1804 bp, Diabrotica virgifera
  SmartBlast Evalue=0; Info=4-aminobutyrate aminotransferase n=1 Tax=Aedes aegypti RepID=Q16LL9_AEDAE
cgaaaaacaacttgtccgagctatattactaaaatacccgcatacatgatacgaatacacacttgattattatttccccacgaaggtgaatgtttttagacgcgtaattttcaattgaataaaataaagcatcgcgtgttctgctttattgctgttgtttttcagtgcgttgatattcgaatcatgtgggccaagtctctaaccacggtagttcaaaatgcagctaaaacaagtggtgttcgggcggcttctacaattttacccggggagcccaaagaaccaatcgtagtcacctcggaaatacctggaccaaaatcgaagcagctcatttcagaactagatactgtgacacaaagtggaactatacaattttttgccgattaccaaaattccattggaaattacatagcagatgtggatggaaataaatatttagatatatttatgcaaatttcatcgatgcctctaggatacaaccacccagaaatgttaaatgttttcaaagatgaggagagtctgaaagttttagtcaaccggccagcacttggtgctttccctacagaatattggccgaaaaaactgaaagaagttctgatgtcagtgtcaccaggtctaccaaatgtaatgacgatgatgtgcggctcgtgttccaatgaaaatgcctacaaatgcttgtttatggcttacagaaagcatcagagaggagaagatgtagatttttctgagttggaaaaatcttcatgtatggtcaatcaacctcctggtgctccaaacctatcactactttccttccatggcggtttccacggcagaaccataggcactctatctactacacattccaaggctatacacaaactggatattcccgcatttgactggccagtggcgccttttccaaagtataagtatccattagaacaaaacgagagggaaaatcgacttgaagatgaaaaatgtttagctgttgtagaagaactgattgagaaatacaacaagaaaggttgcccagttgctggtataatcatcgaaccgatccagtccgaaggaggagacaatgaagcatctcctgaatttttccaacaactacaaagaattgcaaagaaacatggcgctggctttttggtagacgaagtccaaacgggtggaggtgcaactgggaaaatgtggtgccacgaacattttaacttagacaatccaccagatatagttacttttagcaagaaaatgcttactggaggattttaccataacttagatcataagccaacacaaacttacagaatctacaatacctggatgggagacccaagcaaactactactgcttgaatcatacctgaaagtggtgaagcagcaaaaccttttggatcaagtaaacactgtaggagctaagctaaaggctggtctacatcaatgccaaaatgaatttccgtattaaattctgtcagaggaaggggatcatttttggcagtaaatttggaaacctcggctttgagagacaaagtagtggctaacttaaagaaaaagggtatacttactggaggatccggagaattggccataagatttagaccagctttgacactacaagaaaaccatgtaaacatattcttggatcgattcaagcaagtcctcaaggaattaaactaggatgattttacagacgacgatttaatacaatgatagaccaggaaggatctgttttgaggtggatgtgagaggtggcattcggatttttgcggataaagttaggtgataacttctttaataataattgacttatgctccttctcaaatatgcc

SEQ ID NO: 4645 - DNA, 1729 bp, Diabrotica virgifera
  SmartBlast Evalue=0; Info=4-aminobutyrate aminotransferase n=1 Tax=Aedes aegypti RepID=Q16LL9_AEDAE
cccacggaggtgaatgtgtttagacgcgtaatttcaattgaataaaataaagcaccgcgtgttcagctttattgctgttgtttttttcagtgcgttcatattcgaatcatgtgggcgaagtctctaaccacagtagttcaaaatgcagctaaaacaagtggtgttcgggcggcttctacaattttacccggggagcccaaagaaccaatcgtagtcacctcggaaatacctggaccaaaatcgaagcagctcatttcagaactagatactgtgacacaaagtggaactatacaattttttgccgattaccaaaattccattggaaattacatagcagatgtggatggaaataaatatttagatatatttatgcaaatttcatcgatgcctctaggatacaaccacccagaaatgttaaatgttttcaaagatgaggagagtctgaaagttttagtcaaccggccagcacttggtgctttccctacagaatattggccgaaaaaactgaaagaagttctgatgtcagtgtcaccaggtctaccaaatgtaatgacgatgatgtgcggctcgtgttccaatgaaaatgcctacaaatgcttgtttatggcttacagaaagcatcagagaggagaagatgtagatttttctgagttggaaaaatcttcatgtatggtcaatcaacctcctggtgctccaaacctatcactactttccttccatggcggtttccacggcagaaccataggcactctatctactacacattccaaggctatacacaaactggatattcccgcatttgactggccagtggcgccttttccaaagtataagtatccattagaacaaaacgagagggaaaatcgacttgaagatgaaaaatgtttagctgttgtagaagaactgattgagaaatacaacaagaaaggttgcccagttgctggtataatcatcgaaccgatccagtccgaaggaggagacaatgaagcatctcctgaatttttccaacaactacaaagaattgcaaagaaacatggcgctggctttttggtagacgaagtccaaacgggtggaggtgcaactgggaaaatgtggtgccacgaacattttaacttagacaatccaccagatatagttacttttagcaagaaaatgcttactggaggattttaccataacttagatcataagccaacacaaacttacagaatctacaatacctggatgggagacccaagcaaactactactgcttgaatcatacctgaaagtggtgaagcagcaaaaccttttggatcaagtaaacactgtaggagctaagctaaaggctggtctacatcaatgccaaaatgaatttccgtattaaattctgtcagaggaaggggatcatttttggcagtaaatttggaaacctcggctttgagagacaaagtagtggctaacttaaagaaaaagggtatacttactggaggatccggagaattggccataagatttagaccagctttgacactacaagaaaaccatgtaaacatattcttggatcgattcaagcaagtcctcaaggaattaaactaggatgattttacagacgacgatttaatacaatgatagaccaggaaggatctgttttgaggtggatgtgagaggtggcattcggatttttgcggataaagttaggtgataacttctttaataataattgacttatgctccttctcaaatatgcc

SEQ ID NO: 4646 - DNA, 2612 bp, Diabrotica virgifera
ggcccagtagatcccaatttaaaaatacaactcatataaaagttatcaaattacatcttacttaacatagctttaaaattcagacctaacttaagtaacataatctataatcttataaaatttcactgtatttattactattcaagtaaaatctgtaatgttaaattaactaatgatcttgtaaataaaaaatcaatacaggtacaaatcaagaatgcatgtgagctacaaaaattgttaataaaaaatgtttaatcagttctttttttttgaaggaaaatactcctgagtctccatttttcgcttcttcgtaatgttctttgccttattattaacttcttccagaattccttgagtcctccttataaattcggtaaaaccttggtcatctaatccgttcaacacattaatgagatattcctgttgaagacttcttttggttttttcctgggtcacatttgtctgttctagcttccctctgacaaattcattaatttcctcctcatgccttgatttgatagttgacatttctcctaaacaccttgcagcatcatctacaacagagttactacccaaacgctcctcatacattcttaccaagtgcacatgctgacacaaggtattcctcaccatatagtcatcacaactacaccaataacggtgaatacaaatcttacacactctacaaaacaatgtcttacactcactctcacacacttgtctaaaatttacataacgtaatatattcatacctttaaaggattttacctcataatggccatatgcagtctccttaaccagttcttctagtttgcctttcatcgatgctgcccgtttgtgtgctcttattgaaagcctgtcttgataattatttgcgcttggtcgtattatatcaactatcctcgtccacattttttcttcaactagctcatccattgtatccagtagcttctcaatccccactgctgcatttctctttaggtaattcgtctttagtagattgttgagtgattcaattgccatgttggtattaatcccggcatttcttctgtaacaatagggccacaatttttttctgtgttcagccaagtattgtcttttcagataatcgacaaattctatctcatttgcctcttctagtttggatacatatttgtcacatagttctttaaatttatcttcatctggttctcgaataatctgcctgagttcatttttcatttgcgccttcaaagttggatcctgtaattttttctttcctctaatgttccagttcttcaccacatgccacgtacataatagtctccttggttcttgtctcattatcttcttccatgcattataatatttaggatcatcatcactcatgaaatattccgcattaacttctgtctgtatcttattcttgagggcatctaaaaaaacttcttgaattcgttggtccaatctatttgacagaaggaacgcaacagggaatccagcatttctatcgtctttcaccagcaaaatcgtcaaatccagtccttttttatttgtcccatgtgtcccatcgacacaaattatgttcgggaattctagtagtttctcttccatcaccgcattcatgaaccctaccgcaaaatcttcttttctcaatatatcatgatcttctccttccttcttgaataagaaagcataattcttgttgttagcattccattcctgaacctttagggctgctgctatcatatcattttgatctcgtttcttgtgtatattatactttctggtcaaatttctgagatcctgacttgttattacagcaagtctatctaattgtggtacttccaattttcttgaatcttttaaaattctagtgggtggcaccccagccattaatttttctacaaccgttttttcttctgcttttgacagatgcattgttcttaattcttctttatgtccaacatgtgttttccaataactgacagaaacttgtccttggtctctcagtttgcaagccagtctggaagggcacactccttttattctaattgatccaccagatttctctgtcctaattttatagttgggcttatatccatgtatgtcacttctattgcaatcatagtacattatcttatgttcctttccacggattgttctactacatgcataacttgtctcaattttctgcatatctttccatgtctcatattcttgtttgctagaaaattcaaaagttattagttcaatactcagctggtggcagtcctggagatgttttcgtaatttctcatgactttcaaaattagtttcttgatcacataacggacaaatgatgcgattttgattcattttgttgttagccctgagcggaacatctgttttgtgtattcttttgatatgacgatttcgtaattccacatttttaaatattttgctgcaaagatggcaggctcctggaagagaacttgttgaagtagatgggtaggtagaatccataattgctaaaaagtcttgggtaattaaattaggtgttctaacgaacagatttttaaaacgattgaacaaattaaaaacaaaaatagaaatgaaaaaagctaaaattgaaattttgtatgtgtatgtat

SEQ ID NO: 4647 - DNA, 936 bp, Diabrotica virgifera
ggcccagtagatcccaatttaaaaatacaactcatataaaagttatcaaattacatcttacttaacatagctttaaaattcagacctaacttaagtaacataatctataatcttataaaatttcactgtatttattactattcaagtaaaatctgtaatgttaaattaactaatgatcttgtaaataaaaaatcaatacaggtacaaatcaagaatgcatgtgagctacaaaaattgttaataaaaaatgtttaatcagttctttttttttgaaggaaaatactcctgagtctccatttttcgcttcttcgtaatgttctttgccttattattaacttcttccagaattccttgagtcctccttataaattcggtaaaaccttggtcatctaatccgttcaacacattaatgagatattcctgttgaagacttcttttggttttttcctgggtcacatttgtctgttctagcttccctctgacaaattcattaatttcctcctcatgccttgatttgatagttgacatttctcctaaacaccttgcagcatcatctacaacagagttactacccaaacgctcctcatacattcttaccaagtgcacatgctgacacaaggtattcctcaccatatagtcatcacaactacaccaataacggtgaatacaaatcttacacactctacaaaacaatgtcttacactcactttcacatacttttcttaaacctacattatataattcattcggatccacaaaggattttacctgaaactgcccatataacttcacattcttcttaatcagttcttccattttgtatttcatcgattcttaccgttgcaagagttgaagaattcctttataggataatgctactcatttagctacgttaaatggaccacatttaagctgaaacataaaaccccaacacaa

SEQ ID NO: 4648 - DNA, 1775 bp, Diabrotica virgifera
  SmartBlast Evalue=1E-146; Info=Major facilitator superfamily domain-containing protein 1 n=1 Tax=Culex quinquefasciatus RepID=B0W5R5_CULQU
gataaaatatattttaacatttccatttaatatgcaaaaacacaaaaataataaatatttaaaaataaacaaatatacatatttttaataaaacttattacttttaattgataaaattgaataacttatccattgaaataataaatatccattaattatctctgtttaatcactaagaagtaacaacatcaactttccctcctggatgttcccctttgctttctctttctatatgatgccttgaccttcctccaggagtcttgtttagcagtccattatcaattctatccaggaataagagtcccaccgaagaaataaaagccgctattaaacttgctatgaaaaagatttctacgccggtatatccaaatttgtcaattattagaccacaaaatatattaaagagggccaatcccagattttgaatcgaaccagctactccatatgcagttccaagctggtactcaggtatgatcaaggataccagaggccacagactactggctaaaattgagtaagccaaacccatgatggctatagcaacataaggactaatgttggtaaatccgagtagaacgtgtgatagagttgtcccagaaacccccaccaatatccaatatatattcatacctgatttatcgactagaaaacctaaaatcggcgaagctacaccggagataatgtacacaatactgcttatatcatttgcttgttccgaagtataaccaaaccgatcttcgaagaattgctttgctatcgatatgaatggaaagatggcgcagtaaaacgttacgcagatgacgcaaacaagccaaaaagccagcgagaagtccttgacgtctgtcaattttacggtttctccagatggattattgtttcggcccaaaatggtttcggaacgtttgtcgaaaattgccatcacaatagcacatatcattgatacgatacaagtacaggcagcgatatacagcacaagtcctataatgtagtgtccgtctgaagttattttggaaacagctgagtacaagctttccatcaccaagaagttcactgtactgccaaccctagcaaaactgagctgaagtccgaaaaccatgttcagttcttttcctttgaaccacagcacggcgtaattattttgagcaactgtcaaggactctgctccgattccgaaaacgaatcgcccaataagcatcatccaatattgaccagttgtggcagctgtagcaaaaattaattgtccgagaagagttaaactcatatagacaattgttccccatcttataccaaacactcgatctataaggaaacctcctataatatttaatacaacattgggccaagaatatactgaatataaagaggtatattgcacctcagataaatctaggttttcttttattttatcttgtaaggcagcagggttatcataacaaaaataggaaccaaaacttaggaaacacatgaatattaaagctataaacctatggccagaacctaaggggtgacaaaggaaattaaagaaaccccggggagctacaggttcatcatccttttcttgaatatttggtccaccttccattttaaaattatatttgattcagttgtttcttatcactgttaacttattattacaattaaaatatattctctgctgcttaagtatcccgcatatgatgctattacttagcaattatcactgtaagtgaatgttgactaattaatactaatttttcttttgttgttggacacattcccactaacctaatcttttg

SEQ ID NO: 4649 - DNA, 1746 bp, Diabrotica virgifera
  SmartBlast Evalue=1E-146; Info=Major facilitator superfamily domain-containing protein 1 n=1 Tax=Culex quinquefasciatus RepID=B0W5R5_CULQU
gataaaatatattttaacatttccatttaatatgcaaaaacacaaaaataataaatatttaaaaataaacaaatatacatatttttaataaaacttattacttttaattgataaaattgaataacttatccattgaaataataaatatccattaattatctctgtttaatcactaagaagtaacaacatcaactttccctcctggatgttcccctttgctttctctttctatatgatgccttgaccttcctccaggagtcttgtttagcagtccattatcaattctatccaggaataagagtcccaccgaagaaataaaagccgctattaaacttgctatgaaaaagatttctacgccggtatatccaaatttgtcaattattagaccacaaaatatattaaagagggccaatcccagattttgaatcgaaccagctactccatatgcagttccaagctggtactcaggtatgatcaaggataccagaggccacagactactggctaaaattgagtaagccaaacccatgatggctatagcaacataaggactaatgttggtaaatccgagtagaacgtgtgatagagttgtcccagaaacccccaccaatatccaatatatattcatacctgatttatcgactagaaaacctaaaatcggcgaagctacaccggagataatgtacacaatactgcttatatcatttgcttgttccgaagtataaccaaaccgatcttcgaagaattgctttgctatcgatatgaatggaaagatggcgcagtaaaacgttacgcagatgacgcaaacaagccaaaaagccagcgagaagtccttgacgtctgtcaattttacggtttctccagatggattattgtttcggcccaaaatggtttcggaacgtttgtcgaaaattgccatcacaatagcacatatcattgatacgatacaagtacaggcagcgatatacagcacaagtcctataatgtagtgtccgtctgaagttattttggaaacagctgagtacaagctttccatcaccaagaagttcactgtactgccaaccctagcaaaactgagctgaagtccgaaaaccatgttcagttcttttcctttgaaccacagcacggcgtaattattttgagcaactgtcaaggactctgctccgattccgaaaacgaatcgcccaataagcatcatccaatattgaccagttgtggcagctgtagcaaaaattaattgtccgagaagagttaaactcatatagacaattgttccccatcttataccaaacactcgatctataaggaaacctcctataatatttaatacaacattgggccaagaatatactgaatataaagaggtatattgcacctcagataaatctaggttttcttttattttatcttgtaaggcagcagggttatcataacaaaaataggaaccaaaacttaggaaacacatgaatattaaagctataaacctatggccagaacctaaggggtgacaaaggaaattaaagaaaccccggggagctacaggttcatcatccttttcttgaatatttggtccaccttccattttaaaattatttttgattcagttgtttcttatcactgttaacttattattataaaatctattctctgctgcttaagtatcccgcatatgatgctattacttagcaattatcactgtaagtgaatgttgactaattaatactaatttttcttttgttgtttgac

SEQ ID NO: 4650 - DNA, 1753 bp, Diabrotica virgifera
  SmartBlast Evalue=1E-140; Info="Alpha-1,3-mannosyl-glycoprotein 2-beta-N-acetylglucosaminyltransferase n=1 Tax=Camponotus floridanus RepID=E2AZ38_9HYME"
aagtatattttctacttattcaatagttgagaaaaaatttttaattacaaaacatgtaataacaacatacaataaaaaactattacatatcacaaagaaaataaagtaaaaccttattactgaaatataaacatagtggaatattgttctatggaaaagtggataaacctaactccacgtcggatcatagcccttccaattatttgacggtgtaaagtgtaccattatcccgttgtagtgaaaggtaacaattcctttataagaagttcttggaatgccacttttaaagtcatccataagtcctaattttttagtaatagttttatattcttctttagttctatagataattcgaacaggcgtattaaatttaacctgcttcagttcttcaaaacttataactgggctctggtaaacttttttaacaaaatcaacgtcataattttcttttagtaaatatgtcaaattttgctttgtgaaagatacaaattcttcgtttagtttaatatattttaaatgcttttcgaaaaacattccgtttgaaacaccaatttttccgaatgttcttgttctggagatttcaggtcgaatacatgatctaccctttctttgaagagggtccctgatccagtcgtcccaataagctcgtggccatttctgataaagttccagccagatatttttggtaagcatccaacctaaaccaggaaaaaaatctgtccgatatagcaaatcaggtcgcttaagatttataagactttcttttccattatcattccaccccgaaatacaccaaagcgacgaatcctttaataatataggatacaaacccaaaaaatattcaaaaaaatctggagaaacctcaagatcatcttcaacgataattacagcactatagttaaaattaaaaaaaatttggttgagagcccagccgtaatgtctagcaattttgaagtaaccttttaacttcttttcctttggaggaacttggatttcagattgatctggctgttggattagagagacttcatttctgtatttgagaattgcttttttcgtttctgtgtgattacaatcctgactaacaattattggaaattgatccatcctaggcctatactgaattagactatctaaacatttagtaacagttattctattgcaggcaaaaaccaagactggaatcttaacatcacggaattcatttaaattcatactatgttggtaattttcattttctttcttgatttctaatattttttgagcatcttttatcataacattattttttataaattctcttgatatgccttgttctaagatcacaatctgctggctcaatttactaggtatttcactatatatgtgaacaggatggtaataatatgttaaataaaatattgatgaccatattattatcaataatcctaatattagtgtcgtgcgtttaattcgcatcatttaagaatgatacaatgtagaatccttcatactgcacgtgcatacaaatcatgtaagaataatattttggtattaggattatgctttaacttttgctaaatcttgtcaaaatttgcctgaacctgaaatagatgccaagagatcaaatataaaaattaaataaattttgaataagttttcacgtttatcactataattaatcctaataactatgtactgtgttttattttattgaaaacgatattttgagctatctatattatgtgaaaataatatagattttaaataagtt

SEQ ID NO: 4651 - DNA, 1754 bp, Diabrotica virgifera
  SmartBlast Evalue=1E-140; Info="Alpha-1,3-mannosyl-glycoprotein 2-beta-N-acetylglucosaminyltransferase n=1 Tax=Camponotus floridanus RepID=E2AZ38_9HYME"
aagtatattttctacttattcaatagttgagaaaaaatttttaattacaaaacatgtaataacaacatacaataaaaaactattacatatcacaaagaaaataaagtaaaaccttattactgaaatataaacatagtggaatattgttctatggaaaagtggataaacctaactccacgtcggatcatagcccttccaattatttgacggtgtaaagtgtaccattatcccgttgtagtgaaaggtaacaattcctttataagaagttcttggaatgccacttttaaagtcatccataagtcctaattttttagtaatagttttatattcttctttagttctatagataattcgaacaggcgtattaaatttaacctgcttcagttcttcaaaacttataactgggctctggtaaacttttttaacaaaatcaacgtcataattttcttttagtaaatatgtcaaattttgctttgtgaaagatacaaattcttcgtttagtttaatatattttaaatgcttttcgaaaaacattccgtttgaaacaccaatttttccgaatgttcttgttctggagatttcaggtcgaatacatgatctaccctttctttgaagagggtccctgatccagtcgtcccaataagctcgtggccatttctgataaagttccagccagatatttttggtaagcatccaacctaaaccaggaaaaaaatctgtccgatatagcaaatcaggtcgcttaagatttataagactttcttttccattatcattccaccccgaaatacaccaaagcgacgaatcctttaataatataggatacaaacccaaaaaatattcaaaaaaatctggagaaacctcaagatcatcttcaacgataattacagcactatagttaaaattaaaaaaaatttggttgagagcccagccgtaatgtctagcaattttgaagtaaccttttaacttcttttcctttggaggaacttggatttcagattgatctggctgttggattagagagacttcatttctgtatttgagaattgcttttttcgtttctgtgtgattacaatcctgactaacaattattggaaattgatccatcctaggcctatactgaattagactatctaaacatttagtaacagttattctattgcaggcaaaaaccaagactggaatcttaacatcacggaattcatttaaattcatactatgttggtaattttcattttctttcttgatttctaatattttttgagcatcttttatcataacattattttttataaattctcttgatatgccttgttctaagatcacaatctgctggctcaatttactaggtatttcactatatatgtgaacaggatggtaataatatgttaaataaaatattgatgaccatattattatcaataatcctaatattagtgtcgtgcgtttaattcgcatcatttaagaatgatacaatgtagaatcctggatttgctacagtttacagttcccagagaaattttaataattcccagagctattaatcagtattgatttgtaaaggtataatctagtagaagagtataaaaaaatttctaaatacagtttgattggatcaagtggctatggatacctttgactgcaagggggcaatacatttgtaccacaatctttttaaaccttactgtttcactttttaaaacaatatttgctactttaaatttgtgctaagtcaattgaaaatgatctactct

SEQ ID NO: 4652 - DNA, 1774 bp, Diabrotica virgifera
  SmartBlast Evalue=1E-171; Info=Aldehyde dehydrogenase n=1 Tax= Tribolium castaneum RepID=D6WYB8_TRICA
gttgtgtgtgtgtttgtacatacagtgtaaagtcagtgaatttgctttataaccatgtcagataagaatcctgaacaagtagtgaatactgcacgaaatgcattcaatagcggaaagacaagatccttagattttagactaaaacagttaaaagcattcatacgactactagatgaaaatactccacaaatatgtgatgctttaaacaaagacctgaggaagaataaaattgaggctgttcttatggaaattggtgtggtgaaaaaagacatcaattacttcttgaaaaatcttcgcgaattagaaaaacccgtgagacccgataaagaagttgcgaatattatggatagtgtcttcattaaacatgatccttatggagttgtccttattatgggagcttggaattatccaataacattatcgttacaacctgttgcaggtgcaattgctgcaggaaattgtgttctgttgaagccttctgaagttgcaccagcaacctcgaagtttcttgctgaatatattccaaagtatttagacacagaagcataccaggtctttgaaggaggagtagccgaaacaactgaattgttaaaacaaaggttcgattacattttatacactggatcatctgcagtaggaaagattatcttagaagcagctgccaaacacttgacacctgtcactcttgaactgggaggtaaaagtcccgtgtatttggacaaatcagcagatttggaagttgcagtgaagcgactattatggggaaaatgcgcaaattctggacagacctgtattgctcccgattatcttctctgttccaaagacctgcaagaaaaagttgttcaaattgcgaaaaaagtcattaaggaattcttcggggaaaatgtcaaagcttctccagactacggaagaattattaatgacaggcatttcaaaaggattgtggcgttgttgaaagatgctaacattgcctttggaggagactacgatcccagtgaaagattcatttcccctactattttaacaaacgtcaaatcctcagatcctgtgatgcaagaagaaatctttggacccattctgccaatcgtcaacgtggaaagtgcctacgatgccatacaatttataaactctagggaaaaacctcttgcactctatatattctcaaacaacaaaaaggatgtcgatcaaattctaaacaatacatcttcaggtggtgtatgcgtcaatgatacaatcatgcacatagtgactcttagtctaccgtttggtggtgttggcaacagcggcatgggaagctaccacggcaaatacagctacgagacattcgtacacaagaagagcgtactacacaaaaatttgggatatattggagagctgctgagctcggcgaaatatcctccttatacaacaggaaaacttaggtacttgcaactgctgcttactcctggcttggacattcgtggaagattcatgtcgcacttgttaacattctgttgtggagtagcctttgcatatcttttaacatatgcaaagccttttcttcctttttagttcttaccaataatgttaaaataaaaaatcatcactgaaacggctactttgtgtacccagttttttttaaattaactctgttgttgtaattatttgctacttctaattgatatatctatgtatacatgactgactaacctttttaaagatgtttagaacttatttgtacattattttcaatattttaattaagaattacatgttaaataatatgccaaaaaaa

SEQ ID NO: 4653 - DNA, 1726 bp, Diabrotica virgifera
  SmartBlast Evalue=1E-168; Info=Aldehyde dehydrogenase n=1 Tax= Tribolium castaneum RepID=D6WYB8_TRICA
ctccttcaggatgtctcaaaaagccgaacatgttgttaattctctcaggaatactttcgaaaccggaaaacaaaatctgtgaacttccgaataaaacagttgaaaaaccttgtgaaaatgattgacgacaatactcaagctattgccgttgccttaggtcaagatctaagaaaaagtaaaatcgaatctattttgatggaagttgatgttataaagaatgagattaaatacatattgatgcatatccatgactggacaaaagctgagaaaccgtcaaaaagtttggctaatgcattggattctgtttatattttgcatgacccttatggagttgccctcatcttaggtgcttggaattatcctctacagctttccctttcaccagtggcaggtgcaattgctgcaggaaattgtgttctgttgaagccttctgaagttgcaccagcaacctcgaagtttcttgctgaatatattccaaagtatttagacacagaagcataccaggtctttgaaggaggagtagccgaaacaactgaattgttaaaacaaaggttcgattacattttatacactggatcatctgcagtaggaaagattatcttagaagcagctgccaaacacttgacacctgtcactcttgaactgggaggtaaaagtcccgtgtatttggacaaatcagcagatttggaagttgcagtgaagcgactattatggggaaaatgcgcaaattctggacagacctgtattgctcccgattatcttctctgttccaaagacctgcaagaaaaagttgttcaaattgcgaaaaaagtcattaaggaattcttcggggaaaatgtcaaagcttctccagactacggaagaattattaatgacaggcatttcaaaaggattgtggcgttgttgaaagatgctaacattgcctttggaggagactacgatcccagtgaaagattcatttcccctactattttaacaaacgtcaaatcctcagatcctgtgatgcaagaagaaatctttggacccattctgccaatcgtcaacgtggaaagtgcctacgatgccatacaatttataaactctagggaaaaacctcttgcactctatatattctcaaacaacaaaaaggatgtcgatcaaattctaaacaatacatcttcaggtggtgtatgcgtcaatgatacaatcatgcacatagtgactcttagtctaccgtttggtggtgttggcaacagcggcatgggaagctaccacggcaaatacagctacgagacattcgtacacaagaagagcgtactacacaaaaatttgggatatattggagagctgctgagctcggcgaaatatcctccttatacaacaggaaaacttaggtacttgcaactgctgcttactcctggcttggacattcgtggaagattcatgtcgcacttgttaacattctgttgtggagtagcctttgcatatcttttaacatatgcaaagccttttcttcctttttagttcttaccaataatgttaaaataaaaaatcatcactgaaacggctactttgtgtacccagttttttttaaattaactctgttgttgtaattatttgctacttctaattgatatatctatgtatacatgactgactaacctttttaaagatgtttagaacttatttgtacattattttcaatattttaattaagaattacatgttaaataatatgccaaaaaaa

SEQ ID NO: 4654 - DNA, 2730 bp, Diabrotica virgifera
  SmartBlast Evalue=1E-124; Info="Paramyosin, putative n=1 Tax= Pediculus humanus corporis RepID=E0VIK3_PEDHC"
tttaacatatttaataattttatttaacctgtttttcataataggctaaaccaaaagaataacaattctgatagtcaaataacaacaatggtggctaaaacgtaatatatttaaaaaagtaagtcgatgacaaatattggaaataaatacgataacacaattgatcagaaattacatgattgaactattgaattttttttattttgttttttgtacacatcacaagtacgccaaaccgctggaggaggcgtatgccatcagcgtgtttgcggcttgttgggtttccaaataaattctagtctcgtccatccattccttcgccacgcaccgtgcagcacctttgagtaaattcatgtacctcaacgtctgtgtgaagtcacctcgatctaaccaatacctggctctttgaagaatgtcgtttgtgtttaacgtcgaaacatctattatttcattatttaattcgctttgaggaataggactagcggcctttataaggatcaacgactgcaaataggacaacaagtggaccggtagtgctgcaccctcctctggaattaatgccactgttctggcgacttgttctacttttaagaaccgctctctcaaggcatcttcggggtacacgcctctttctcgcgcttcttttggaatgccttctatcacggcgttgaccaatccatcgtgatcagctgctgctttttgtacagctgttatttcaggttccaatggtctaatttgctctttccaagataatcctggacaaccagctttgattgctcgcaacaaagattgacatgcactccacaatacttgagcctgcctactagccgcgtctgcattattcttttctgttatagcttcatctagtccctttagacgccccacaatggctgccaattgaattttagccttgcacctttcttcttctaacaattcgtcgtattttttagtcagttccctttcgatttcttcagcgcgtcttctaactgcttcctctaaatggtcagtgaacgtctgagattgcctcttaagtgcttctcgaagttctatctcatgttgttttcttaacttcaatacctgctgttggaaacataatgtaagcctcctcttctcttgttctactgcctcacaaatttgagcgttgttcaaaacttcaccgccccctagtctggcgacttccgtggcatttctcaatcgttcttgaacgatggtttccatcttagccaactctttttgataataaagtacatgggcatatgtgtgaagaacaaaaagatctaagtcctcttcatttatgcagaggtgttttttcgaaagatctatcgtaggaaaaagactctccaattcttcggaaaagttttgtctagctttttctactttgtcccagtatttttcggctacgctgcccatcttttgttcgtgttcaaattccctcctggcgtgttctatgtcttcttgaactctgctgatattactttggatcgtctgtttggtaatgggatcagcatcgaatgatggtttggaaacaatttcttttaatttgtttatgtctctaacagcgatttcagctttttctgtcgctcgtcttacacactcgtgcttagatctcgtcttgctcttaagtgtatcccacgtctctggtttaacttcgttcactgcttcctctatgatgtactctatgtctgagttgtacgattttataataaaaactgccttgttgaaagcgttcacggcttcttctgcggatacacggatgttttcctcaagttttgctaagttttcggtggtagggctatcagtagctactgtgataggtttgggctttggttctccagctagttccacaacaggctctagtttcccactttctattttctctagtctaatttcagcatagctaggcggaggtggctttttcatttctttttctattactggtagaattggcggaggagctttatatacctctgatgatggcaactcagaaatttctttagaactaatgtatttactttctgtagtaggtttgcctgtgaatagatcaaagatggccttctttgaactttcataatacgaagataggatattgctattacttgaatatagattatcttcctgccatattgttttaattacatcatccgtgaaaggtacaaagcctaccagggttttcctgaaatctggatcatatttagcatatgccaaggtggctcctccagcagtaatcaatgccccaactgttaagaaaaatcctttaccaccacctcccccaccttgctcggaatgttttgagccttggctgtaggatcttcctgatgtggtatagtttgcattgttattataattataatttatagagcgatatactgtcaatgctggggtacagttcttccaattttttttattaggaatccttttaataaatcttagcattttggggaaaagccactttggggataaatgaaaacaggaatattaggattccgagaatcacccgaagtttcaagagtgtccggccgtcatctgtcttataatatccttagctcagaactgataaacttcaaatgagtaacagatctgaaaggcaatgatcacgtgagaaattaaattgtaaccagaaaaatagaaagtttaataaatagacaaggcttatttaattcatttaaatttaaattatttaaaaatgtaattttatagctttttaggttaaattttcattttctgttacgt

SEQ ID NO: 4655 - DNA, 758 bp, Diabrotica virgifera
aaaaaattaaaaaaagaaaaaaataaactaatgtatttactttctgtagtaggtttgcctgtgaatagatcaaagatggccttctttgaactttcataatacgaagataggatattgctattacttgaatatagattatcttcctgccatattgttttaattacatcatccgtgaaaggtacaaagcctaccagggttttcctgaaatctggatcatatttagcatatgccaaggtggctcctccagcagtaatcaatgccccaactgttaagaaaaatcctttaccaccacctcccccaccttgctcggaatgttttgagccttggctgtaggatcttcctgatgtggtatagtttgcattgttattataattataatttatagagcgatatactgtcaatgctggggtacagttcttccaattttttttattaggaatccttttaataaatcttagcattttggggaaaagccactttggggataaatgaaaacaggaatattaggattccgagaatcacccgaagtttcaagagtgtccggccgtcatctgtcttataatatccttagctcagaactgataaacttcaaatgagtaacagatctgaaaggcaatgatcacgtgagaaattaaattgtaaccagaaaaatagaaagtttaataaatagacaaggcttatttaattcatttaaatttaaattatttaaaaatgtaattttatagctttttaggttaaattttcattttctgttacgt

SEQ ID NO: 4656 - DNA, 1960 bp, Diabrotica virgifera
caatattaaatcttcttaaaatctaacctaaagaaaaatttacaaaacttattgaagaaactgtaggtaaattctaatcatgaattaatcattggtatttgtgattaaaatttacctttttattcacgttacggctaaaacaacaaattgatatcttaaatagacttatgtaactccaattgtgacagtactttcgagccaggtacttaaattagctgtatctattaacaactgacatagacgataccaattaatatccttaaacattgatggataagttgtaatttgttaagatatttcttttatcgactatttcaatagaaaccattttttttttgtaagatacaatgatttttaacaaagatattttcaatgtaactaactatacctggcaagaaaaaacgacgtacatagataagtattactttatagagttacattagtactatttcactgtatcaaaaaacgtaacaaatacctagctaaaagaaaaattctagagatcaacagaaaacggtgcaaagttcatttggaattatctatatacaaaaataatcatttacaatgttttgcatccgttttcgcaaagagtgtggttattaaatgcatgtttattcaacatattgacgactatgtacttctttgagaatttttttttactttccataataataaattttcaaaaaaagtcatagagaagcgatacacaccatttttcttcacagccgtattactgatatctggctaaataaatgcgaaaatatggtaaaggtactgcaagaatacaaaaaacaatatttcagtttttacatttttagaacgaggatatgatgaaattcaacaaggttggcttattcaaaaatgtctaattcgagaagcaatttctttccctgaaatatttatgcagtgcagtagtttaaagttcttagtctctttttgattttaattttagcaaacaagtatatttattcattaatcctgctacagcagatagcttatacacagataataaaaatgagtactgtgacccctaaaattcggacacttacaatatgcaacgaatatttggctcaaaagttgctcaaaattttagaaacatcggccgagcacgggagatgctggcgcttaccttcgccgttgagacgaaatgtaatacatacttattgtctcgaccaatagattactagtttttgtctcaaccaatagattactagttttcatagttcggctatgaaaagttcataaaggttcaggatatacgcagtgagcgttccgcacaaaatgaacatttagcttggaatgttgtaaatgtagtagccagaaacgcaataacactcagctccacatgctgtaaatgttataaaacggaaactggaacccttcttatcctcaacaataagttcaccgcaatgtgtcacagtgtgcctactcagctccataccggctgtaggcatgtacctttgcgagaaccagtacatgagtcttctatcaacttttgatgaaaaataagatcactatagtggagagacagtgggctcgtcggtctaggaaacagtttatgcactctgtgcctctgataggggtatttctcgtaacgatttgttacaaaattctccgaaattatataatatataatttcatattatgaaatttttaatacatagttaggaaaaaacagatatttttctgcttctatttctcttactcatctttcctcatttttatcgttttccgtttgtcttaatcatattatttttcaacaaataaaaagataatgtcaaaaatattttcagttggtactgtcattgatataattactcacacaatcgaaagttccaactgaatgcaaataatttcgtttacaaaaagcatccacacgataaaccatacactaaaatatatttaataaccacctaaggagaattttccgcttaacgaggattatatcaaagagctcact

SEQ ID NO: 4657 - DNA, 1524 bp, Diabrotica virgifera
caatattaaatcttcttaaaatctaacctaaagaaaaatttacaaaacttattgaagaaactgtaggtaaattctaatcatgaattaatcattggtatttgtgattaaaatttacctttttattcacgttacggctaaaacaacaaattgatatcttaaatagacttatgtaactccaattgtgacagtactttcgagccaggtacttaaattagctgtatctattaacaactgacatagacgataccaattaatatccttaaacattgatggataagttgtaatttgttaagatatttcttttatcgactatttcaatagaaaccattttttttttgtaagatacaatgatttttaacaaagatattttcaatgtaactaactatacctggcaagaaaaaacgacgtacatagataagtattactttatagagttacattagtactatttcactgtatcaaaaaacgtaacaaatacctagctaaaagaaaaattctagagatcaacagaaaacggtgcaaagttcatttggaattatctatatacaaaaataatcatttacaatgttttgcatccgttttcgcaaagagtgtggttattaaatgcatgtttattcaacatattgacgactatgtacttctttgagaatttttttttactttccataataataaattttcaaaaaaagtcatagagaagcgatacacaccatttttcttcacagccgtattactgatatctggctaaataaatgcgaaaatatggtaaaggtactgcaagaatacaaaaaacaatatttcagtttttacatttttagaacgaggatatgatgaaattcaacaaggttggcttattcaaaaatgtctaattcgagaagcaatttctttccctgaaatatttatgcagtgcagtagtttaaagttcttagtctctttttgattttaattttagcaaacaagtatatttattcattaatcctgctacagcagatagcttatacacagataataaaaatgagtactgtgacccctaaaattcggacacttacaatatgcaacgaatatttggctcaaaagttgctcaaaattttagaaacatcggccgagcacgggagatgctggcgcttaccttcgccgttgagacgaaatgtaatacatacttattgtctcgaccaatagattactagtttttgtctcaaccaatagattactagttttcaacaaggttcggccctcagtgtagttattcttctgaatttctactgtgggacttgtagacaggttgcacgactgcaatagtatttagtttattattggttgtaaagggacaaccctacgacagtgactaagctagtggcattctaaaccagagagaaaaaagtaaaaaaaatttacacatggcattaagtagtgctcgatatctgccattgattttcctaaaatgttacaataacgtttagcattgatggaattttttctacgcaaaatttataaaagcattatttttttcctttctgtactgtt

SEQ ID NO: 4658 - DNA, 1770 bp, Diabrotica virgifera
  SmartBlast Evalue=0; Info=Tyrosine hydroxylase n=3 Tax= Tenebrionidae RepID=A5YVV2_TRICA
caactcgctaaccaggcgttgcatagcccttattttgacagacggtaccgatcgtggtcgtagtggttttcagcgtcggtttaattcagcagtgaaaagtgatttttcaggctgaacagcgagtttttcttcatcacccgttaaaatctcttacaaagttcctgcaactaaaaatggcggctgtagcagcagcacagaaaaatcgcgaaatgttcgctattaaaaaatcttacagtatcgagaacggatatccagcacgaagacgttctttggtcgacgatgccaggtttgaaactttagttgtgaaacaaacaaaacaaactgttttggatgaagcaagacaacgtgctaatgacacattagaacctgaagtagatgaaacacctatacaaaaacaacctgcaccaaatacagaagatgataccggattaaccgaagaagaaattgtgctcgcaaatgccatcactgaaggacttgaggccgaaaaagctatccagaaagccgccttaatcctccgtctacgtgaaggaatgaactcactatcacgtgtacttaaagctatcgaaaaatatcagggtgtagttcttcatttagaaactcgccctaaccaacgcgacaatggacaactggatgctcttatcaaaatcgagatgacccgtgttaatttacttcagcttcttaagggtcttagacaatcaggaactttggaacatactactcttatcggagaagacaatatttctgcaaaaaacccatggtttccaagacatgcgagtgaattggacagctgcaatcatttaatgaccaagtacgaacctgatcttgatatgaatcaccctgggttctccgacaaagaatacagggccagacgaaaagaaattgccgaaattgctttttcctataaatatggggaacctgtaccatttattgaatatactgaaactgaaaataaaacttggaatgcagtgttcaccacagtttgcgaattaatgcacaaacatgcatgtgcagagtacagaacagttttcagaatacttcaagacgaagggatattcaatccacacaaagtaccacaattggaagaaatgtcttgttttatgaagaaacgtacaggatttactttaagacctgccgctggattacttacagcaagagatttcttggcttcacttgctttcagaattttccaaagtacacaatacgtccgtcacacaaaaacaccattccatacaccagaacctgactgcattcatgaaatcttaggacacatgcctctacttgccgatccaagtttcgctcaattttcacaagaaattggtcttgcatcacttggggcatcagatgaggagattgaaaaattatctaccatttattggttcacagttgaattcggactctgcaaggaaaatggagaaactagagcgtacggtgccggtcttctcagtgcgtatggagagcttctccatgctctttctgacaaacctgagcacagacctttcgacccagctaagaccgctcttcaaccatatcaagatcaagaataccaaccagtttactacgtagcagaaagtattgaagatatgaaggataaattcagaagatgggtatctcaaatgtccagacccttcgaagtcagattcaacccacacaccggaagggtggaagtcctagattcagtagaaaaactggaatcacttgcacaccagttaaatacagaaattatgcaccttacgaatgccatcaataaaatgagggctcctgtcatttaaa

SEQ ID NO: 4659 - DNA, 1704 bp, Diabrotica virgifera
  SmartBlast Evalue=0; Info=Tyrosine hydroxylase n=3 Tax= Tenebrionidae RepID=A5YVV2_TRICA
caactcgctaaccaggcgttgcatagcccttattttgacagacggtaccgatcgtggtcgtagtggttttcagcgtcggtttaattcagcagtgaaaagtgatttttcaggctgaacagcgagtttttcttcatcacccgttaaaatctcttacaaagttcctgcaactaaaaatggcggctgtagcagcagcacagaaaaatcgcgaaatgttcgctattaaaaaatcttacagtatcgagaacggatatccagcacgaagacgttctttggtcgacgatgccaggtttgaaactttagttgtgaaacaaacaaaacaaactgttttggatgaagcaagacaacgtgctaatgataccggattaaccgaagaagaaattgtgctcgcaaatgccatcactgaaggacttgaggccgaaaaagctatccagaaagccgccttaatcctccgtctacgtgaaggaatgaactcactatcacgtgtacttaaagctatcgaaaaatatcagggtgtagttcttcatttagaaactcgccctaaccaacgcgacaatggacaactggatgctcttatcaaaatcgagatgacccgtgttaatttacttcagcttcttaagggtcttagacaatcaggaactttggaacatactactcttatcggagaagacaatatttctgcaaaaaacccatggtttccaagacatgcgagtgaattggacagctgcaatcatttaatgaccaagtacgaacctgatcttgatatgaatcaccctgggttctccgacaaagaatacagggccagacgaaaagaaattgccgaaattgctttttcctataaatatggggaacctgtaccatttattgaatatactgaaactgaaaataaaacttggaatgcagtgttcaccacagtttgcgaattaatgcacaaacatgcatgtgcagagtacagaacagttttcagaatacttcaagacgaagggatattcaatccacacaaagtaccacaattggaagaaatgtcttgttttatgaagaaacgtacaggatttactttaagacctgccgctggattacttacagcaagagatttcttggcttcacttgctttcagaattttccaaagtacacaatacgtccgtcacacaaaaacaccattccatacaccagaacctgactgcattcatgaaatcttaggacacatgcctctacttgccgatccaagtttcgctcaattttcacaagaaattggtcttgcatcacttggggcatcagatgaggagattgaaaaattatctaccatttattggttcacagttgaattcggactctgcaaggaaaatggagaaactagagcgtacggtgccggtcttctcagtgcgtatggagagcttctccatgctctttctgacaaacctgagcacagacctttcgacccagctaagaccgctcttcaaccatatcaagatcaagaataccaaccagtttactacgtagcagaaagtattgaagatatgaaggataaattcagaagatgggtatctcaaatgtccagacccttcgaagtcagattcaacccacacaccggaagggtggaagtcctagattcagtagaaaaactggaatcacttgcacaccagttaaatacagaaattatgcaccttacgaatgccatcaataaaatgagggctcctgtcatttaaa

SEQ ID NO: 4660 - DNA, 1921 bp, Diabrotica virgifera
  SmartBlast Evalue=0; Info=Arginine kinase n=2 Tax=Cucujiformia RepID=B1A4C9_9CUCU
tctcgcgtcacagaggtgggagaggcggctcaaagatttgttctaagcggcgcgttgtaattctcattgtcggttcatacttttgtgaagtgtgtaccctttgagtcgaaggttctaaatctcaggatcctaagggaatattgacctgaagaagtttttgtagttacgctcatgtctcaacaacagaaaattcgatctggtagagacgcgtgctaaatgagtcatctatcgattagaggtagcgaacagcgcccctttagcagacattgagtagagttagagctagcttgtggataggatactcagagtgtcagtggtgcggacacccggcaacaaatatacaatagttcaccggagacagtgctaaaatcagtggaaaactggaagggctatacagtaggtctgaaaagtgaccagaagggcgtcacctaacacacatgccaaaaggtcttgtcaagtatttacccgtagtgttaaatttttttatttagctagatattataatcaaagatgggtggttgtgcatctaaggaaaataaaaaggaaatacaggacgactctggaaaagccaccatggttgacgctgcagttttggacaaacttgaaagtggattcgccaagattaaagattccaactccaaatccctcttaaagaaacaccttacccaagaaatcttcgacaacctcaaaaccaagaaaacccccactttcggttgcacacttctagatgtcatccaatctggcttagaaaatcacgactccggcgtaggtatctacgccccagatgctgaatcctacaccgtcttcgctgacatcttcgatcccatcattgaagactaccatggtggattcaagaagaccgacaagcacccccccaagaactggggtgacgttagcgtattcggcgacttagaccccaccggtgagtttgttgtgtccacccgtgtcagatgcggacgttccatggaaggatacccattcaacccatgcttgaccgaagaacaatataaagaaatggaacaaaaagtttccagcactctctctggccttgaaggtgaacttaaaggaacattctacccattgactggtatgagcaaagacgtccaacaaaagttgatcgacgaccatttcttgttcaaggaaggagaccgattcttgcaagctgccaacgcctgcagattctggccctctggtcgtggaatctaccacaacgagaacaaaaccttcttagtatggtgcaacgaagaagatcatcttcgtctcatctctatgcaaatgggtggtaacttgggagaagtttacagacgtctggttaccgctgtcaatgacatcgagaaaagaattccattctctcacaatgacaggcttggtttccttactttctgcccaactaacttgggtaccactgttcgtgcttctgttcacattaaggttcctaaattggctgccaacatggctaaattggaagagattgctggaaaatacaatctccaagtccgtggtactcgtggcgagcacacagaagctgaaggaggagtctatgatatttccaacaagagacgtatgggtttgaccgaatatgacgccgttaaagaaatgtacgatggtatccaagaactcatcaagatcgagaaagagttataaatcgtctatcagtatgctttatcagttaaaagtatttataagcagtgatgtaaacatattttattttctacttctatttcaaatgccaaaggtattagcaaagtttacataagatgttttattcaatgaaacgttgtagtatgtaaaccagttatattctagtcaacattttgttttaaacaaaaaaaattcaacaacttcaagtcatattggtattattatcactatttttaaattatttttaattaaactcataaataaagtagtattttaaaaa

SEQ ID NO: 4661 - DNA, 1544 bp, Diabrotica virgifera
  SmartBlast Evalue=0; Info=Arginine kinase n=2 Tax=Cucujiformia RepID=B1A4C9_9CUCU
gggaacgctaggatagaccgatacgttcggagctcttattcgctagagaaattctcgcgtcacagaggtgggagaggcggctcaaagatttgttctaagcggcgcgttgtaattctcattgtcggttcatacttttgtgaagtgtgtaccctttgagtcgaaggttctaaatctcaggatcctaagaaaagccaccatggttgacgctgcagttttggacaaacttgaaagtggattcgccaagattaaagattccaactccaaatccctcttaaagaaacaccttacccaagaaatcttcgacaacctcaaaaccaagaaaacccccactttcggttgcacacttctagatgtcatccaatctggcttagaaaatcacgactccggcgtaggtatctacgccccagatgctgaatcctacaccgtcttcgctgacatcttcgatcccatcattgaagactaccatggtggattcaagaagaccgacaagcacccccccaagaactggggtgacgttagcgtattcggcgacttagaccccaccggtgagtttgttgtgtccacccgtgtcagatgcggacgttccatggaaggatacccattcaacccatgcttgaccgaagaacaatataaagaaatggaacaaaaagtttccagcactctctctggccttgaaggtgaacttaaaggaacattctacccattgactggtatgagcaaagacgtccaacaaaagttgatcgacgaccatttcttgttcaaggaaggagaccgattcttgcaagctgccaacgcctgcagattctggccctctggtcgtggaatctaccacaacgagaacaaaaccttcttagtatggtgcaacgaagaagatcatcttcgtctcatctctatgcaaatgggtggtaacttgggagaagtttacagacgtctggttaccgctgtcaatgacatcgagaaaagaattccattctctcacaatgacaggcttggtttccttactttctgcccaactaacttgggtaccactgttcgtgcttctgttcacattaaggttcctaaattggctgccaacatggctaaattggaagagattgctggaaaatacaatctccaagtccgtggtactcgtggcgagcacacagaagctgaaggaggagtctatgatatttccaacaagagacgtatgggtttgaccgaatatgacgccgttaaagaaatgtacgatggtatccaagaactcatcaagatcgagaaagagttataaatcgtctatcagtatgctttatcagttaaaagtatttataagcagtgatgtaaacatattttattttctacttctatttcaaatgccaaaggtattagcaaagtttacataagatgttttattcaatgaaacgttgtagtatgtaaaccagttatattctagtcaacattttgttttaaacaaaaaaaattcaacaacttcaagtcatattggtattattatcactatttttaaattatttttaattaaactcataaataaagtagtattttaaaaa

SEQ ID NO: 4662 - DNA, 1848 bp, Diabrotica virgifera
  SmartBlast Evalue=2E-99; Info=Nuclear valosin-containing protein-like n=1 Tax=Camponotus floridanus RepID=E2AYL6_9HYME
ttttcccattcccacaccaacatcaaccgctaacctgtatttgagacgcgcaaaacgctgtgtacgttgttatatcaacaattaaaagttgtcgtttaatttaatttttcggttataacttaatttgagcgttttcaaagaggtaaacggtaaagagacggattgattaatcgggccccctaatgggtaagtcgtacagagcataaaattataaagtcgtagtttgaaatcagctgaagaatgccatatgtgtctgatccaactattatcgctagggtacaaaaatacctggaagaaaatactgacaaaacttacgtggacatatctgaaatagctaacgctctacaatcgcaatatagagagtacgctaaacgtaaaagaagtgttttcagagctgccgttaaaaaagcattttccattgttttagctcgatacgggttagattcggataataatccaggaagtagcgacgaaagtagcatcgatcctggtgaatataatagtcctgaaaacaattcaatgaacaaccaactagtaaatatgtataaaaagaacattgcaccaaaagaactggatgaaaatgagttaattgatattagtagcgatgatgaaactgaagaacctcccccgcatcctgctccaaaaaatataaaaccacctaatgtactcccaaacagaaatggattacaacagacccatgataatgataaaaataaaaaaagaaacattaactatgccacactttctaatatgccatcacaaagccacaaaaagagaaaatttgaacatgtaaacaaccaggttcgagagggtgaaattacatttgccaaccttggaggcatggaaaagacactgaaagatgtgacaaaattgattttgcatatgacacaccctgagatttatagggctgtgggtataacacccccaaggggattcttgttacatggcccccccggttgtggtaaaaccttgctggcccaagcaatagctggagaactgaagatgatgctgttcatggtatctgctccagagcttgtagctggtgtttctggtgagagtgaacaaagaatacgaaaactgttccaaagagcatttatgaattcaccatctataatatttatagatgagatagacgcaattgcccaaaacagacagaatgctcaaaaagacatggaaaagagaattgtagcacagttaattggttgtcttgatgaactcaacagaactgaacaaggccatagagtattggtaattggtgctaccaatagacctgaatctatggatccatcattaaggcgagcaggccgatttgacagggagatttgcttgggaatcccaaataaagagagtagagccgaaatacttaaagttgtcacgagaaaggtaaaattggaaccaaactttaattttaatgacctggcaattttaactcctgggtatgttggagctgatttgttggcactaactagagaagctgcagatattgctgttgataggttgttcaaagaactgggggagaatgaaaaaaagcaagaggaagaaagtacatcagtgtctgaagttgtgccggtggaaattgaagaatcagagccaaaagagaaaaaagcaaaagtttatgaaaaaacagaagaaaaatcaaatgcagatagttgtactcctgagaaatcaaaagaagttgaagagaaagaaaatgatgaggatatcattatagatgacactcctgaaaaacaaactttacctactgctgatgattccacatcagaccctactataattcttgttgatgacgaaagtcagtgtgttaagccaactctaaagaaaacatctgtattagaaaatatcagtccc

SEQ ID NO: 4663 - DNA, 1607 bp, Diabrotica virgifera
  SmartBlast Evalue=3E-85; Info=Nuclear valosin-containing protein-like n=1 Tax=Harpegnathos saltator RepID=E2BIR9_9HYME
ttttcccattcccacaccaacatcaaccgctaacctgtatttgagacgcgcaaaacgctgtgtacgttgttatatcaacaattaaaagttgtcgtttaatttaatttttcggttataacttaatttgagcgttttcaaagaggtaaacggtaaagagacggattgattaatcgggccccctaatggctcgatacgggttagattcggataataatccaggaagtagcgacgaaagtagcatcgatcctggtgaatataatagtcctgaaaacaattcaatgaacaaccaactagtaaatatgtataaaaagaacattgcaccaaaagaactggatgaaaatgagttaattgatattagtagcgatgatgaaactgaagaacctcccccgcatcctgctccaaaaaatataaaaccacctaatgtactcccaaacagaaatggattacaacagacccatgataatgataaaaataaaaaaagaaacattaactatgccacactttctaatatgccatcacaaagccacaaaaagagaaaatttgaacatgtaaacaaccaggttcgagagggtgaaattacatttgccaaccttggaggcatggaaaagacactgaaagatgtgacaaaattgattttgcatatgacacaccctgagatttatagggctgtgggtataacacccccaaggggattcttgttacatggcccccccggttgtggtaaaaccttgctggcccaagcaatagctggagaactgaagatgatgctgttcatggtatctgctccagagcttgtagctggtgtttctggtgagagtgaacaaagaatacgaaaactgttccaaagagcatttatgaattcaccatctataatatttatagatgagatagacgcaattgcccaaaacagacagaatgctcaaaaagacatggaaaagagaattgtagcacagttaattggttgtcttgatgaactcaacagaactgaacaaggccatagagtattggtaattggtgctaccaatagacctgaatctatggatccatcattaaggcgagcaggccgatttgacagggagatttgcttgggaatcccaaataaagagagtagagccgaaatacttaaagttgtcacgagaaaggtaaaattggaaccaaactttaattttaatgacctggcaattttaactcctgggtatgttggagctgatttgttggcactaactagagaagctgcagatattgctgttgataggttgttcaaagaactgggggagaatgaaaaaaagcaagaggaagaaagtacatcagtgtctgaagttgtgccggtggaaattgaagaatcagagccaaaagagaaaaaagcaaaagtttatgaaaaaacagaagaaaaatcaaatgcagatagttgtactcctgagaaatcaaaagaagttgaagagaaagaaaatgatgaggatatcattatagatgacactcctgaaaaacaaactttacctactgctgatgattccacatcagaccctactataattcttgttgatgacgaaagtcagtgtgttaagccaactctaaagaaaacatctgtattagaaaatatcagtccc

SEQ ID NO: 4664 - DNA, 1742 bp, Diabrotica virgifera
  SmartBlast Evalue=0; Info="Mannosyl-oligosaccharide alpha-1,2- mannosidase isoform, putative n=1 Tax=Pediculus humanus corporis RepID=E0VI77_PEDHC"
gtgctattgtgtggactccctgtagaaagggttgactccctttattggtagaggatgggcttccgtgttaaatacccattcgtctagcgacaataggctttcgtcagaaaagagaaggtacaggtatttcaaagttcagccaaaaagaagctctgctgtacatcgtcctgttgtggatcttctgcataaacattcttaagtccagtaaatccaccagctactctacagtgcttctcgagagcttgaacagcttcccagccccagtccctgtacttttggtctttggttaaacggtacatatagaaatacgtttctattacttcgggtcttaagatatagtatttttccgacgttttgagtgctctagcttcagatccttcagtgaatcggaaggattctggacccagtttggtggcagtgcggtcgtaggattcgtggcaggtgcgagtgatttcttctgctactttcatatatttactcgattggtcattcctgagagttttggaagctaggcctagtaaaccaccggagaaacatccaaggtggtccattttgtgttcaggtctatcgaatttcagttctgcgaaatacataagaccattggtagacgttttaagcatgtgttggaagacggctgccatggaatcatcgaacatttgtctagcttcgttatcttctttatttgactgtatccatgactttaacaaatattcgtaaaaactgtctcctaaagctcccatggacatatggtgttgtccccattttccagtctttgggttgagatagttggggtacaatcccttcggtttttccaattcacgtaatacttttcttatatgatccactttgtttctgtatattggttttccagtaatatcactaagatatgacatttctaggtggagcgtaccgaattctgagagaatgctggagccgccactggcccatccgtagtttttgctaacccctgtcttaaaattaaccagagcgttgggaatgccgctgggggtgtcgaatgctggcaataatttgtcggcaatttgctgtgccttgtcacggaacaaagtatcgccggtaaaggcgtagcacgtcaacaatccacccacgaatctaatgtttacttcgaaaacagacacgtctgaaactgcttgttcaacatccagctcattagccacccattccctagcctgcttgaattcatctttcatgcccataatatagagtgtatctaaactgtccaggatcgtagctcccaatggcatagaaccgaaaatactggcactgtgaccacgtttgcttattggtttcagctcatttttaccccatgcgtaccttacgtaattgtcccatccatgtttcatcatctctttaactttctcccttcgggctctagcttccgcatcctcatcttcacctccctctaacattggatagcggttactgtgagctgcaggaactgttttctgaagctggtctcgaagctgatctccaaaaccatctaccacccttatttcactgacttgtttagcagtagaggaagttttaggtctttctatatcaggcctttcaagaacctttaactcaccgtcctgttcaattttggccctaagtttagccctatcccctatgacatgagggtcttccttaatgtcatcttcatgtctaaggagtttaggggcttctcctatgttctccaaaggaggtggaggtattagtagatcaggtccagctctctttatttg

SEQ ID NO: 4665 - DNA, 1717 bp, Diabrotica virgifera
  SmartBlast Evalue=0; Info="Mannosyl-oligosaccharide alpha-1,2- mannosidase isoform, putative n=1 Tax=Pediculus humanus corporis RepID=E0VI77_PEDHC"
gtgctattgtgtggactccctgtagaaagggttgactccctttattggtagaggatgggcttccgtgttaaatacccattcgtctagcgacaataggctttcgtcagaaaagagaaggtacaggtatttcaaagttcagccaaaaagaagctctgctgtacatcgtcctgttgtggatcttctgcataaacattcttaagtccagtaaatccaccagctactctacagtgcttctcgagagcttgaacagcttcccagccccagtccctgtacttttggtctttggttaaacggtacatatagaaatacgtttctattacttcgggtcttaagatatagtatttttccgacgttttgagtgctctagcttcagatccttcagtgaatcggaaggattctggacccagtttggtggcagtgcggtcgtaggattcgtggcaggtgcgagtgatttcttctgctactttcatatatttactcgattggtcattcctgagagttttggaagctaggcctagtaaaccaccggagaaacatccaaggtggtccattttgtgttcaggtctatcgaatttcagttctgcgaaatacataagaccattggtagacgttttaagcatgtgttggaagacggctgccatggaatcatcgaacatttgtctagcttcgttatcttctttatttgactgtatccatgactttaacaaatattcgtaaaaactgtctcctaaagctcccatggacatatggtgttgtccccattttccagtctttgggttgagatagttggggtacaatcccttcggtttttccaattcacgtaatacttttcttatatgatccactttgtttctgtatattggttttccagtaatatcactaagatatgacatttctaggtggagcgtaccgaattctgagagaatgctggagccgccactggcccatccgtagtttttgctaacccctgtcttaaaattaaccagagcgttgggaatgccgctgggggtgtcgaatgctggcaataatttgtcggcaatttgctgtgccttgtcacggaacaaagtatcgccggtaaaggcgtagcacgtcaacaatccacccacgaatctaatgtttacttcgaaaacagacacgtctgaaactgcttgttcaacatccagctcattagccacccattccctagcctgcttgaattcatctttcatgcccataatatagagtgtatctaaactgtccaggatcgtagctcccaatggcatagaaccgaaaatactggcactgtgaccacgtttgcttattggtttcagctcatttttaccccatgcgtaccttacgtaattgtcccatccatgtttcatcatctctttgattttgtttcttttcataacatcatctccagttgtattgactctgatgtcatatgtttggttggtgtatagctcttcggttgggtcgtatgcataaatgtttcttgtgcggagtgagttgtcttctggtaaagatcttggttgtcgtgaaaagtagattcctgtccaagccatcacaattatagaacctccgaaaaaggagccggcgaccttggtactcaccattttcggttttatagaaaatgactctagtgaaaacctgtctttgcagatcaatccacaaagtcactgttcaccaaaaaaacgtacactgtaagtcaccactgatttaccttccaacagcaact

SEQ ID NO: 4666 - DNA, 2757 bp, Diabrotica virgifera
  SmartBlast Evalue=1E-103; Info=NFX1-type zinc finger-containing protein 1. n=2 Tax=Gallus gallus RepID=UPI0000ECA933
taggcatttattagagaatgttaggattgctgttttggataactatcaaggagaagaaagcgacattgtgctactatcgttggtcagaagtaataaagaaaacaaaattggatttttaaggatagaaaacagagtctgtgtggctttatctagagccagaaatggattttacataatgggaaatatgaaacagttacgtgaaaatagtgagatttggcctcaagtagaagacactcttaaaaaacaagaagcaattggttcttatttaacgcttcggtgtcaagttcatcgggatcaaatcactaaagtcaaatctggggaagattttttgaaaataccagagggcggttgtacattgaaatgtggggctcaattaaaatgtagccacttttgtacaagaatatgtcacgttttagatagagatcatgcagactatctttgcagacaaccatgtacaagtattctttgtgatgatatgacgcacatatgccaaaaatattgttatgaagaatgtggtccatgcaactatcctgttcggcgagagcttaaatgtggtcacgtagccaccatggaatgtcatatggatcctgataaatacaagtgcaatactttggttaataccgaacttcatgtggccataacgcagaaaagccttgtcatattgagccagacaaatttccatgtcaaattccatgtgatgttagagttgagccatgtggacatgcttgtattagaaagtgccatgttaacgatgatcctgatcatctacagtataagtgtcaaaaaccctgcgaacgagaacgcaagggatgtacaagtatggaagaacctcataaatgtaacaaagctgctttgaggaatgctcacagtgtgagatcgcagttcagaaaaggcgtaccaaatgttcccatatgttcaagatagcctgctttttggatcctgacactataatttgccaaaaaccttgtaagagggaacttccatgtggtcatatttgtaagaagacatgtgaggaaccttgcggagattgtacagtgttggtagagaaaactgtaccaggctgcaatcacgttataaaaattgaatgtaaaaatgaagccgacagaaaatactgtaaagatggtatatgtccccgtattttaccatgcggtcatcaatgcaagaaaaaatgtaatgaaccctgtagaacaaggtgtaaagaattggtgaattgcaacataccaagcccttgtggacatgtaatcaagaaaattcaatgttattataaagaaagctgatgatccgaagatattgctagctctatgttcagagccctgtaacattgaacttcagtgtgaacacacttgtagtggtacatgtggggagtgttttcaaggacgtttccataaaaaatgtgctgaaaaatgtggagtcccttggtttgtaatcacgaatgcactatacctgcagagaagcctgtcaaccatgcaaaaaaccatgtagttaccggtgtaaacatagcaaatgtaaaaaaggatgtggagaaccatgtacaaattgcaaagaagcttgtgttagaaaatgcgaacatcaagaatgtaagcgacgttgtggagaaatatgtaacgtgccaccatgttataaaccatgtccaaagaaaattagaagatgtcgtcacccatgcataggcttttgtggagatccttgtccatctttatgtagaatttgtaatgctgaagaattgaccgaatttttcttcggaacagaagatgaagaagatgcccgatttgtcttgttagttgattgcggacatattttagagtcatctggtatggaacagtggctggaaactgatgaggaccaaattaaaccaaaagtatgtcccaaatgtaaaacagttataaaatcaacgcaacggtatagtgaatatgtaaaaggaaacctattagatttacagaaagttaaaacaaagttttacgggacagacaaggaaaataaagaagtaaaagccaatttgcaatctgaattacagctacttattagggagttctactcttttggtgcagaaagggtgacaacggacttaaataaattaaattctcgtttacaagagagtataaataatcggcgtcagcacataaacaaactcggacttgccgcaattagatcaaaagtggatctatttaaactattattagatccactaaagaataacaaagtacaattacaaaatacaccgatgtcgatgattcaaatcaaatttatatcagactgtctgatggaacatattgactcgataagtacacaacaatgtgatgacataatgttagagattgatcgattctacaaatggctgcagtttgagagcataatgtatagaccctatttatataaatcagaagtcaaacgtatggttgaaacagtaacacagcttttggatatgccctaccgatttactaagtctagaaacgattttgttaaaatacatttagaagatctaaaaaaagaaactgcttcaaacattgctttaactgacgccgaaagaaaagaaattgtaaagcgatgggttttaaacaaggccattggtataaatgtcccaatggacatccatattgtattgcagattgtggtggagcaatggttacgtcagtttgcaatgaatgtaaggaaccaattggaggcaactcacatagattgttatctacgaatcaagtagcaacagaaatggatggagcaagatatggagcttggtcagaacaagcaaacatgaataattat

SEQ ID NO: 4667 - DNA, 674 bp, Diabrotica virgifera
  SmartBlast Evalue=8E-19; Info=ZNFX1 protein (Fragment) n=1 Tax= Homo sapiens RepID=Q6P6B6_HUMAN
gtttagaaaatacaaatcatggcatgcgtcagtacataaacaaattcggacttgctgccattagagcgaaagtagatctatttaaactgttattagagccactaaagaatggcaaatacgattaaaggatacaccaatgtcgatgattcaagtaaaatttatatcagactgcctgatggaacatgttgactcgataagtaaacaacaatatgacgacataatactagagattgatcgattctacaaatacgtgcaattcgagagcataatgtataaaccctatttacataaatcagaaatcaaatgcatggtgaaacagtaacacaacttttggatagtccccagcgatttactaagtctagaaacgattttgttaaaatacatttagaagatctaaaaaaagaaactgcttcaaacattgctttaactgacgccgaaagaaaagaaattgtaaagcgatgggttttaaacaaggccattggtataaatgtcccaatggacatccatattgtattgcagattgtggtggagcaatggttacgtcagtttgcaatgaatgtaaggaaccaattggaggcaactcacatagattgttatctacgaatcaagtagcaacagaaatggatggagcaagatatggagcttggtcagaacaagcaaacatgaataattat

SEQ ID NO: 4668 - DNA, 2071 bp, Diabrotica virgifera
  SmartBlast Evalue=2E-91; Info=Programmed cell death protein 10 n=3 Tax=Aculeata RepID=E1ZYX7_9HYME
atagaatatagttgattagaatagttcaattcgagataataggtgaatataattatcctaaaaccagaaaatatgacaatgggagatgaaactccagtgacaacattaatactgccagtattaatacgccctattttatcagagttggagaagcaagatgtttcagcatcacagacacttcgttctgccctcacaaaggcagaagcttcccatccgggacttacatatgattttattatgggcattttacgaaaaggtgatctaactgtgaacatgaatgagagtatcttacgtttacaaggagctgtatcagattctgatgttgttgaataccgtctaactcgttcggaagatgcatttcaagaattaaacagaaaatcagcagctctgaaaaggatactcagcagaattccagatgaaataactgaccggaaaacgtttttggaaaccataaaggaaattgccagtgctataaagaagttactagacgctgtgaatgccgtaaatggtttcattccaggtacaactggaaaacagtcgttagaacagcgaaaacgagaatttgtcaagtattccaaaaagtttagtaatacattaaaagaatattttaaagaaggacatgccaatgcagtatttgttagtgccctatatctaattcaccagactaatatgataataactacagtaaagagcaagtgtgaataggaaatgggatagagaaaatataatgatctctttctgttaacagttcaaattagcaaatgactatgcaagcgatggcaggttaaataaaatcaatagttccttcatttgtccataaatcgattgtgtgtgctttttgtgtattgtagaaatattcattgaaaattaatattatagttactgttattacaaaatgatactaaaatataggtccatatattcaatcaaacaattcaaaataataattgctcaggactaagaagacatacatacaattactagatggcactagaagaaacctaggtcataacaatgggagattccatattttaaaagaaaatatctagttttgtttcttctgcgaatgttcctattatatttttgtttttgatcgactcccaagatttttttttataaatattcttagttatagtgtgtgtacctatttacatttagcaggttatttagcaatttttatggctgcagtgttgtcagatactgcaaaggtactgtaataagaaactgtaagaaatatttactattgtgaacatttttggttattaaagtgttttggatgacacaagggaaaacctaagcggactcgtacatcaaagtaatatccaaacgcaacatgaaacacagggttaacatcagggtggccacgtcagtttttatttcttcagtagttttgctttcaaaaaatcagtagaaaccagtagtttttaagccttgtataatacagtaaaatctgtgttaacggccacctgtcaaaatcgcccacctgtactaacggctagtttcaaaataacggcccctttaaaaattctccaaatcaattatgtatgtagatttccttatttttgacctggtatttacggccacctttataatacggacgcagccaaataatctcatattatattttaaagccttcatagaagttgacctgttaagcttgtctaattaattattaataataatttgtgattaatatattaaaatttattaaacgtaattaattaaaatttaaattaaataagttgagggtatttctggtgaaactggtgtagtaacaaaaaatatggcgtcagatgctttcagtgtcattgtacttgcatgcaatggcgtcttctttatttcaaagatatttagtaggtttcattcttcaacgcaaccctgtataaacaaaatcaaagcttgactatcctatacgaagactgttattttatgatagagcacatcgatttaccattatttattggtttgtattttgcctgccattctattttatcatagttacttccttataaattcctaggagatttattaattttagttgtgactttatttgtaataaatttttaaatag

SEQ ID NO: 4669 - DNA, 1319 bp, Diabrotica virgifera
agttcaaattagcaaatgactatgcaagcgatggcaggttaaataaaatcaatagttccttcatttatccataaatcgattgtgtgtgctttttgtgtattgtagaaatattaaaatttgtattatagttattgttattacaaaattatgctaaaatataggttggtccatatattcaataaacaattcaaaataataattgctcaggactaataagacatacaattactagttggcactagaagaaacctaggtcataacaatgggagattccatattttaaaagaaaatatctagttttgtttcttctgcgaatgttcctattatatttttgtttttgatcgactcccaagatttttttttataaatattcttagttatagtgtgtgtacctatttacatttagcaggttatttagcaatttttatggctgcagtgttgtcagatactgcaaaggtactgtaataagaaactgtaagaaatatttactattgtgaacatttttggttattaaagtgttttggatgacacaagggaaaacctaagcggactcgtacatcaaagtaatatccaaacgcaacatgaaacacagggttaacatcagggtggccacgtcagtttttatttcttcagtagttttgctttcaaaaaatcagtagaaaccagtagtttttaagccttgtataatacagtaaaatctgtgttaacggccacctgtcaaaatcgcccacctgtactaacggctagtttcaaaataacggcccctttaaaaattctccaaatcaattatgtatgtagatttccttatttttgacctggtatttacggccacctttataatacggacgcagccaaataatctcatattatattttaaagccttcatagaagttgacctgttaagcttgtctaattaattattaataataatttgtgattaatatattaaaatttattaaacgtaattaattaaaatttaaattaaataagttgagggtatttctggtgaaactggtgtagtaacaaaaaatatggcgtcagatgctttcagtgtcattgtacttgcatgcaatggcgtcttctttatttcaaagatatttagtaggtttcattcttcaacgcaaccctgtataaacaaaatcaaagcttgactatcctatacgaagactgttattttatgatagagcacatcgatttaccattatttattggtttgtattttgcctgccattctattttatcatagttacttccttataaattcctaggagatttattaattttagttgtgactttatttgtaataaatttttaaatag

SEQ ID NO: 4670 - DNA, 1908 bp, Diabrotica virgifera
cgttgtagctcatttgaaaggtgttttaagttctctattcagtaatagaacattgacataactatttatacagggtgccgaaaaaaatttttttggtttaaatttgttgacataaaaagaggaatatgtgtaatttgtttaattcaagatacattttactgctctcagaaaacaggaaaagaatgtttttttgaaaaaaaaatcattgctttttgcttaaattaaatgctcaaattgtcaagaggcaggtgggtggctgcccagatagcacaagtacgttttatggacatccaatggacgtacatctgtgtacattggaacgtccaatggacgtcccgctaaggtacaatggacatccgatggacgtccaacgaatgtccagagttcacaaaattggacgtccatagaacgtccgctacaaacgtacattgtacgttgtattgaagctttcagtgtacaccttatgtacattcaatgtacgtcttatggacatttgtagggcacttttcagaaagcaatctagtatccataattttgtgaatacatagcaaaaagcctttataggaaatagttccttataatactaaacttatacttaaaaatattacacaaaagacctttttatttctctttactataacttcattataatatatatactttattataggaactaggaacttcattaatgcacgactgcacttgcacgataaacagaaaacacaaatatatcacaggatgtattttcataaagacgagattcagataatgacgccctaggaagcatgcacattaaaagaggtttaatctctgttctgtttctgttccaaactatttttagagtcagtaccgttgttgtatattacaagcgcgtttgccattctgtgaattatcataaataaaccatccttcagtattccacaacaattaacagcgataatcccctaaaagtacctgcctaatactactttcacgaccgatagcgcgaagagcgacaacgttgtcaagaagattctcatttagtttgtattgggacttaatataatagtcgcgttttgtgtaaaatatccatggaccacaaatggatgtccaatgtacgttgaaatcaaacgtccaatggacgtcccgtaatgtacgtacatagtacgtccagttttggtccatggacgtttggactttaaatgtacgttatatggacgtacatcggacgttgtgtgctatatgggattatttggtattttgacaacgacacccgacttgggcgtcgaaacgttaataaaatcatttttaggtaaaattgtggcttatttcccatttgaaaatacttgattataaaaatgccacaaggaaatagcctcagaacaacattataatagtttgatagtgtgtataacctcagctttcaaaatacttgcgccatacaaatggtctcccagttgtggtggtttttgtgttctgtgatctttgaacaaattatctgtgtacatttaccaagtattaagtatatccctagggtccttattagttcatcttggtccttatgtgtaacagtgacttttttatatactagtggcaaatattcagctataattcgtctcctatttgggagtaagtttaatcgttttaatgagactgtttagtggtttgtgccatacatttcacatttcatctccattttaaaaatatgcacaaagcattgaataaaaactcgataacttattgtgaatacataataagacattgtagcgagtactattttatatttctatatatattttttggttatgtgtagaatacttagattccttaatcattttatatactgaagactgtactgtatagcaatatattgctttttgttgaactttgtaaacaaacatgaaaaataaatgttttgttgatattaat

SEQ ID NO: 4671 - DNA, 1477 bp, Diabrotica virgifera
cgttgtagctcatttgaaaggtgttttaagttctctattcagtaatagaacattgacataactatttatacagggtgccgaaaaaaatttttttggtttaaatttgttgacataaaaagaggaatatgtgtaatttgtttaattcaagatacattttactgctctcagaaaacaggaaaagaatgtttttttgaaaaaaaaatcattgctttttgcttaaattaaatgctcaaattgtcaagaggcaggtgggtggctgcccagatagcacaagtacgttttatggacatccaatggacgtacatctgtgtacattggaacgtccaatggacgtcccgctaaggtacaatggacatccgatggacgtccaacgaatgtccagagttcacaaaattggacgtccatagaacgtccgctacaaacgtacattgtacgttgtattgaagctttcagtgtacaccttatgtacattcaatgtacgtcttatggacatttgtagggcacttttcagaaagcaatctagtatccataattttgtgaatacatagcaaaaagcctttataggaaatagttccttataatactaaacttatacttaaaaatattacacaaaagacctttttatttctctttactataacttcattataatatatatactttattataggaactaggaacttcattaatgcacgactgcacttgcacgataaacagaaaacacaaatatatcacaggatgtattttcataaagacgagattcagataatgacgccctaggaagcatgcacattaaaagaggtttaatctctgttctgtttctgttccaaactatttttagagtcagtaccgttgttgtatattacaagcgcgtttgccattctgtgaattatcataaataaaccatccttcagtattccacaacaattaacagcgataatcccctaaaagtacctgcctaatactactttcacgaccgatagcgcgaagagcgacaacgttgtcaagaagattctcatttagtttgtattgggacttaatataatagtcgcgttttgtgtaaaatatccatggaccacaaatggatgtccaatgtacgttgaaatcaaacgtccaatggacgtcccgtaatgtacgtacatagtacgtccagttttggtccatggacgtttggactttaaatgtacgttatatggacgtacatcggacgttgtgtgctatatgggattatttggtattttgacaacgacacccgacttgggcgtcgaaacgttaataaaatcatttttaggtaaaattgtggcttatttcccatttgaaaatacttgattataaaaataataaacgagacagtttaataattaatgtctaactgttactatttcccccttaactcgaaaaatatcgacagcacaaaaaaatttgtaataaaatttcagtctttacactttttgtggaaaagttgaaaatggcggag

SEQ ID NO: 4672 - DNA, 1734 bp, Diabrotica virgifera
  SmartBlast Evalue=2E-98; Info=UPF0468 protein CG5343 n=22 Tax= Eukaryota RepID=U0468_DROME
caaatattgtttgttgacatgttgagcaagatgatttaaatctttcgtaaaaatgttcaaaaacacttttcaaagtgggtttctctccattctatacagcataggaagcaaaccgctccagatttgggacaagaaatacaaaaatggtcatattaaacgaatcaccgacgaagatatacagtctttggtactggaattaatagggtgtaatgttagtaccacgtatattacgtgccctgccgatcctaagaagactttaggtataaagttgccttatctagtaatgatagtgaagaatttgaaaaagtattttactttcgaagtccaaatattagatgataaaaatgtaaggagaaggttcagggccagtaactaccaatcaactacaagagtaaaacctttcatatgcactatgcctatgaggctagatgaaggatggaatcaaatccagtttaatgtggctgacttcacaagaagagcttacggaacaaactacgttgagactctcagagtacaagttcatgcaaactgtaggataagacgggtatacttttctgataggctgtattctgaagatgagttgcctgcggagtttaagctgtttttacctatacagaacaaaccaaaagcacctcagactatcagagcttaaatggtctcttggaatttaagaagtttttcttaatgatctcatgtttcaatgatccatacaaaatatattgtgttttttaggtatgtttatttttaaatggggatttatagtgtgattttaaacttaaaacgctaagcttcatctcctggtgatgataggattaaaatcgaacatatacgagttcataatcataataacggagataccattgtagcttagtgttcttcattgttttttatatacatctcaatactttttccattatattaagaaaactttactgatctttttaagagatacctttcttaaaatcatctggatacattttggcatttttttattttacaggcttttgttttagtttcaccggacacgcaccaactcgcaacttttaatgacaaacattttcaaatcaaaatgtataccggccaattcgtaacttttctactacctgaccctgccaactcgaaactttatacaggtgaattcgaaactattgcttaaatcttatacctcaggtattcagatgcagatgcagaacagtaccataaatgttttccactttttagcactttctttaagttgaaatttaaaattatttaccactaataacttacacccatgttcactcattacgaaatctgttacaagaattacagccattttaacaaaatttatttttatttgcattttctctaataactcttccaagagacactacataaatgatgagtaccttttacaccaccttcaaagagggtagtttatacaggaacataaatatctggaatactggtattagattaaaaacatcgtcaagaactacttagaaaatgaaaattacaaattcaccggtagttgatgggttatcgaaaaattagctgagggccagagtggccagttggcttggaattacgatgggagattaaaatagttacaattcaccgttacccatttcacccaaagtttaactttattgtgttccttaacccattacagtttttattacacctgataaaacttttggtatttttcgttaatttttttttgttaaggtactagtacactttagaagatcaaaa

SEQ ID NO: 4673 - DNA, 1613 bp, Diabrotica virgifera
  SmartBlast Evalue=1E-98; Info=UPF0468 protein CG5343 n=22 Tax= Eukaryota RepID=U0468_DROME
caaatattgtttgttgacatgttgagcaagatgatttaaatctttcgtaaaaatgttcaaaaacacttttcaaagtgggtttctctccattctatacagcataggaagcaaaccgctccagatttgggacaagaaatacaaaaatggtcatattaaacgaatcaccgacgaagatatacagtctttggtactggaattaatagggtgtaatgttagtaccacgtatattacgtgccctgccgatcctaagaagactttaggtataaagttgccttatctagtaatgatagtgaagaatttgaaaaagtattttactttcgaagtccaaatattagatgataaaaatgtaaggagaaggttcagggccagtaactaccaatcaactacaagagtaaaacctttcatatgcactatgcctatgaggctagatgaaggatggaatcaaatccagtttaatgtggctgacttcacaagaagagcttacggaacaaactacgttgagactctcagagtacaagttcatgcaaactgtaggataagacgggtatacttttctgataggctgtattctgaagatgagttgcctgcggagtttaagctgtttttacctatacagaacaaaccaaaagcacctcagactatcagagcttaaatggtctcttggaatttaagaagtttttcttaatgatctcatgtttcaatgatccatacaaaatatattgtgttttttaggtatgtttatttttaaatggggatttatagtgtgattttaaacttaaaacgctaagcttcatctcctggtgatgataggattaaaatcgaacatatacgagttcataatcataataacggagataccattgtagcttagtgttcttcattgttttttatatacatctcaatactttttccattatattaagaaaactttactgatctttttaagagatacctttcttaaaatcatctggatacattttggcatttttttattttacaggcttttgttttagtttcaccggacacgcaccaactcgcaacttttaatgacaaacattttcaaatcaaaatgtataccggccaattcgtaacttttctactacctgaccctgccaactcgaaactttatacaggtgaattcgaaactattgcttaaatcttatacctcaggtattcagatgcagatgcagaacagtaccataaatgttttccactttttagcactttctttaagttgaaatttaaaattatttaccactaataacttacacccatgttcactcattacgaaatctgttacaagaattacagccattttcacaaaatttatttggatttttctctaataactcttccaagagacaatacataaatgatgaatacattttacaccaccttcaaagaggtacaggtacatacctggaatatcggtattagattacaattacttaaaaaatgaaagttataaattcaccggtagttagtaggttatcgaaaaattatctgcgcgtcagagttgccagttgacctgtaattaggatgggggattaaaatagttacaaattcaccgggacccaaagttaatactttggtataactccaaatcaatccaa

SEQ ID NO: 4674 - DNA, 1982 bp, Diabrotica virgifera
  misc_feature (406)..(406): n is a, c, g, or t
atggcacgtaaagaagaaagaagaacagttgtaccgacataccagcggaattacatactgtggttatattttagtatttgttccgtttccttgtatctgttatcttttattttagcgtttgttttgttgtcgtgtatccctcgagttttcatttaaatttatatccttttaataattgttagaaatagatatttttaacataacaagtaaataaaaataatataaaataaaaatttgttttaactgtcgtaaggcggtgcggggtgcagctgaccccagacctcgttttctcacctatcttttttaataatttttttttgatttttgtccatttttttattcgtattaaatttaattctaaacgcattccacccattacagaatttacaactctttgcgtttacgngtttttttttttggaaaaatgactaaggtgcaaatgatgaaaatttcataccgaattagacgtttctgttgttccacctggaactaacagagctatgggacaatgtcggtgttagttatgtcagtgaaaaaagaccgaaagtcccggcataactgtattgtgtgtaaaaactttgtgttgctcacactgtgaaaaatttcatgtgtttgtcttgcagcgataatattgtttttaagaagaaatgagtactttgtttgtaaaattatgtttcttattatgaaaaacaagtcctaattatctttcaaatcaatttccccaacgttcacatataaaaaaatggatatacggatggggtgcaaatgcaccccgcaccgttgtttacgaaagaatctaagcaccgccttacgagggttaaatacgtaccatgtagcacttcgaacgatatatcacttgcgatctgctgtgcaatcgcgcggaagtgaaccattgtcatcgtctctatttaaaattttaagtatttgtttgtgcgtatcgcctgtagcatatctactatataatatcgtttatcttttatcgcctgagtatgaacgccgcctaagggtgcggccagacttgcgagcgatttttcttaagagacaaatcgtggacgactgaactccaaaaaaatatttcaaacccaatgaatattattacagtggccatacctaaaaaatcgcttagcaaaaaatcgctcagcggctaagcgtgtcgctccgtttccaattcggtttgatttataagcgactttagttccattttatctccaaactaaacagcacgatgtcttgttccaaagatattttaatttccgatgtgaaagtagaccccattttaattttatttaggtgtacgtcaaatttgtttatgctcattctgagatactggaaaaatctgtacgagtattttcgtaactgtttgtataagtgatgtaattccccgtatgctttcctatatctattaatggtatgtacaccatacttcattttgccttttaacaaacctctatgaatggatcatcttctaaaagaagggaacttcgacgccttcgtgtgagaggcatgacaaaaactgatatttgaatcgcttttcggtggacagcttctcgcttgtcgcccgctacattgccgtgaacgatttatctcgcgcgataaatcgcttgcaagcctgtccgcacccttagatataaaatatcgcgcgaccgatcgtgtgacagaaaagagcgcgactgttcccggattaagtaccattctatagtaactacaaagatgattcaaacatgatcaatttcaaatccacaaggaaaaagttttcctgtagctgtataccatatattctttttctcatgatcatctttcagtgcgtcacagtttttcgatttctttctaacgtattaaattgtatatgacagaaaaaaaggcacgtcggtgattacttcggtaattatttctagttcggtgattattctagttgtcgatagatggcgccataataaaaaattattttttttaattagataataatattacaaatataatct

SEQ ID NO: 4675 - DNA, 1374 bp, Diabrotica virgifera
gtttgtcttgcaatgataataatttttttttaagaagaaatgagcactttttttgtaaaattatgtttcataggataataaacaagtcctaattatgttttaaataaattttccagacatttacttataaaaaaatggatatacggatggggtgcaaatgcaccccgcaccgttgtttacgaaagaatctaagcaccgccttacgagggttaaatacgtaccatgtagcacttcgaacgatatatcacttgcgatctgctgtgcaatcgcgcggaagtgaaccattgtcatcgtctctatttaaaattttaagtatttgtttgtgcgtatcgcctgtagcatatctactatataatatcgtttatcttttatcgcctgagtatgaacgccgcctaagggtgcggccagacttgcgagcgatttttcttaagagacaaatcgtggacgactgaactccaaaaaaatatttcaaacccaatgaatattattacagtggccatacctaaaaaatcgcttagcaaaaaatcgctcagcggctaagcgtgtcgctccgtttccaattcggtttgatttataagcgactttagttccattttatctccaaactaaacagcacgatgtcttgttccaaagatattttaatttccgatgtgaaagtagaccccattttaattttatttaggtgtacgtcaaatttgtttatgctcattctgagatactggaaaaatctgtacgagtattttcgtaactgtttgtataagtgatgtaattccccgtatgctttcctatatctattaatggtatgtacaccatacttcattttgccttttaacaaacctctatgaatggatcatcttctaaaagaagggaacttcgacgccttcgtgtgagaggcatgacaaaaactgatatttgaatcgcttttcggtggacagcttctcgcttgtcgcccgctacattgccgtgaacgatttatctcgcgcgataaatcgcttgcaagcctgtccgcacccttagatataaaatatcgcgcgaccgatcgtgtgacagaaaagagcgcgactgttcccggattaagtaccattctatagtaactacaaagatgattcaaacatgatcaatttcaaatccacaaggaaaaagttttcctgtagctgtataccatatattctttttctcatgatcatctttcagtgcgtcacagtttttcgatttctttctaacgtattaaattgtatatgacagaaaaaaaggcacgtcggtgattacttcggtaattatttctagttcggtgattattctagttgtcgatagatggcgccataataaaaaattattttttttaattagataataatattacaaatataatct

SEQ ID NO: 4676 - DNA, 1685 bp, Diabrotica virgifera
  SmartBlast Evalue=2E-77; Info=Sans n=1 Tax=Culex quinquefasciatus RepID=B0XBG5_CULQU
ttttaccgttaggtaaatagcagtgtattgtatttgtgcaccggattttgacagaaatatattgtatttaaattattaaagtgagaagagtagtatatttaataccgatgtggtcattgtaatttttcttttataaattttgtttagtgtaggaaggagtttctagcaaacaagatgacaacaaataggtttcataaagctgctaaggatggaatgttagaggtcttaaaggagacaacatcgagagactgcaatacaagagatgagcaaggcatgacaccgaccttatacgccgcattttatggaaatttagatgctttgaggttactatgtggacgaggcggaaacccagacaaagctgatctgttcggcaatacggcccttcatctagcagctgcacaaggtcacaaacatatagtaacgtttctagtcaattttggtgcaaacatatactccatggacatcgataaaaggactccacaagaactcgcgggaatcaacaacagagatgatattttaagatttatagatggtatccaagctaaaatggaagcaacagataagaaaaaagctaagactatgcaagataaagccaaagaagaatacaaaaagcgaatgaaaaactttaataaacaaatggcaaaacaagaaaagcaaaacgagaaactagaaaggcgaaaaacgaaaccctcaatgatgtcaacttggaagtcaaaatttatcggcggatccatgtccaacctagctgtcgacaatcaagcagaaagaagacccacttacagttcgattataagcggtacggttaaaggaaatatgagtaccgtacaaaggaaaattttagccaataaaaataatagattaggacaaaatggcgaagaatttagagtaagccacatagaagatggaaagctaactataagctctctcaaaggtattacccgagattcggaggtattatacgggggtactctagaagccgtaggttttaaagaaagagggcgtttggatagcatatttaatgaagccgaatctataacgtccatgcctacaaatcctacagctgctcctcctcctggtcgtttgactagatccttatcacaacccgactttttgcaagaaatgaggaaaaacgccgaggataagatgcaagaaccagccagtatttttattagaccaggaataggaagtatagtcattagaaaaagcatcacacaaaattcgtttggtaaattttacggtaatcatgaagaaagttctataggttctggagaaagttatggtcctcgtcaaataacagacgatgaactctcagatactggatccagtgaagacgaaaatcctcacggtcctttggaaagatttttaacagcctttggactaagagaatacctggacacacttgtacagcaaaaaatcgacttggacactttgatgattttagaagaaagcgacctcaagagtcttaatttacccattggttctcacagaaaattggtacttgcaattaacgaaagaaaagctgccttggaaaatcccggagaagttaaggatacgatgctgtaaataggtgtaaaattatgtataaatattatatttaatatatttatgtctatttttaattgtaaatgcaagacgtgctttctttattctgaattattatgggtaaagtaataaagttgattatt

SEQ ID NO: 4677 - DNA, 1675 bp, Diabrotica virgifera
  SmartBlast Evalue=2E-77; Info=Sans n=1 Tax=Culex quinquefasciatus RepID=B0XBG5_CULQU
gttaggtaaatagcagtgtattgtatttgtgcaccggattttgacagaaatatattgtatttaaattattaaagcgagagtagtatatttaataccgatgtgatcattgtaatttttcttttacaaattttgtttagtgtaggaaggagtttcgagcaaacaagatgacaacaaataggtttcataaagctgctaaggatggaatgttagaggtcttaaaggagacaacatcgagagattgcaatacaagagatgagcaaggcatgactccgaccttatacgccgcattttatggaaatttagatgctttgaggttactttgtggacgaggcggaaacccagacaaagctgatctgttcggcaatacggcccttcatctagcagctgcacaaggtcacaaacatatagtaacgtttctagtcaattttggtgcaaacatatactccatggacatcgataaaaggactccacaagaactcgcgggaatcaacaacagagatgatattttaagatttatagatggtatccaagctaaaatggaagcaacagataagaaaaaagctaagactatgcaagataaagccaaagaagaatacaaaaagcgaatgaaaaactttaataaacaaatggcaaaacaagaaaagcaaaacgagaaactagaaaggcgaaaaacgaaaccctcaatgatgtcaacttggaagtcaaaatttatcggcggatccatgtccaacctagctgtcgacaatcaagcagaaagaagacccacttacagttcgattataagcggtacggttaaaggaaatatgagtaccgtacaaaggaaaattttagccaataaaaataatagattaggacaaaatggcgaagaatttagagtaagccacatagaagatggaaagctaactataagctctctcaaaggtattacccgagattcggaggtattatacgggggtactctagaagccgtaggttttaaagaaagagggcgtttggatagcatatttaatgaagccgaatctataacgtccatgcctacaaatcctacagctgctcctcctcctggtcgtttgactagatccttatcacaacccgactttttgcaagaaatgaggaaaaacgccgaggataagatgcaagaaccagccagtatttttattagaccaggaataggaagtatagtcattagaaaaagcatcacacaaaattcgtttggtaaattttacggtaatcatgaagaaagttctataggttctggagaaagttatggtcctcgtcaaataacagacgatgaactctcagatactggatccagtgaagacgaaaatcctcacggtcctttggaaagatttttaacagcctttggactaagagaatacctggacacacttgtacagcaaaaaatcgacttggacactttgatgattttagaagaaagcgacctcaagagtcttaatttacccattggttctcacagaaaattggtacttgcaattaacgaaagaaaagctgccttggaaaatcccggagaagttaaggatacgatgctgtaaataggtgtaaaattatgtataaatattatatttaatatatttatgtctatttttaattgtaaatgcaagacgtgctttctttattctgaattattatgggtaaagtaataaagttgattatt

SEQ ID NO: 4678 - DNA, 1704 bp, Diabrotica virgifera
gttaatgaactaattatgtgttattgagtttaattaaattaatttttagcctacattttcatgttacctatttttatactattttgaaacatctgaaagagaaaaaggtcactttttgaaagtattacagacgtgattttacccacggcgacgcgtaaaagtaccgacgtctttttgacgttttaaaatcgtcacaattataacgtcaaatcaatgagacaaatacaggtgattttcaatgtcagtactacgtcatagaaacacgtcaattggtcatttttatgacgtgttatctacgtcataaaaacgtcgtttggttgcctgggatatagtacagatagtaaaaaaatagggttagccgtcaacgttgataaaactaaagccctaatacaagcaaggaaacaaagaaacttacagaatttgataatcgacgatgctaacattgaaatagtaaaacagctcacatacctgggtgtacagatacagataactgaggacggaagcgaagaggaggaaatgcgaaaacggatcttgctaacatagtatactccctctatctatctattacaaagaaccctctttgcttgatacctgtaatctatttatgtaatagtaggtactaaattgccaaataaaataaactccaaatttctcttcttctctaacaaataggcgtggatcaatgtttttgcacctgactgtatattgcagtaacgaaacatgaatatatatacaatggaatctttgccatgagaaaatgagtatggaaaagtcaaggctaaagtagaaggacggtgtaacgtctgggaaaacacactcatgaagattgaggctcaagattgattgtcaattgatgatgaagaatgaaacaccgtttacaacttttatttaatgaaagaaaaacaatgaaatgtgtccgttttattggaaaattacttcttgttctcttaaagaatctgtctattcagatattttcatgtcaatattattctctgctaaacaatagtggacgttacaacaaaatattgtacctaatatattttgaaaaatttatattttaataatttactcgcagattccactaaatctcggataatatataacaatcaatgctgacattatataactgatctaacaaatttcttagaaaactgttattttattatgtatttaatactagaggtaacactttcctaatttgcgcatttttcaactgaaaacattaacaaccttcaaaaattttttgatgcttagtatgcgaagaagacaaataagcaacatatttttgcaattagttattagttcgtcctttaaaagataaaactagtaaaatatcaaatacaaaaattaaataaataagtattatactgcatctctttttataattccacttaaatacgcagtttattttcgtcttggttcagaagtgttcacgtagccctactgaagacgtctagagacagaaacagctgtctagggatggtggatattctctgaatcgtaaggaaacatgaactgtcgttcacttttatctttttttttgtatatttcaaatttcaagccataatgacgaatcatatacagtacgtaaatcgttcagctggacataaggaatatacattgtatatatttagattcataaatacatacattgtattatgtatattgagataattttggcaactgagctctctcgatgacaat

SEQ ID NO: 4679 - DNA, 1644 bp, Diabrotica virgifera
ttatcgagtttaattaaattaatttttagcctacattttcatgttacctatttttatactattgtgaaacatctgaaagagaaagaggtcactttttgaaagtattacagacgtgattttacgttttaaaattgtcacaattataacgtcaaatcaatgagacaaatacacgtgattttcaacgtcagtactacgtcatagaaacacgtcaattggtcatttttatgacgtgttatctacgtcataaaaacgtcgtttggttgcctggatagtacagatagtaaaaaaatagggctagccgtcaacgtagataaaactaaagccctaatacaagcaaggaaacaaagaaacttacagaatttgataatcgacgatgctaacattgaaatagtaaaacagctcacatacctgggtgtacagatacagataactgaggacggaagcgaagaggaggaaatgcgaaaacggatcttgctaacatagtatactccctctatctatctattacaaagaaccctctttgcttgatacctgtaatctatttatgtaatagtaggtactaaattgccaaataaaataaactccaaatttctcttcttctctaacaaataggcgtggatcaatgtttttgcacctgactgtatattgcagtaacgaaacatgaatatatatacaatggaatctttgccatgagaaaatgagtatggaaaagtcaaggctaaagtagaaggacggtgtaacgtctgggaaaacacactcatgaagattgaggctcaagattgattgtcaattgatgatgaagaatgaaacaccgtttacaacttttatttaatgaaagaaaaacaatgaaatgtgtccgttttattggaaaattacttcttgttctcttaaagaatctgtctattcagatattttcatgtcaatattattctctgctaaacaatagtggacgttacaacaaaatattgtacctaatatattttgaaaaatttatattttaataatttactcgcagattccactaaatctcggataatatataacaatcaatgctgacattatataactgatctaacaaatttcttagaaaactgttattttattatgtatttaatactagaggtaacactttcctaatttgcgcatttttcaactgaaaacattaacaaccttcaaaaattttttgatgcttagtatgcgaagaagacaaataagcaacatatttttgcaattagttattagttcgtcctttaaaagataaaactagtaaaatatcaaatacaaaaattaaataaataagtattatactgcatctctttttataattccacttaaatacgcagtttattttcgtcttggttcagaagtgttcacgtagccctactgaagacgtctagagacagaaacagctgtctagggatggtggatattctctgaatcgtaaggaaacatgaactgtcgttcacttttatctttttttttgtatatttcaaatttcaagccataatgacgaatcatatacagtacgtaaatcgttcagctggacataaggaatatacattgtatatatttagattcataaatacatacattgtattatgtatattgagataattttggcaactgagctctctcgatgacaat

SEQ ID NO: 4680 - DNA, 2459 bp, Diabrotica virgifera
  SmartBlast Evalue=1E-35; Info=N-acetyl-glucosamine-6-phosphate isomerase n=1 Tax=Bombyx mori RepID=Q2F5I1_BOMMO
gtggggtaattaaaaatacagtttttttctttttattcattactgtaatgtcaaaaaacatttttttatgtactttaatacataaagagtaatataattagttagataattttaagttcaaagaccctcgtttgtaataaacgccaaaatgtccacaaattctagtccgacccattacacagaagatgcgtttgtcagtgatgctaattttaaagttggaattaatcaaaagatgaaggttcccgacaggattagttttgccacagatttaaacggagagagcagaggttcatggaccagggataacttgaacatgaacgtcccagaaaggatattggtagcaggtcaacatcaacatgttggtactagagccccacctagagaaatagtattcgataatgcaatcattgctaaggacccacacccatacgatctaccacgagtagcaaccccaccacgtactttaaccctcgacaaatatccgttcccaggagtggatgaatatcaagaccacgacatagaagaccacctacctgtagtaaaagccacccccaaagttcgtatgaacgacgtaagctttcaattaggaaattcttttaacgaatcgacccaaatatattcaggtgctggagagggactgacacccgccgaagaagtgatgcatttacgacgacagatggcgaagttgaacaggaggatcatggcgttagaattggagaatattaatagattacaaaaagaaaaaatagtggttggtttcggtgtcgcctatttccttttaaaagttataatttggatgaatagggattaatgttttgaatttgtgttatagaatagtctgggaggtcaaagtagtccgaaaattggtcagatcaataagtattaatgccgattttaaaagctaaactgaaacaagtgctgtattttgcattttgacgaagtttatctgtcatatttttggtgattattcgtgatagtgaattcattgcatttattaaaaatatgagaaataaggtttatatcatccaccaagcaaggtatcaatatttaggttccttttatgtaatgttattggggcaaacaaaagggttttcgacccttttcgcaaacaaaagggacagatcgaaaatatttcgcttgcaaagtgaaagattttaaaattgcctatttaaggccattatttgcaaaactcactctttgcttttcgaaaaaattttgggaggtcgaagaaaaaaacgattaacagccaaatagtgtttagttcacaacataaagaattttattaatgttgcttagagtttaagcaacattattgacatagaacgtcaaagcataactgaaaagtctcattgttccgaaataaaaaaatattgattttattgctaaatgactaatgacactaccgccattaagcggaacagagcaaaatgcaaaattttgactcatgtcaggattttcattgtgttttaaatgtattcatttttttcaaatcctgagaaaactaataagtatttttgaaaaatttaatgcagaatgaaagactgctttattaccgagagccgaaagtcccttagaataaataaattttttctttggaatgaaatatttgcaattaaaaatcacactaaattttctcttttattttcacccctgtaacttattaaaataaacattataaaaaacatgaagagaagtatccatatttctcaaatgtggtctcgaagtaacaaagtacaaaaaactcgaagaggtaccacaaagttttcggggacattatagaagttttcagggactttcggcccctggtaatagtgtggtctttcattctgcgtttaaattttttaaaaatatttattacgtttttatatatatgtacgtatacacgtatttatattacgtttatagatattaaagctgcttttgattctataaatagagaagtaatatggtcagtaatggaagatctgcaaattcctcaaaagatagtaagcgtggtaaaaactacatatagtacttgctataaagtacaaataaacggaaacatcgccaacaataaacctaaggagacgaataaaacaaggggacagtctcagtccagttttctttatattagtaatggatagagtaatgaagagcgctaagagaaggtcaaggcaattacagtcaataatagggtacaggaatttagtaccagtgagaatggagggattactatatacagatgacttagtaataatagcagacaataaagagaaaatgcaaaaattaatcgatatctgtgtgaaggaaatagaaaatttgaaaatggaggtaaatgtaaagaaaacgaagaccatgatagtaacccaaaagaaaaggtaagaaataaaccaaacgatacttaggtgcaaaaactaaataatagaaacagtctcgacgtttgaataccttggagtaataatatcagaggatggaaagat

SEQ ID NO: 4681 - DNA, 890 bp, Diabrotica virgifera
  SmartBlast Evalue=2E-33; Info=Endonuclease-reverse transcriptase n=1 Tax=Schistosoma japonicum RepID=C7C208_SCHJA
aggcaagctttggctactggaaataatgagggaagcatggagaacagaaaagataccggaagactgggaagaaaatttattgataccaatacacaagaaaggagatgaagcggaatgtgataactatagggctatatgcttatcatcagtggcatataaagtctacaccgggataatagaaaggaagctcaggaaagaactggaaggaaaactagaagaagaacaagcggcttttaggaaggaaagaggaacaacagataatatatacatactgagaaatataattgaaaggaaaacgaaataggagaagacttatatattacgtttatagatattaaagctgcttttgattctataaatagagaagtaatatggtcagtaatggaagatctgcaaatcccgcaaaagatagtaagcgtggtaaaaagtacatatagaaacgtacttgctaaagtacaaataaacggaaacagatcgccaataataaacctaaggagaggaataaaacaaggggacagtctcagcccagttttgtttatattagtaatggatagagtaatgaagagcgctaaaagaaggtcaaggcaattacagtcaataatagggtacaggaatttagtaccagtgagaatggagggattactatatacagatgacttagtaataatagcagacaataaagagaaaatgcaaaaattaatcgatatctgtgtgaaggaaatagaaaatttgaaaatggaggtaaatgtaaagaaaacgaagaccatgatagtaacccaaaagaaaaggtaagaaataaaccaaacgatacttaggtgcaaaaactaaataatagaaacagtctcgacgtttgaataccttggagtaataatatcagaggatggaaagat

SEQ ID NO: 4682 - DNA, 1792 bp, Diabrotica virgifera
  SmartBlast Evalue=2E-43; Info=210kDa protein (Fragment) n=1 Tax= Sarcophaga peregrina RepID=Q9GV23_SARPE
cattagaccttcttgttacacgttccactttctgtatattctgttgtttagtaaattctccgtaagacctagcttctgactgtccataaaaatgtccacccactgaaagattgtcccttcttactatcttctctggcctttctacaacttgataagtagtttgttgttgatgacttcgtctattcaggttgttggtttcttgattagacctatgcattgaacttaaactatgtctttctgtattgactacagttctgccttgatcatggatattgcaaacagatttacgcatgtctagtgctgaagaactagtggcatgaagagcttccgaagaggtatgaatacctttacgatgcaaaatttgattattgatttcctcagatgtcacagaactctttttgtggtgagaagttttattagatatttctttattagttgtagagtgcgcatgatctacttggtcattgaaaatctgtgaagatttgtgaatattcgttttatggatgtgagtttgagacgaagatttttggatttcgtttacattagtctgttttaggtgacgttcggaatgctgactagcttcttgcgcccctttggttgttactgttgttgtttttattgtcgtagtaacattgccattctgaagcgtttttgtatcagttgcaacatcagtgtgggatttttgaacagttttaacgtcctttttagttgctgtatcgtcttttacgatattgtttatttgagttgtatgtttttctactttattgataacgttattattgataatattattaacagtctttttgtcaacttttctaacgtaagttttataattactttgatttgtcgtttgcatgtttgtggtatcattgcccagcatgatatgagattccgtatgtttatttttattaactatatggcgactaggagatactttcacagttttatcaaagctatcatgtgaagtagtatgagtctccatttttccagtacccactctcagatgatcttcatgtttctttatctctgccctctcacctcttactactgtatattgagatttcgctactgtagtatcctggaattctccaatcatcttcaggttatcctgtggttttctaacaggagctctttctcctctggatggtttaaactcatctctatttcggggtgaaccaaagaattcaccttctggtttaagattatctggatgctttacaatgtcagctctctctccaggaccatacttgggagatacaggtttttcaaattctccctcgggatgtaaattatcttgtggttttcttggtaggtctctctcctggactccagtgggctttctcgggtctttcaaagtcaccctctggacgaagattatcatcatgccttataggagtacgcctttcaccaggtccaattttggtcggtgttggcctttcaaaatctccttcaggtttaagattatcttgaggtttcttaggtgtaggtctctcagttggttggtatttaggtttatcaggcctttcaaattccccttctgggcgtaaattgtcctcatgtcgaataatttctgtcttttggaaattagtactaaattcatctcgttttctatattcattaaactctccaaccattttcaaattatcttcatgttttataatttcacatttttctcctctaactaccctataatcatctctggtacgtaaatccgtaaattctccttccactttcaaattatcctcatgtttgatgacttgagcacgatcaataacagtagtttgattataat

SEQ ID NO: 4683 - DNA, 1538 bp, Diabrotica virgifera
  SmartBlast Evalue=5E-32; Info=210kDa protein (Fragment) n=1 Tax= Sarcophaga peregrina RepID=Q9GV23_SARPE
cattagaccttcttgttacacgttccactttctgtatattctgttgtttagtaaattctccgtaagacctagcttctgactgtccataaaaatgtccacccactgaaagattgtcccttcttactatcttctctggcctttctacaacttgataagtagtttgttgttgatgacttcgtctattcaggttgttggtttcttgattagacctatgcattgaacttaaactatgtctttctgtattgactacagttctgccttgatcatggatattgcaaacagatttacgcatgtctagtgctgaagaactagtggcatgaagagcttccgaagaggtatgaatacctttacgatgcaaaatttgattattgatttcctcagatgtcacagaactctttttgtggtgagaagttttattagatatttctttattagttgtagagtgcgcatgatctacttggtcattgaaaatctgtgaagatttgtgaatattcgttttatggatgtgagtttgagacgaagatttttggatttcgtttacattagtctgttttaggtgacgttcggaatgctgactagcttcttgcgcccctttggttgttactgttgttgtttttattgtcgtagtaacattgccattctgaagcgtttttgtatcagttgcaacatcagtgtgggatttttgaacagttttaacgtcctttttagttgctgtatcgtcttttacgatattgtttatttgagttgtatgtttttctactttattgataacgttattattgataatattattaacagtctttttgtcaacttttctaacgtaagttttataattactttgatttgtcgtttgcatgtttgtggtatcattgcccagcatgatatgagattccgtatgtttatttttattaactatatggcgactaggagatactttcacagttttatcaaagctatcatgtgaagtagtatgagtctccatttttccagtacccactctcagatgatcttcatgtttctttatctctgccctctcacctcttactactgtatattgagatttcgctactgtagtatcctggaattctccaatcatcttcaggttatcctgtggttttctaacaggagctctttctcctctggatggtttaaactcatctctatttcggggtgaaccaaagaattcaccttctggtttaagattatctggatgctttacaatgtcagctctctctccaggaccatacttgggagatacaggtttttcaaattctccctcgggatgtaaattatctggatgtctaattggagtccttcgttcaccaggtccaaccctagatggagttggtctttcaaactgaccctctggtttcaaattatctgctggttttttaggagtagacctttcagcaggtgaccaaccaggcttatctggcctctcgaagtcaccttctggatgcaagttatcttgatgtctaatcggtgttctcctttctccaggtccaattttagagggtgttggcctatcaaaatcgccc

SEQ ID NO: 4684 - DNA, 1726 bp, Diabrotica virgifera
  SmartBlast Evalue=2E-78; Info=CG7120 n=3 Tax=melanogaster subgroup RepID=Q9VSJ3_DROME
cccctcggttgtaagtagaatgttgttggtttcatttacaataaattttgatacttctattactttgggatgatcttgtttgatgtatgtgtgtccttggcaagtacaccaatgttgactaatacctgcatctttacatgttctattttctggaatttcagcgaacaaactctgacagctggaacatccttgactccacgatggtacgtaagaatcattaccaatgttcaatatgctttggaaagtattgtggatatcatagggtgatgtcaatcgatttgtgtttgttatgaaattgttgtattcttctgcataagtctgtttaaagagatctggaaatctgaaatatataaaaggaagcctttcttccacccatcctgtatgggtgaatctaataccaccaaatcggaaaccatgatcactaaaaaatattaaaatggtattatttaatgcttcgagaaattcagtgctagacagtagttccaacatcttcttatccatagcacttggcatattgatattatcatgactataactgttactccaaaacagtccaaaagatggaacatccttaaatgtaacagcgaaatctttagctgcattttgtattctttctccagaagtttctggaccagcacaatagatcatattccttctcaatagagtaccatgtaaagtttctgctgctaaaaaataaggacgataataataatctgtgggttcttctaaaaatcctggacggtcataatggaacgtgttaatattgcaatcgtcctctgcatatccagttatgtattgagattctttaaatttgtcccagataaacccgcaagggttctgtttcatgtgacgggtacaagttttagataactggtctacattatacccagttagtattgccatcaagttaggaaatgtattgtcaccgatcttgttatagccctttaggttaatcatgttcctttcggcccatttgaagcactctggcatggtacgtactatattagattttgacacgctgtctattccaagcatcataatgctaaattttggttttccgtcaggtttcttaggttctttagagattgaaaaagtggtagcgtgaacattgctgtatacttcactgaaaattgtcgaacagtttacactaacgtaaggataatttatttctactgagtcttcgaatggaacgcaatccgtcagcttaacttcggtatctttctttgtttcataattaatcctagtaatatttgaatagcagcattttatgcttaaataactatattcactttgtgcgcttcggttgaaatgtaaagtaacaatgccatttgttttgttaatgtaagatagcaaagttttattcgaacatttttcatacggttctttagaaacaaagtcaataatatcttcgctgtatggattggtttttggtattctacattgggaggtattgatccagtattttatttcttgttggaccggagaatgaacctgatcatcttcttccagaataaaatatgtacttttttcttcattataatagaggaaatagtatacaccaaatactactgcaaaaaatataaaacattcccttgcacgtggacggtacatattcggatgcaattttcttaaaattataacttctataataacataatagcacttttgcacacacaggtaaaggggcacatcggtaaatcaatcagtttagatataactttcaaat

SEQ ID NO: 4685 - DNA, 1589 bp, Diabrotica virgifera
  SmartBlast Evalue=6E-78; Info=CG7120 n=3 Tax=melanogaster subgroup RepID=Q9VSJ3_DROME
cccctcggttgtaagtagaatgttgttggtttcatttacaataaattttgatacttctattactttgggatgatcttgtttgatgtatgtgtgtccttggcaagtacaccaatgttgactaatacctgcatctttacatgttctattttctggaatttcagcgaacaaactctgacagctggaacatccttgactccacgatggtacgtaagaatcattaccaatgttcaatatgctttggaaagtattgtggatatcatagggtgatgtcaatcgatttgtgtttgttatgaaattgttgtattcttctgcataagtctgtttaaagagatctggaaatctgaaatatataaaaggaagcctttcttccacccatcctgtatgggtgaatctaataccaccaaatcggaaaccatgatcactaaaaaatattaaaatggtattatttaatgcttcgagaaattcagtgctagacagtagttccaacatcttcttatccatagcacttggcatattgatattatcatgactataactgttactccaaaacagtccaaaagatggaacatccttaaatgtaacagcgaaatctttagctgcattttgtattctttctccagaagtttctggaccagcacaatagatcatattccttctcaatagagtaccatgtaaagtttctgctgctaaaaaataaggacgataataataatctgtgggttcttctaaaaatcctggacggtcataatggaacgtgttaatattgcaatcgtcctctgcatatccagttatgtattgagattctttaaatttgtcccagataaacccgcaagggttctgtttcatgtgacgggtacaagttttagataactggtctacattatacccagttagtattgccatcaagttaggaaatgtattgtcaccgatcttgttatagccctttaggttaatcatgttcctttcggcccatttgaagcactctggcatggtacgtactatattagattttgacacgctgtctattccaagcatcataatgctaaattttggttttccgtcaggtttcttaggttctttagagattgaaaaagtggtagcgtgaacattgctgtatacttcactgaaaattgtcgaacagtttacactaacgtaaggataatttatttctactgagtcttcgaatggaacgcaatccgtcagcttaacttcggtatctttctttgtttcataattaatcctagtaatatttgaatagcagcattttatgcttaaataactatattcactttgtgcgcttcggttgaaatgtaaagtaacaatgccatttgttttgttaatgtaagatagcaaagttttattcgaacatttttcatacggttctttagaaacaaagtcaataatatcttcgctgtatggattggtttttggtattctacattgggaggtattgatccagtattttattccgtgcttgatcggagaatcaaagtgacttaggtaatcagaagcctgtttgttcacttaaacactggtgttaatcactttaattaaatgactttgttttcgctaaaaatagccaatttatt

SEQ ID NO: 4686 - DNA, 1766 bp, Diabrotica virgifera
  SmartBlast Evalue=1E-151; Info=Chaperone protein dnaj n=1 Tax= Aedes aegypti RepID=Q16R72_AEDAE
gctgtcttcgctggtctctttagtgtctggtttcttaactgtactatcggtaactgtcgattttgaactatttacttctacctcttgtttcctattgttgtttaaatcaatattagtactatcagtatcttttttgtccttaccttctaatacggaacgaatggcctctaaaagaattagtttctcgtttgttgtgaatgttttgttacctataattttaaaaccaagtaaccatcattatgtattatatagtcttctatctataaaattcatttatatatcactgtttggtcaataaaaatgttttaaactatcacttccaaacttagtctagccaaaaattgcttttttgtatttttttaagaaaacctggcgcttcttcagaatgtttcgcttgtgattgttcctcggatcccgcatattgcgctccatctttcttaacagtaattcctaagatttggcccggtgtatcttgttctaattcagcatatgccatcgccaatgctttctgcttttcagttaaatgtttcggagttttaatttttaatactacataatgatccccatgtccataaccattaattttcttcattccttttccacttagacgaattctagtatgggaggatgttcctggcattacctgaattgtgtgatcttcatataatccttggatcctaattgtaccgcctaaaagagcctgtgctactgaaatatctgcctcagtatgaacatctggaccatctctcttgaaatagtctgatttatctaccctaaacgtaacaaatagttccttatttcctacggacattcggactgtttggccgtcttcgatacctgctggcactggaatgctaacttttcttctttgtacagtggaaccttttccttcacattcagtacatttatgtttaatatacattcgggaaccttggcaatatctacacgtggacctcatgacgaaggggccagtagtgatactttccattccagtaccgttacaaaattggcattttgtagcttgggtacctggttcgcatcttgctcctctacattttggacagttgtctactacatttatgtttacatccttggtggttcctctagctgcttgtgtgaaagttattcttaggagaatctcttgagcttcgccaaatccatagtttgattctgcaaaatcttcaaaatgagaagagcctcgagtaaaagcatctccgaaaattttcctaaacaattcttctggatcaattgttgattgatattgccattgctgactgaatccttgtggaccttttgaatggcctcctccaccacccatgcctcccatttgatcagctgttgcaccccaagtgtcatattgctttcttttattttcatctccaagaatttcataggcttcagaaacttcttgaaactttttagatgcttctggatcattcttatttacatctggatgatactttttggccaatttgtaataagctttcttaatatcagagtttgaagcatttttacctactcctaataattcataataatcccgtcttgcggcattgaaactgtgtgacttatgaaacgttcttttatggagtaaagaattttgagttaaattattagctgaccaggtatttagcagtagagatttatgacatctaaagcattgatgaagaaatgttcttgaaattttagtagtaaactgggaatttgaacatagtaatatctgttttgagcctaaaattccaaaaagagttcttgcactacccatt

SEQ ID NO: 4687 - DNA, 1546 bp, Diabrotica virgifera
  SmartBlast Evalue=1E-151; Info=Chaperone protein dnaj n=1 Tax= Aedes aegypti RepID=Q16R72_AEDAE
gctgtcttcgctggtctctttagtgtctggtttcttaactgtactatcggtaactgtcgattttgaactatttacttctacctcttgtttcctattgttgtttaaatcaatattagtactatcagtatcttttttgtccttaccttctaatacggaacgaatggcctctaaaagaattagtttctcgtttgttgtgaatgttttgttaccatctttcttaacagtaattcctaagatttggcccggtgtatcttgttctaattcagcatatgccatcgccaatgctttctgcttttcagttaaatgtttcggagttttaatttttaatactacataatgatccccatgtccataaccattaattttcttcattccttttccacttagacgaattctagtatgggaggatgttcctggcattacctgaattgtgtgatcttcatataatccttggatcctaattgtaccgcctaaaagagcctgtgctactgaaatatctgcctcagtatgaacatctggaccatctctcttgaaatagtctgatttatctaccctaaacgtaacaaatagttccttatttcctacggacattcggactgtttggccgtcttcgatacctgctggcactggaatgctaacttttcttctttgtacagtggaaccttttccttcacattcagtacatttatgtttaatatacattcgggaaccttggcaatatctacacgtggacctcatgacgaaggggccagtagtgatactttccattccagtaccgttacaaaattggcattttgtagcttgggtacctggttcgcatcttgctcctctacattttggacagttgtctactacatttatgtttacatccttggtggttcctctagctgcttgtgtgaaagttattcttaggagaatctcttgagcttcgccaaatccatagtttgattctgcaaaatcttcaaaatgagaagagcctcgagtaaaagcatctccgaaaattttcctaaacaattcttctggatcaattgttgattgatattgccattgctgactgaatccttgtggaccttttgaatggcctcctccaccacccatgcctcccatttgatcagctgttgcaccccaagtgtcatattgctttcttttattttcatctccaagaatttcataggcttcagaaacttcttgaaactttttagatgcttctggatcattcttatttacatctggatgatactttttggccaatttgtaataagctttcttaatatcagagtttgaagcatttttacctactcctaataattcataataatcccgtcttgcggcattgaaactgtgtgacttatgaaacgttcttttatggagtaaagaattttgagttaaattattagctgaccaggtatttagcagtagagatttatgacatctaaagcattgatgaagaaatgttcttgaaattttagtagtaaactgggaatttgaacatagtaatatctgttttgagcctaaaattccaaaaagagttcttgcactacccatt

SEQ ID NO: 4688 - DNA, 2486 bp, Diabrotica virgifera
  SmartBlast Evalue=0; Info=Hydroxysteroid (17-beta) dehydrogenase 4 n=1 Tax=Tribolium castaneum RepID=D6WRU6_TRICA
tttctattttaaatttatatattcaagtaatatataaaatgtataatataaaacatcagttcccttagacaaaaagtgtaaaaatctgctaaaataaagataacagcttaaccaaaaaaatataatttttaacaatcacctcgcattgctataccagacacaacgtaaaaaaatagtttaacagaaatattcattttaaacttaatttaaagtgacgtttacagtttagcattggtcttaagaagaggtgctaatttttgtgccaacatgatgtttccggtgaccttgagttttcccttcatgaaagcttgttgagggttaagttttccttcagccatttgcatgaaatcatcatctgagatggtcaaggttgtgttcggtttgccttcaggttttccttcaaagaccttagcatttttcaaatccatggtccattgtttaacttgtttgccatcctttgtaatattgtacaagaagactccaccaacagatttggctttgctgggatcagccttgacttggtcaatgataaattcgaagatagcgtcactttttaagttggacatactgagtgattttaaagttgctgttgtggattcgttaggtttgacagatttaaggtctatgtaggcacccgcaattacaatacggttgctttcaacagcggaagtttcaaaatgaattctgttaccttctctccacatgtctactttgagggtttgaccaggtagaacaggttttacaaaacgagccttaacagctttaaataatgatgtatcgtgactagcgtatgcgctcaatactagcctcactgaaattcccatagtgcaaagtccatgtagaatagggacgtcataacccactaccttggccatatttggatcgatgtgtagagggttgtaatctcctgacaatctataaagagctgcttgatccaagttggttttatgtgaaagtgatgcgtcgggacttctattgggtttatcttgacatggaaccaattttgcacttgttcttgggccaccgaagtttcctgcaccaactgcaaaacttacaatctggttacggcatattaaattgccgttattatcgaatgtttcaacatcattaataataactgctcctgatcctttgtccaaaacatctacaaccttactcttcgatgtaagtttgccatctagaggtacgtcgccaaaaatttcaatgtactgttcgccgtggagaatattttcaagactaacttgcttaccaggaataatatcaccgaatggattagtaaataaaacttgcatagcaggcatgatgaaaaaggttggtaaaactgaaaagtcttcatggttttcgtacaggtacctgagttcgtccttagttgcaactgaagcaccgactcctaatgcatataaaatagtgtccttagaacaataattaaacacgtcggaaacttcagcatttcctccggactcttcatttgtaaaggacgtcactaaagccatggttacttcctgcatattttctaacctcttagcattggaaatgtctctaacagcttcccaattatccctaacgttttctaaagaaacgccatcggcgagatttttacgtaataaggcaccatctgatctaactatagtacatcgaccagcccaaccagcagctgattctataattgaaccgttttcctggcaactttcatgacagagataagccactactggagcaataagttcaggttttaattgagcaaagacatctggtggtaaaatgtcttcagtaagtctgctagctgctgttggtacgatcacgttacaataaacgttattcttagctccttcgatggctattgtgtttgccaaaccaaccaaacctaatttggcggcagaataatttgcttgcccaaagtttccataaattccagaattggaagatgtcataataattcggccatagttttgttttttaaaatacggaaaagcagcttgggttgctttaaaactacctttcagatgtacattatgaaccaaatcccaatcttgatcagatatcttagcaaaacttttatctctcaaaattccggcgttgttgatcaaaacgtcgatacgaccgaagttatcgattgcagtcttcactatcttttcaccttcaactacagagttatagtctgcaacagcagtgccaccatttcttttaatttcttctaccacagtatcagcggctttggaagagctgccatctccatgtcttcctcctcctaagtcattaacaacaactttagctcctctagaagcaaaaagtagagcataggctcttcctaatccagctccagctcctgtgacaactaccacacgtccgtcgaatcttaagtctgacattttaaaaataaaatgaaatctctgtctcgatcaacaagtggaataaaagtgattattttatattactaccaaaaaccaagttggagttggacattgaactttaaacttgtcaacaac

SEQ ID NO: 4689 - DNA, 829 bp, Diabrotica virgifera
  SmartBlast Evalue=7E-51; Info=Hydroxysteroid (17-beta) dehydrogenase 4 n=1 Tax=Tribolium castaneum RepID=D6WRU6_TRICA
tttctattttaaatttatatattcaagtaatatataaaatgtataatataaaacatcagttcccttagacaaaaagtgtaaaaatctgctaaaataaagataacagcttaaccaaaaaaatataatttttaacaatcacctcgcattgctataccagacacaacgtaaaaaaatagtttaacagaaatattcattttaaacttaatttaaagtgacgtttacagtttagcattggtcttaagaagaggtgctaatttttgtgccaacatgatgtttccggtgaccttgagttttcccttcatgaaagcttgttgagggttaagttttccttcagccatttgcatgaaatcatcatctgagatggtcaaggttgtgttcggtttgccttcaggttttccttcaaagaccttagcatttttcaaatccatggtccattgtttaacttgtttgccatcctttgtaatattgtacaagaagactccaccaacagatttggctttgctgggatcagccttgacttggtcaatgataaattcgaagatagcgtcactttttaagttggacatactgagtgattttaaagttgctgttgtggattcgttaggtttgacagatttaaggtctatgtaggcacctgattttgccttgacgtgacaggagaactgttcgttttgagttccgcgaagttgaatcaaaaatgatctatgaactgatataaatataactacataaattatcagtagatattattgtctacacgtatctattcaaatgggtttgagaagcacttttattattttataaactttgatcttactatcaatatttt

SEQ ID NO: 4690 - DNA, 1649 bp, Diabrotica virgifera
  SmartBlast Evalue=1E-63; Info=Apoptosis inhibitor IAP n=1 Tax= Harpegnathos saltator RepID=E2C5M2_9HYME
gtttaggttagtgattgacctctctcgtttcattactgaatactaaaataaactaaaagttaagttatgtgtgatattagtgcaaaatttttcaacattcgtaaaacagtcactttatcggatttattatcaactttaagtttattattataaacgggatttcatggtactaaaatggcagtagttcaatcaaattacattcaaaatataccttcttttggatgtgtagaccaacctgacaacggctccaaaacaacaagagaatcattagtagaagtgtcttcatcacgtccacgccaagaagactactcagtatatgagaacagactggcatctttcactaactggcccaacacccaagtgtcaagagaatcattagctcgagctggttttatatatacaggtcaagatgacatcgttatctgccctatttgtaagatagagggataccgttgggtatcaggagacaatccaatggatgatcatcgtgtttggaatcccaactgcccctttcttaatagaagagataacatcgagcacgatcactctgtaggttctagagacacttgtggactttttggcatagaattgttaccaaattcagttcctgaagataatacaagtaatttacaaaaattagggatccaacctggaacaggtccacaaaatcaagacaaaattacgttagaaagccggttagcaacattccagggttggccaaagagcattaaacagaggccttctgagttagctgaggcgggattttattacacaggagctggggaccaaactgtgtgcttttattgtggtgggggattaaaagactgggatgaaggagatgatccttgggagcaacatgccctttggtttagcaaatgtgtgtttctcaatttgaaaaagggcaaagaattcatcgatcaagtaaagaggaaggctgatccacaattttcaattcctggacctagcggtactcaagccaaagaggaaccgactgctactgaatcttcaagtgataaacaaagtgaaacagtgaaaacaaaatcagatagggaaagtttcgcaactgacacaactttgtgcaaaatttgctttaaaaacgaacttggtgttgttttcttgccttgtggacatattgttgcttgtgtagattgtgctgctgcactaaaaacatgtgctgtatgccgaaaacctttagaggccacagtcagagcgttcctatcataaatttttattctgttaatagtttttcacatttcatgtttcacacatacttagatctagtcaagattgttagagttttggcaaagaaattaaataaaaattcttttcataaaaatcatttctttaatattacattagagaaaaattatatttttatactgagtacaaatttgaacaagttattaattttaagttacaaaatacgcttttataggttaacaattatcaaagcgcttaaatctaatagatactacacaacattaaggactgcaaaccatatctttcacgaagtaatccctactagtgaccaattgctcgctaggagcagatgcaaattacacaaatttactataaatctgacattaaaacttaggtgtatgtttgtgtgtatgttatgtattgatcataataatatagtaatttataat

SEQ ID NO: 4691 - DNA, 1647 bp, Diabrotica virgifera
  SmartBlast Evalue=1E-63; Info=Apoptosis inhibitor IAP n=1 Tax= Harpegnathos saltator RepID=E2C5M2_9HYME
gtagatgtttgagtgtgtacgaggttcgagtatcgagtgagaaatcgtcgggtctgagttcgtgtgtttagttcgttctgggtgttaaaaattaagtaaaaatcgggtaaaaatgggaaacttattataaattcaacaagctgcaatatcaatcagatttcatggtactaaaatggcagtagttcaatcaaattacattcaaaatataccttcttttggatgtgtagaccaacctgacaacggctccaaaacaacaagagaatcattagtagaagtgtcttcatcacgtccacgccaagaagactactcagtatatgagaacagactggcatctttcactaactggcccaacacccaagtgtcaagagaatcattagctcgagctggttttatatatacaggtcaagatgacatcgttatctgccctatttgtaagatagagggataccgttgggtatcaggagacaatccaatggatgatcatcgtgtttggaatcccaactgcccctttcttaatagaagagataacatcgagcacgatcactctgtaggttctagagacacttgtggactttttggcatagaattgttaccaaattcagttcctgaagataatacaagtaatttacaaaaattagggatccaacctggaacaggtccacaaaatcaagacaaaattacgttagaaagccggttagcaacattccagggttggccaaagagcattaaacagaggccttctgagttagctgaggcgggattttattacacaggagctggggaccaaactgtgtgcttttattgtggtgggggattaaaagactgggatgaaggagatgatccttgggagcaacatgccctttggtttagcaaatgtgtgtttctcaatttgaaaaagggcaaagaattcatcgatcaagtaaagaggaaggctgatccacaattttcaattcctggacctagcggtactcaagccaaagaggaaccgactgctactgaatcttcaagtgataaacaaagtgaaacagtgaaaacaaaatcagatagggaaagtttcgcaactgacacaactttgtgcaaaatttgctttaaaaacgaacttggtgttgttttcttgccttgtggacatattgttgcttgtgtagattgtgctgctgcactaaaaacatgtgctgtatgccgaaaacctttagaggccacagtcagagcgttcctatcataaatttttattctgttaatagtttttcacatttcatgtttcacacatacttagatctagtcaagattgttagagttttggcaaagaaattaaataaaaattcttttcataaaaatcatttctttaatattacattagagaaaaattatatttttatactgagtacaaatttgaacaagttattaattttaagttacaaaatacgcttttataggttaacaattatcaaagcgcttaaatctaatagatactacacaacattaaggactgcaaaccatatctttcacgaagtaatccctactagtgaccaattgctcgctaggagcagatgcaaattacacaaatttactataaatctgacattaaaacttaggtgtatgtttgtgtgtatgttatgtattgatcataataatatagtaatttataat

SEQ ID NO: 4692 - DNA, 2543 bp, Diabrotica virgifera
  SmartBlast Evalue=1E-165; Info="Acyl-Coenzyme A oxidase 3, pristanoyl n=1 Tax=Danio rerio RepID=Q7T2B6_DANRE"
cccactgttccacttaaactatcaaatgtataaaattggtacgttagacgtaatatcaatgtcatttttcatcaacttgtataaaaattttaaaaaatatattcttttcatcatattcttcaatatatatcacatgtgacttatagtttactcttcgcgctattgttttcagcgtagtttacaacctccttccaccatggcggtcggttcatgttatattcatccttggtcattgattctttgagacgtttgtagacttgtccgtctgacgaacccaaacacgatctcaaaataaagtcaggaactgcgatgacgtctactagacctacagcatcatctttcagatccgcgcataattttaaaatggcgtcttggattaacgtcggtgctaattcatttgaagcgaatcctcccttaaatagagtcgcaatgtgccatttttctatcgaccacaatccaaagagtgaaaatattctcgtaagcacagcttttatagcaggatcttctgcttcggagatggtcaccaaaaatctttgcaagaagaaatgctgaataaatgctatgcctaaactcttcccgtagtacacttgactgttatttttggcttcgaacaaatcctttccagccttcaactcttcttctactttctcgtgagttgctttcaatagatatacaactaaccattggaatgttttgataatactttctggatgactaacttcatcggttcctctagcactgaatctactattcttcaaaatgttcaaaccgttcgataagaaatcaattgattgcaatggagtggatatttgtctaccttcaagcatttgcggagctattttgagaagccaattaacggtctgttgaataagcacgtggttttctccttcgtacgtcaaattgggatcaagttcgttcctaacatcgcccaaaccagccgcatgaagatacccgtgtccaccacagcactctctgcattcctggacggcgtccttcattatccagccagccattggttttgacgctgaagaaacaccgtggatttcgattcccaattcaggtgcgttcggtgaggagttgcccaagatgttgttcatggtgaattcgtagaacttttctgagaaatacgtgttgaaatttcttagtacgtacgctgctgctaagtagggtatcagtcgaagttgatgactctgatattctaaaattggcaactcttcttttccattcggtccaaactgttttcttactgctgcataccggattgctataacaagagcttttgaacccaatgagtcaaccatagctgcaatatttactcttcctgctgatagagatcctaaggcagctccgtgtcttctattagggtctttgatcggagttatataacgaccgtcttcagacacgtcggctattttgttgagtagattgactcttggaatttcgtagtttttaaattgaacaaaaccattatcgataccgttcaaaccaatctttcctcccatatctccaatctctaatcctggatatggtagcagcgtcttgggatcacggaacggtactatgaatgcgtgcagaccgtaattctggttgtctaaaattaactgtgcgtaaacggttccgaacatggcggtctggcccaatccaccagcccagcatttagctgcttcaaaatcgggcgagttgaatacgaaaacctgcttctttttgtcgtaggtggctgttgtgcgcatgcctcttgtgttacttccgtgtgcgatttcagtcaaacagtagcacccgaaaatctttccagcttcagcgtcattgatgaattcttggtgtctctctgtacccatatttattattgagctgacaaacaaactgttaccgaccgtgtgctttacgtaggctgatgctaccgatgatgttaacaccctagcaagggatgaaggtcttcgtaagttttgcagcaagtaagcccatctcagaatatcgttttgggcttgatcacatgatcctaaaaatgctagtctgcgctgttcatctctaggtaggctagtgaggttttccttattgtgcacaggattactttccagcattttgtacatttcattctgatactcgattccatcttcagtttcaaggaacaccttcaactttttccagtcaaaagacgttttcttacgatagaaatccagaggtcctggtttaaaatcctctatgagatgagacatggtgttaaaaaatctggcgcgcacactcaggtttaagctcgaaactaactctttacttaacgaaattaaaagataacaccgttacttataaacaatgtaatataatatctctgataatggatagttaaaaggttgaatacttgttttaattgtaatcttataagataaactgtacgacctttggtcccataaaaagtgatgagtagggatagggatcaaaagttgttgttgcattcataataactatgaccattaacctttgaatgaaacacaaaattaataactttcacatttttcaatttaattcacatctaattggacgttttaaac

SEQ ID NO: 4693 - DNA, 756 bp, Diabrotica virgifera
  SmartBlast Evalue=4E-39; Info="Acyl-coenzyme A oxidase, putative n=1 Tax=Ixodes scapularis RepID=B7QEN6_IXOSC"
cccactgttccacttaaactatcaaatgtataaaattggtacgttagacgtaatatcaatgtcatttttcatcaacttgtataaaaattttaaaaaatatattcttttcatcatattcttcaatatatatcacatgtgacttatagtttactcttcgcgctattgttttcagcgtagtttacaacctccttccaccatggcggtcggttcatgttatattcatccttggtcattgattctttgagacgtttgtagacttgtccgtctgacgaacccaaacacgatctcaaaataaagtcaggaactgcgatgacgtctactagacctacagcatcatctttcagatccgcgcataattttaaaatggcgtcttggattaacgtcggtgctaattcatttgaagcgaatcctcccttaaatagagtcgcaatgtgccatttttctatcgaccacaatccaaagagtgaaaagattctcgtaagcacagcctttatagcaggatcttctgcttcggagatggtcaccaaaaatatttgcaagaagaaatgctgaataaatgctagtcccaaactcttcccgtagtacacttgactgttgtttttggcttcgaacaaatcctttccagccttcaactctccttctactttctcgtaagtagctttcaacagatatacaactatccactggaatgttgtgataatactttctgggtgagaaatctcctcaacttctctggcatcacatctattattactc

SEQ ID NO: 4694 - DNA, 1703 bp, Diabrotica virgifera
  SmartBlast Evalue=1E-32; Info=FUN14 domain-containing protein 2 n=1 Tax=Camponotus floridanus RepID=E1ZZ50_9HYME
gaaaagattatgtcaaactagaaataatcctttataagatatgccagttataataaaaaaagagaatccctcttccagcgatagaagcaagaaagccatggacgatgtagaaggagccaaatctgctataaaaagatttataggagatgttagcaagagctctgctactaagcaaataatcttgggggcctcctctggatgggtaaccggattcttatctatgagagtaggaaaaactgctgcaatggcattaggtggaggaattattcttcttcaaatagctaatgaaaagggttacattaaagtcaattgggacaaagttaatagaaacctagatcaagttgcagataaagtagaagaacaactaactggagaagcagtatcctggatggataaggtaaagcattttgctagaaataacactcctttttcttctggatttgttggtggttttctaattggtttagcctcaaattgaagaagctcaaatataaattacaagaagaacagttttattttcctattttgatttagttttattgtactcttagtttatgttgttacaaatttgcttatatactgtgcaagtcttatctgcagagggtggtcaaatgatagagatgtggggtagaatggaagtttttgtttgaaaaggattttgtaactactacacaatatgtctttagtagtttattatgttatacacacgtgattacccgttaacttattggcaagttttatataaattttctgtttcattcctatatcaaaattctattaagatatcaatcaaccaactgttctaaataaattaggacctctggaatagtgaaagaagtcatctggacaaagcaagtcgaaacagtttattatagaacagtcgccaaaatttatggcagaccttacaaacaaaaacaggaaaacagtcattggtctgctaataggacactgtaagctgaataggttgttaaagttgatgggtttttcagatgatttcctgtgtagattgtatcacctagaggaagaaacggcagagcacattttgtgtcattgtgacagtctggcaaacgtgcggatttttgcattaggcgaataaaagccaccagcaaagagctataaggaaggtttagtctcgaagttattagatcttttaaaaagagtcaggctagagaatgtaatctaatcttagaggaccacaatagatctgaaaagtcagaggtcataaattgatggtattttctgaggaacatttactgtgtccaatagggtctagtccatttagcgttacccagggtgcaccacggggaggaggactacgcatacaacgcatttatagagtaaattcaccaatgtctcaacactgacaaaaaattgtctccgagttgtgctttaccagcaatgtcgtcagtctacaactgtatgtatctcttgtggtagttataaagtcattttgaagcaacaagttcaattttaccaatgtgctttaataatttgatcaccgactgtacatatcacctgagaaagactgtaaaatgtttaaaaagttgatataggcggaatgacattaattagtttacaaaatactttacttcatacttttaaattagaatttaaaccattaaaaccatttttaatgttcctattttcttttcatgctatattattattgttttgaataataaataaacacccgttagcaataa

SEQ ID NO: 4695 - DNA, 1554 bp, Diabrotica virgifera
  SmartBlast Evalue=2E-43; Info=FUN14 domain-containing protein 2 n=1 Tax=Camponotus floridanus RepID=E1ZZ50_9HYME
gaaaagattatgtcaaactagaaataatcctttataagatatgccagttataataaaaaaagagaatccctcttccagcgatagaagcaagaaagccatggacgatgtagaaggagccaaatctgctataaaaagatttataggagatgttagcaagagctctgctactaagcaaataatcttgggggcctcctctggatgggtaaccggattcttatctatgagagtaggaaaaactgctgcaatggcattaggtggaggaattattcttcttcaaatagctaatgaaaagggttacattaaagtcaattgggacaaagttaatagaaacctagatcaagttgcagataaagtagaagaacaactaactggagaagcagtatcctggatggataagggtgaacggtttgttgatagaaagttagaccaagcaaaggacattgctaaaaagggacagaagaaagcgaagcgatggtactctggtgaaaattgccagctgcgagaagtgcatatatttatgatatcgtttgtagctggtgtcgccataggaataggcactgcgtagacttaaaatattgttagaattttttagatcttattacaattgctataagcaatataacatttaacaaacgcttaaagacatcaatatctcgaatgatttctagttttcaacgttttaagtattgtttgaacagtatttaactgtagtgatatcaatttttatttgctaatatagcgtatttgccaaaataaatagaacgtaacataaaaattatattaagtactagtcaataaaacttaaagccctgttcacattattccagtagaaggctagtccagtggtcgaaaaagctcttgaaatgtcaatatcacagtaaaaatcatttcaagaagaaagcagttctctgttttaagtgacaaactatagattctgttctttatttaactttttcgccatgaatacgttaaaaaaacttatccacatgaaacagtaacatgtgttgaatgtataacgtttttaccagcaatggataagccttctgcatgattccagttgcgtcggattgaacagtagaaccggatccagtacctattcacatttttttagctgccgttaatgttgtagtactgaaataatgcaaaccgagcataaaataagataaaaggaaaagattcctctcattggctgtataccataataaaaattactaaggaagtaaaacttctcttgaggtagatggtatataatttattaaattttttcaaaaagatccaagttggattaaagtgggtacatcactagtacaaaacaaacgttttcggactaatcagtccatcatcaggttgaaacttcagatccaaagtagttggaactagctacatagttaggtcgaatgatcttaacattacaaaattaagccatttcggctacaaaaatgtcgacaataagtcgatgttaaaagaatacaattagactataatggtgtctttatcttggcttcaaactgacatactttgtatctacctacaagagaagttctacctccttag

SEQ ID NO: 4696 - DNA, 2130 bp, Diabrotica virgifera
  SmartBlast Evalue=4E-20; Info=Tetraspanin D107 n=1 Tax=Manduca sexta RepID=Q9NB10_MANSE
gcgctcgagtcgttcttcagttcagttttcagtgacgagtctcaccgagcagaacatttttatttgtgttgtggatgatcgcagtgtgctgtgctcacaaaaataaacatagtaaccgtatccacaggcgtttctctttgtgtcattcagttcgagagagacagagctataattgagtgttaaaattctttagccgcgagtttttatattcacgaaaaaatgggttgtgccactgggattgttaaatatttggtgtttttggccaatctattgtttgctcttgctggattagctttaataatcataggaattttaatcaaattgaatgttagcgaagctaccaacgttctaccaaaagacttcggtctagctccaatcctctcgatcatcatcggttccatcgtcttcatcacagcgtttctcggatgctgcggagcagtcaaagaaagcacttgcatgttgaccacgtatgcaattatcctgctgacgatattcatcctgcaagttgccatcggagtttacgctttcttacaaatcaaagacaagaactcgtttaactccgtccttactaagagcatgcaagacacattcgacaaaatatatgtaagccaggaagccaacgagactatgatggtcacacagagattcttaaaatgttgtggtgttcgtggacctgaagactatgacattgctggaagaaaaccacctaccagttgttgccgcaacataaatgttcagtgtccaagtcccaacaacgaagtcaactctgagggatgtgtggcaaaactacaaacggaattggagaaggattcgaagattattggtggagtagctattggtatcgctgttgtagagattgttggtgctatcttcgccttgtgtctagccagttcaatcaggaacagttacagaagacacatatacgcctaaaacgaaacaaaatctttatttatttgttatagttttctctcactttaaaaattttactgttgatttaaaatttttactctttttgtaccttaataataagtttattataaatgttgtaagttttcatggacggtatttgacacagaacaatgaattaacgactaacgacaaaaaaagtgcttttatttttttacggactgtaaatatgttgttttgagggcaaatatcggctgtgaagactatactcaggaactttgggggcaccagtaaactgttgaatgtatatttataggttaagaaaagacgttgttagcatatctagccaaagatatacaaacactcgaatagttttcgttaaaaagaacaaaaaaaaaaatcatttatgaatattaattatatgtgttacgatacgatggatgattaagaagtgccaggaatgaggctcagagactcaaagatctatttagtttgataagcaaaaaagtcaacaggggtcaagtctggtgaccaaggagaccaaattgacgtttatgcaaaaatgataaaggagcatggcaaaatgaactgatgccattgtacatcttccctttttcgaaaaatccaatattttccttcttggaacctcactaagtgtgttggtaacgaaaatctcgtgtcaagtcgtggaatttgtcctataagataatttaacgttcaagataggtttttcactaccattgagacacttggaattttgtttccacttgtcagaagaaaacagtcgtaaaaacgaatgcagtcaagcacagctttgattgagtgacactatatataatgctgccaactgttgcgacgttgtcatgcattgcaaaaagtcctggagctttcacaaacctttaatattagaaattagaaaatattttctactattgaattggttaattattgtccagttaattgacacatttgatatctttttcgcttgtagaccttctgttgttgagaacttcagattaccgacacgatttctgaagtttcaacatctcgaatacctcatgacaattattctttagttaatctttgtttttattatattgtataagtgctctcaggttccgagctataaataataaatatagtttgttaaatgtgaaatgtttatccgcgtattttgtatatttaacatttgataaattggataaataaagtaaagctaccgat

SEQ ID NO: 4697 - DNA, 1137 bp, Diabrotica virgifera
  SmartBlast Evalue=5E-27; Info=Tetraspanin F139 n=1 Tax=Apis mellifera RepID=Q9NB07_APIME
gcgctcgagtcgttcttcagttcagttttcagtgacgagtctcaccgagcagaacatttttatttgtgttgtggatgatcgcagtgtgctgtgctcacaaaaataaacatagtaaccgtatccacaggcgtttctctttgtgtcattcagttcgagagagacagagctataattgagtgttaaaattctttagccgcgagtttttatattcacgaaaaaatgggttgtgccactgggattgttaaatatttggtgtttttggccaatctattgtttgctcttgctggattagctttaataatcataggaattttaatcaaattgaatgttagcgaagctaccaacgttctaccaaaagacttcggtctagctccaatcctctcgatcatcatcggttccatcgtcttcatcacagcgtttctcggatgctgcggagcagtcaaagaaagcacttgcatgttgaccacgtatgcaattatcctgctgacgatattcatcctgcaagttgccatcggagtttacgctttcttacaaatcaaagacaagaactcgtttaactccgtccttactaagagcatgcaagacacattcgacaaaatatatgtaagccaggaagccaacgagactatgatggtcacacagagattcttcaaatgctgtggtgttcgtggagcagaagactacggagacacaccagttcctccaagttgttgtaatgatataaactatccatgccctgtaaccaacctgcagataggtgaccactcgtacctttataacagcattaatgatagagggtgcgtcgaagctctgaaaatacagtgggacataattgcgaggattctcttactatcacttggttgtgtcgccatagtagagattgttggtgtcatctgctccttcatactagcacgttcggccaagaatggttacagaagacacatgtacgcctaatgcgacacacaatattcatgtatgttatagtttcctctcacttcaattgttagctgattttaaatttttacttttctgtactattgtagtaagtttattgaaagtgttgcaaatgttcatatataaaatactttgtacttaaggtttgatacattaaataaataaaagtgtttcaatcacaaa

SEQ ID NO: 4698 - DNA, 1632 bp, Diabrotica virgifera
  SmartBlast Evalue=2E-86; Info="Protein croquemort, putative n=1 Tax=Pediculus humanus corporis RepID=E0VP47_PEDHC"
ctataacaaacttaaaaatacagtaacaaaataaaaagtgtcatttcttgtctcgaagaggtatctcatcgtgagtcttttttgatttcccattgacgtgaaacgtctgtttgcttgtatagcaccatatacaagaacataacgcccacagaatggacatactaccaagtcctagtaggatataaaaaatatagttgctatattctggaagattctggatcagtcttaggctgctagctacatcgtctgctagtggtatgttttgagtgaagtagaataaaggtatgtagagttttggtactttttcatatattcgtatacttggaattggttgtagcaacatattcacttgcattactatctggacattcattatgactcccgatatcggttcgataactatgtaaaattcatgtttccccttatcgggcctcatccctctcatcatgtccgtgtaataaggatcagcccgataaaaatgtggaaaggataaaaaactcggggagttatccctacacgtagagacgttaaaaactcccgacggaatacactctcccgtgcagaagcaggcattttctggtcgatgagtaccgttatcaaaaatgttatctgcagtatatttataacccaaaactcctttaataacgacatcttctacatattctaattcggcatatttacagagctctgctgaatacaatataactttctgtctttgtctgtgaaatggataaaactctcccgctgaccctttgatgtcattgcaatggccctcgtagaaatttgtttggtttttgttgttccatgttacaagtctgccgaagttttcgtcgtttttatagtgcattgagaaaactccgtctttgccgaacgtattgtttttaccataaaagatcccaaatttgtcctggacgtccaaccagggaaacttcgataatgtacccaatattggttcatcgtaaccttcgaataatatctgggacacgttcttcgttacatgtagactagaaacactcgataacgctgccgatacgacccttttggtaaaccagctcgaccatctggtcttgaaaccaattgttaatggcactgggtttattgttgatatcacatcagttaacttcctaagactattttcgtgatcgaaataatataacttccgatgttggtaactaactgtataattatcctcatgccaggatatattaatcttctccttaatctccttgaacctataaggtcccacttcttgaaattccggcttgtccgaaatgttatagatttgttcgggatttgtccaattgaacaggaagatgtccatgctgagtggagggtcgttgttgcgccacgctttatacggtcgtgagtcgggtgtgaatttgagggcttcggcaagaatgaattcgtagatagcctcgaagaacacgaagatgaaaacgccggctccaatgaggagtagacccaggactaggagacatatctggccgatttgtcgccttcgccgtttcatcttcgagtttttaattacaaaaacactgaaatgattaaacgaaaagggactctctgcttgattgactttatctgactgttatttcttgtaacaatgtatggtataaatttgataagtagtgg

SEQ ID NO: 4699 - DNA, 1624 bp, Diabrotica virgifera
  SmartBlast Evalue=2E-86; Info="Protein croquemort, putative n=1 Tax=Pediculus humanus corporis RepID=E0VP47_PEDHC"
ctataacaaacttaaaaatacagtaacaaaataaaaagtgtcatttcttgtctcgaagaggtatctcatcgtgagtcttttttgatttcccattgacgtgaaacgtctgtttgcttgtatagcaccatatacaagaacataacgcccacagaatggacatactaccaagtcctagtaggatataaaaaatatagttgctatattctggaagattctggatcagtcttaggctgctagctacatcgtctgctagtggtatgttttgagtgaagtagaataaaggtatgtagagttttggtactttttcatatattcgtatacttggaattggttgtagcaacatattcacttgcattactatctggacattcattatgactcccgatatcggttcgataactatgtaaaattcatgtttccccttatcgggcctcatccctctcatcatgtccgtgtaataaggatcagcccgataaaaatgtggaaaggataaaaaactcggggagttatccctacacgtagagacgttaaaaactcccgacggaatacactctcccgtgcagaagcaggcattttctggtcgatgagtaccgttatcaaaaatgttatctgcagtatatttataacccaaaactcctttaataacgacatcttctacatattctaattcggcatatttacagagctctgctgaatacaatataactttctgtctttgtctgtgaaatggataaaactctcccgctgaccctttgatgtcattgcaatggccctcgtagaaatttgtttggtttttgttgttccatgttacaagtctgccgaagttttcgtcgtttttatagtgcattgagaaaactccgtctttgccgaacgtattgtttttaccataaaagatcccaaatttgtcctggacgtccaaccagggaaacttcgataatgtacccaatattggttcatcgtaaccttcgaataatatctgggacacgttcttcgttacatgtagactagaaacactcgataacgctgccgatacgacccttttggtaaaccagctcgaccatctggtcttgaaaccaattgttaatggcactgggtttattgttgatatcacatcagttaacttcctaagactattttcgtgatcgaaataatataacttccgatgttggtaactaactgtataattatcctcatgccaggatatattaatcttctccttaatctccttgaacctataaggtcccacttcttgaaattccggcttgtccgaaatgttatagatttgttcgggatttgtccaattgaacaggaagatgtccatgctgagtggagggtcgttgttgcgccacgctttatacggtcgtgagtcgggtgtgaatttgagggcttcggcaagaatgaattcgtagatagcctcgaagaacacgaagatgaaaacgccggctccaatgaggagtagacccaggactaggagacatatctggccgatttgtcgccttcgccgtttcatcttcgagtttcggtcgatgtagacaacatcatctcgtttgaaaaagaatgtcattgagaagccggtgcgcacaaacactcaatcgaatcaaaacaaggacatcacacactattt

SEQ ID NO: 4700 - DNA, 1654 bp, Diabrotica virgifera
  SmartBlast Evalue=1E-138; Info=Cytochrome P450 6BQ5 n=2 Tax= Tribolium castaneum RepID=D2A0A1_TRICA
catcgctgattgtaaaagatttctgaaagtgcagtcactgtaagtttcacttcctatttcgttgaaccttcatcgattttcatgaaaatcgggcctgttttataccatatatagcgatggacatatgtatccttatttacatcctactaggactccctctcttcgtatacctctaccaaaaatggaaatattcattttggagaaccagaaatgtcttccacttagaaccaaaatttccttacggcagtgcccaatcagagcttaaacttaatggtgccatgacctcaatcgtcgaagacctttaccataaagtcaaagcccgaggtttaaaatacggaggatactttgagttccttacgcccatgttcgttcctgtcgacttggagctaataagatgtattatgatgaaagactttccccattttactaaccatgggacttacgtaaatgaggaagttgatcctttgactggacatctgtttaacttggaagacgagaaatggaaaatcattagggctaaattgacgcccacttttacatcaggtaaaatgaaaatgatgttccaaactatggtagaatgcaccgaaggtcttcaagaactcttaaaaaaatctgcagcaagcaaagaacccgtagacataaaaagcaatctctcctgtttcaccactgacgtcatcggttctgttgcattcggtgtggatataaacagcatgaagaatcctgactcggattttcgaaagttcggtaacagaatattcgtgcatacaactttggtgagactaaaattcatcttcttgtctatctggccacaatggatgattaaaaaaagtggtattaaactattttccaaagatatggaagacttttacttgaatttaataggagacactgttgaatacagggaaaagaacaatatcattaggaaagactttctgcaacttcttatcgaattaaaggatagtctgactataaaagaaatggcggctcagagttttgctttttatgctgctggatttgaaacttcttctactaccatgtcgtttgccttgctggaactctctcaacgtcaagatatccaagatcaactcagagaggaaatactggaagctttcaaaaaagacggtgatacgatgacgtatgattcgataatggggatggaattattagaaaaagtaatatcagaaactcttcgaaaacatccccctgcgggaattctcccacgcatttgcaacaagacctacaaacatcccaacagtgatctagttatagaagcaggtaccaggatcaatgtaccagtctacgctatacacagagatccagattactacccagatccagaaacttttgacccagagaggtttagtgaggaaaacaaggcaaacaggacgccattttcatatatgccttttggagaaggtcctcgcacgtgtataggaatgcggtttggaaagttgcaagctaaagtaggattgtgctgtgttttacgaaattacaaagtgaccttgaatgagaagactaaattaccgataacataccgttctggttttgtttcggcagttgaagggggtctctgggtaaatttagaacctcttaaaatgtaaagataattttcatagaattacaattttacttaataaagttttatttttcactg

SEQ ID NO: 4701 - DNA, 1595 bp, Diabrotica virgifera
  SmartBlast Evalue=1E-137; Info=Cytochrome P450 6BQ5 n=2 Tax= Tribolium castaneum RepID=D2A0A1_TRICA
gtatgtgtctacatcgctgattacaaaagggtttcttttataccatatacagcgatggacatattatgtatcctgctttacattatactaggactccctctcttcgtatacctctaccaaaaatggaaatactcctattggaggaccagaaatgtcttccacttagaacccaaatttccttacggcagtgcccaatcagagctcaaacttaatggtgccatgaccacaatcgtcgaagacctttatcataaagtcaaatcccgcggattaaaatatggaggatactttgagttccttacgcccatgttcgttcctgtcgacttggagctaatacgatgcattatgatgaaagactttccccattttacgaaccatgggacttacgtgaatgaggaagttgatcctttgactggacatctgtttaacttggaagacgagaagtggaaaataatcagggctaaattgacgcctacttttacatcaggtaaaatgaaaatgatgtttcaaactatggtagaatgcaccgaaggtcttcaagaactcttaaaaaaatctgcagcaagcaaagaacccgtagacataaaaaacaatctttcctgtttcaccactgatgtcatcggttctgttgcattcggtgtggacataaacagcatgaaaaatcccgactctgattttcgaaagttcggtaacagaatatttgtacatacaacattggtcagattaaaattcatttttttgtctatctggccacaatggatgattaaaaaaagtggtattaaactcttttccaaagatatggaagacttttacttaaatttaataggagacactgttgaatacagggaaaagaacagtatcattaggaaagactttctgcaacttcttatcgaattaaaggatagtctgactataaaagaaatggcggctcagagttttgctttttatgctgctggatttgaaacttcttctaccactatgtcgtttgccttgctggaactctctcaacgtcaagatatccaagatcaactcagagaggaaatactggaagctttcaaaaaagacggtgatacgatgacgtatgattcgataatggggatggaattattagaaaaagtaatatcagaaactcttcgaaaacatccccctgcgggaattctcccacgcatttgcaacaagacctacaaacatcccaacagtgatctagttatagaagcaggtaccaggatcaatgtaccagtctacgctatacacagagatccagattactacccagatccagaaacttttgacccagagaggtttagtgaggaaaacaaggcaaacaggacgccattttcatatatgccttttggagaaggtcctcgcacgtgtataggaatgcggtttggaaagttgcaagctaaagtaggattgtgctgtgttttacgaaattacaaagtgaccttgaatgagaagactaaattaccgataacataccgttctggttttgtttcggcagttgaagggggtctctgggtaaatttagaacctcttaaaatgtaaagataattttcatagaattacaattttacttaataaagttttatttttcactg

SEQ ID NO: 4702 - DNA, 1628 bp, Diabrotica virgifera
  SmartBlast Evalue=2E-97; Info=Steroid dehydrogenase n=1 Tax= Aedes aegypti RepID=Q16V97_AEDAE
attgaaatatgaggtccagagttttaatattaattatagagcctaataatattaagtgtatacaaaaaactgggacccaatattttctaaatgtaaaataaaaatctattgactaatatttgcagatttttacgttactacagcaactgtcaaatctccagaatatttttttataaataaataaaatttgtaacatgaattcgaaacatcctctgctacgtaatataagatgtatagttgccaacaaattagtgcagaaaccttaagcttattacaaagtcatttgtatttgagtggtgtctttaaatttcgagatttaaacatactgaatatgaggtgtaataaattaaacgtacaatagattaacatttattactttctatctgtgcaggaaacttaacgacacgactcaaatacaaatgactttgtaataggcttcagttaaggattctgcaacaatttgctggcaacaatatatccaattctttattacctaatgttcacaatgttctcacattactgtactgctcttcttaaagccctctttcttatattggtcatggttctgaagatcacccaccgtgatagttttggtgatatgcagtctaaggtattaaggaatgacactaataaggtatggggaaagtatccagtcgttttttctttaactccgatagtttttacggcttctgtaacatagcctattggagaaggagccatccaagttgaactccttatctttgacatattggtagccacataacctggcaataagcactgtacagtaatgccaaatttagcgtactccgaagcaaggtcttcagagaacttaaccacgtacgcttttgacgcagcgtatacagttagcaaagggttggggatttgagctgccgtggaagaaatattgacaactactcctcttcttcgttctaccattccgggcattacaatcttgcacatgtttgtaacagagaaaatgttgcagttgataaggtttacaaagaatttgtctttttcttttacatctaaaaagtattctgggtgattgtagctcatgccgacgttgttgattagaacaccaatatccagaccagtcaatttcttttcgatgtcgctataaatctgatcggtgtctgtgaaatcagcgacaagaatcatgaattccactttatacttttgacccaattctttagcgacatcttcaagcttggattgagtcctactaattagcactatatttaatcctttctttgctaagacttcagcaaatgctttgccgatgccgtctgtggccccagttataactgcccattttcctgtttctgataaatttacggcgttaatctgcaggaaagtagataagaaattatcgtacaaaaatttaaacaccatcctggttacttgaattccgacaataaaggcacatactaaggcaattttattaagaaggcagaaatttgttggtgtttccttctccattgtcgccgatagaaaataatacaccaaattcacatgtcgactggactataccgtgtcgttgattcttgaactcactaccttcactattattcacatctggtgcgaggagatttctttttagatacaaaagtactgtatagcaagttccg

SEQ ID NO: 4703 - DNA, 1621 bp, Diabrotica virgifera
  SmartBlast Evalue=2E-97; Info=Steroid dehydrogenase n=1 Tax= Aedes aegypti RepID=Q16V97_AEDAE
attgaaatatgaggtccagagttttaatattaattatagagcctaataatattaagtgtatacaaaaaactgggacccaatattttctaaatgtaaaataaaaatctattgactaatatttgcagatttttacgttactacagcaactgtcaaatctccagaatatttttttataaataaataaaatttgtaacatgaattcgaaacatcctctgctacgtaatataagatgtatagttgccaacaaattagtgcagaaaccttaagcttattacaaagtcatttgtatttgagtggtgtctttaaatttcgagatttaaacatactgaatatgaggtgtaataaattaaacgtacaatagattaacatttattactttctatctgtgcaggaaacttaacgacacgactcaaatacaaatgactttgtaataggcttcagttaaggattctgcaacaatttgctggcaacaatatatccaattctttattacctaatgttcacaatgttctcacattactgtactgctcttcttaaagccctctttcttatattggtcatggttctgaagatcacccaccgtgatagttttggtgatatgcagtctaaggtattaaggaatgacactaataaggtatggggaaagtatccagtcgttttttctttaactccgatagtttttacggcttctgtaacatagcctattggagaaggagccatccaagttgaactccttatctttgacatattggtagccacataacctggcaataagcactgtacagtaatgccaaatttagcgtactccgaagcaaggtcttcagagaacttaaccacgtacgcttttgacgcagcgtatacagttagcaaagggttggggatttgagctgccgtggaagaaatattgacaactactcctcttcttcgttctaccattccgggcattacaatcttgcacatgtttgtaacagagaaaatgttgcagttgataaggtttacaaagaatttgtctttttcttttacatctaaaaagtattctgggtgattgtagctcatgccgacgttgttgattagaacaccaatatccagaccagtcaatttcttttcgatgtcgctataaatctgatcggtgtctgtgaaatcagcgacaagaatcatgaattccactttatacttttgacccaattctttagcgacatcttcaagcttggattgagtcctactaattagcactatatttaatcctttctttgctaagacttcagcaaatgctttgccgatgccgtctgtggccccagttataactgcccattttcctgtttctgataaatttacggcgttaatctgcaggaaagtagataagaaattatcgtacaaaaatttaaacaccatcctggttacttgaattccgacaataaaggcacatactaaggcaattttattaagaaggcagaaatttgttggtgtttccttctccattgtcgccgatagaaaataatacactggatgtgataatacccgcgaattgtttaaactatttgattatcacacgggtcgcggtgcaattgttgatagcccaacaattttcggacggatttggtttacgcacgcgcaatttact

SEQ ID NO: 4704 - DNA, 1674 bp, Diabrotica virgifera
  SmartBlast Evalue=1E-27; Info=Endonuclease-reverse transcriptase n=1 Tax=Bombyx mori RepID=D7F170_BOMMO
ttcacgttgaaatattctatttggaatttggcgaatatgaacctatttttctttagtcgtaaccctgcttctactaggtctagagacttcatgacgtgtacaccgtttttatcacttttttggagtctatagttttttctaagaatgtttttttcgataaaatacctactttatgaattatttgcaaaaaaatgtcttgttgaaaaatgaacatattcactcgcaaataactggaaaaattatgacctggcgtaaaaactctataagataaaagttgattagaggtagtcagtttgtcgagttccggacttattttggacgtatatattttcaccccaaagaaggagcgaaagtcacacccgagaaagggtgactctcacccccggggcaaaagcacacatcgacactatcactttttttctttggcatattgactatgcgtaggccaaatttcatgtcaatctaagcgattttatttaatttacagcaaaaaccgtcaaaggatttactacttctgttaggaaaaaacactctgaaaagcacttaaaaataaatggcaactacatttattgcaaaatatgtcagtacatatgttatagaataacaactacaataaacgacataatcataaatcatatgaaaaattatcacgagaacataattttccagaaagacggaactacttctcaatatgcacacaggcccgaaattatgtaaacatagtttttcccgaacagtagatactggacgaggaaaacccatagaatggccacttagatcactacaccctgccccatgtgattttttcttttgtggttaactgatgttcaaaatatactagacacatccacaaaacactactgatctatgtcagagagttatactaaactgtatcagcataactaaaaaaatattatgaatgtgctagaagaaaccaaagataggttatattactggtaacaggtgaatgaagaacattttgaacataaatcaactaaaaatgtgtttacgcgcctggcaggcaaatcactctcggatgggcctgggttcgcttttaattaggttgtcaatgtccttctggggtatctcgttccatgtcctacttaactactgaagcatgacatattccataaatatatcaaacagggtcgacgcctgcccatctccctattttagccctctagttatctgaaaaggatcttctgtgtaagtcacggtggcttgaactaactttgccagtttccttggtatactaaattcttgcataatcacaaatattttatctctaggcttgtccaaaatctacaaagatttggtagatatttatgtcgtgctcccaggctttagctaatatttgttttacgttgaatagctggtcaacggtagacaatcttggtctgaatccggcctggtattctcctatggatttgttctgtgaagtggcttaatctcaggtttatgattcaagtaaacatcttataactcacacagagtaaggatatgcctctatagtttttgtacctcagtttgactccctttttgtggactgggcatataattgctctcttccagtctcctggaatttcttctgtgttccatacgtctcttactagtttattgaatctatctatcaatgtgtgtcctccaattttgagaatttcagctggtatattg

SEQ ID NO: 4705 - DNA, 1555 bp, Diabrotica virgifera
  SmartBlast Evalue=9E-28; Info=Endonuclease-reverse transcriptase n=1 Tax=Bombyx mori RepID=D7F170_BOMMO
cctatttttctttagccataactctgcttctactaggtctacagacttcatgtgttcaccgtttttatcacttttttggagtctatatttttgctgagaatatttttttcgataaaatacctactttttaactttaataactctataaaaccaaggttgattagattagtcagtttatcgagttccggacttattttggacgtatatattttcaccccaaagaaggagcgaaagtcacacccgagaaagggtgactctcacccccggggcaaaagcacacatcgacactatcactttttttctttggcatattgactatgcgtaggccaaatttcatgtcaatctaagcgattttatttaatttacagcaaaaaccgtcaaaggatttactacttctgttaggaaaaaacactctgaaaagcacttaaaaataaatggcaactacatttattgcaaaatatgtcagtacatatgttatagaataacaactacaataaacgacataatcataaatcatatgaaaaattatcacgagaacataattttccagaaagacggaactacttctcaatatgcacacaggcccgaaattatgtaaacatagtttttcccgaacagtagatactggacgaggaaaacccatagaatggccacttagatcactacaccctgccccatgtgattttttcttttgtggttaactgatgttcaaaatatactagacacatccacaaaacactactgatctatgtcagagagttatactaaactgtatcagcataactaaaaaaatattatgaatgtgctagaagaaaccaaagataggttatattactggtaacaggtgaatgaagaacattttgaacataaatcaactaaaaatgtgtttacgcgcctggcaggcaaatcactctcggatgggcctgggttcgcttttaattaggttgtcaatgtccttctggggtatctcgttccatgtcctacttaactactgaagcatgacatattccataaatatatcaaacagggtcgacgcctgcccatctccctattttagccctctagttatctgaaaaggatcttctgtgtaagtcacggtggcttgaactaactttgccagtttccttggtatactaaattcttgcataatcacaaatattttatctctaggcttgtccaaaatctacaaagatttggtagatatttatgtcgtgctcccaggctttagctaatatttgttttacgttgaatagctggtcaacggtagacaatcttggtctgaatccggcctggtattctcctatggatttgttctgtgaagtggcttaatctcaggtttatgattcaagtaaacatcttataactcacacagagtaaggatatgcctctatagtttttgtacctcagtttgactccctttttgtggactgggcatataattgctctcttccagtctcctggaatttcttctgtgttccatacgtctcttactagtttattgaatctatctatcaatgtgtgtcctccaattttgagaatttcagctggtatattg

SEQ ID NO: 4706 - DNA, 1631 bp, Diabrotica virgifera
  SmartBlast Evalue=1E-128; Info="Hypoxia inducible factor 1, alpha subunit n=2 Tax=Tribolium castaneum RepID=D6WMG7_TRICA"
ggtgtacgtttcccccaacgcactaacgtactacatacgtgagtttgtaagttaataattgtaacttcctcatttagtgttaggagccaaattaactccccgaagtaatttggttaaagcgcgatacatcttggaacaccccctgtttattaattttttcagtggactggaatgcgaggaccaattttactcctccttacaattatctactgttaagtcagagattaataataataattgtcaattgacaaccaagtcagtcgttcccgaaattgtgattactaatgacaaggttaaacccgacaatgaagatgaagtgaccaagaagatcgatgtgaaagaaagaatttcgaacacgaggaagttgtttggtaatcttaaggaagtcgagcgaccgagaagtgctactagtaagctgttcggacctaggacgaaggatatgagtagagggttcttgacgttttccgatgaagagcctggtcttacaatgctgaaagacgaaccagaagacctaactcacttggctccagtagcgggagacgtgtgcgttcctctggaagatcacatttttcttccagacatgctagacgatattcttttaaaggataattttggacctttgttaacagaagaaccgtctgatccatttattgcatacagagacttccaagacacgtccccgcaattgttatcaccgaatctatcaaaacactcagactgcagtttaccttccctcaatagtccttgcgattccctaatagacgatgatcacacgtcatcgtttatgaacctccacatggacgaggacatagaattattgaaacctccatacatccccatgaacataacggacgatctgccgatgttggtatcgaatgatctgatgtggagcacgagcgacaaaaagacgcagcattccgaaagtaattcgagtttagctcaattattatccaactcgttaaacaaacgccagttaaaacagagcgaccacgggggaggaatattgtgtaaacaagaagttgatgacgtctataatataaaaaatatccgaaagtcgtggaacgaccaaaataatatgtccccaaaatcgactgccatcaacaaactagatcgtactcaaagtacgaaacgatcaaattgtaccatatacgaccatgtcagtaaaaaaacccgcaacgaacccaaagaaaaaatgtcatccgaactcctacagcagttaatatcaaataatcacaatagagggcgacagagggataaaaataattggttactcaagaacggttcacaaaaagcagcgtgtatatcgcaaccgagcgatagcgttttgatgaacctgctgggaacctcaatgaccaattcaaatactgaaaggttactagatcctagatcgaattctggtcaggaacccatgagtattgatcaaaaccaagatcaggagctctcaaagagatcgcagttaataagaaattccctaagtcttttagaccccgaaggtacatcgctggcgtcactgatggacctaacccagcaggacttcgatgttaacgcacccgtatgtaacaatctcttacaaggaacagaccttctgacggctttagacatcaacttggccactatttagccagcaccac

SEQ ID NO: 4707 - DNA, 1588 bp, Diabrotica virgifera
  SmartBlast Evalue=1E-109; Info="Hypoxia inducible factor 1, alpha subunit n=2 Tax=Tribolium castaneum RepID=D6WMG7_TRICA"
ggtgtacgtttcccccaacgcactaacgtactacatacgtgagtttgtaagttaataattgtaacttcctcatttagtgttaggagccaaattaactccccgaagtaatttggttaaagcgcgatacatcttggaacaccccctgtttattaattttttcagtggactggaatgcgaggaccaattttactcctccttacaattatctactgttaagtcagagattaataataataattgtcaattgacaaccaagtcagtcgttcccgaaattgtgattactaatgacaaggttaaacccgacaatgaagatgaagtgaccaagaagatcgatgtgaaagaaagaatttcgaacacgaggaagttgtttggtaatcttaaggaagtcgagcgaccgagaagtgctactagtaagctgttcggacctaggacgaaggatatgagtagagggttcttgacgttttccgatgaagagcctggtcttacaatgctgaaagacgaaccagaagacctaactcacttggctccagtagcgggagacgtgtgcgttcctctggaagatcacatttttcttccagacatgctagacgatattcttttaaaggataattttggacctttgttaacagaagaaccgtctgatccatttattgcatacagagacttccaagacacgtccccgcaattgttatcaccgaatctatcaaaacactcagactgcagtttaccttccctcaatagtccttgcgattccctaatagacgatgatcacacgtcatcgtttatgaacctccacatggacgaggacatagaattattgaaacctccatacatccccatgaacataacggacgatctgccgatgttggtatcgaatgatctgatgtggagcacgagcgacaaaaagacgcagcattccgaaagtaattcgagtttagctcaattattatccaactcgttaaacaaacgccagttaaaacagagcgaccacgggggaggaatattgtgtaaacaagaagttgatgacgtctataatataaaaaatatccgaaagtcgtggaacgaccaaaataatatgtccccaaaatcgactgccatcaacaaactagatcgtactcaaagtacgaaacgatcaaattgtaccatatacgaccatgtcagtaaaaaaacccgcaacgaacccaaagaaaaaatgtcatccgaactcctacagcagttaatatcaaataatcacaatagagggcgacagagggataaaaataattggttactcaagaacggttcacaaaaagcagcgtgtatatcgcaaccgagcgatagcgttttgatgaacctgctggtaagcggtttcgatattcgagccggttacatctgtctcgctccaaacaaatcgaaaagatagagagaacaagcctcgaatttgattgtgcgctgttaaaattggatgttaccgctacaaaatggtgtattaacggaattaagtttctgtggtcggaaaccgaaagggaaaagtcactttgcgggagtgtgaatagagttatttttttacaaatccgaaatattaaatacaaagattttcgttaataaa

SEQ ID NO: 4708 - DNA, 1733 bp, Diabrotica virgifera
  SmartBlast Evalue=2E-31; Info="Pre-mRNA-splicing factor cef1, putative n=1 Tax=Pediculus humanus corporis RepID=E0VYT5_PEDHC"
tttatttaaaacagtgttacatttactgacttcttaaaaaaatgtacaatattatactttatttcacgttaagaacggacgttttggcttatacagatcagtgttgccaaaactatcaggcacgtgtttctactagactgtcgataaactattcattctcgatacgataaaagagacataggcgcgcttctatcgtccataagaaatacctatgcaacgttccgtgcttaacgtgaaacgttctatagtacttatattacatattgtgcacatgaatattgtaaatagaattcaattataaaataaatctacccataacaaaattctgtagacgtaaaaaacatactgtatttatattaaattattttttttgtatttgttttttctacattcaaataacgaatgtaaatcatatatacaatatttaagacgctaaaaatttaaagatcttggttttaaaccagacgttttaagaaatttatgtgcttgttcagtaagctcaagctggtccttcgtttggccgcaagctatcatgacccagagatagtccagagtgaccatgacgctggtgtccgtttcgtagtgggaactgtcttgatctttcttcatgatctccgtgatgtcttccaatcttgaggatggggtgtcaggaaggtttttgatcggaccggacttcatttccaaatccgctagggctttcttgaaggtgtgggtgttcgaggtgtatcactggtgaagcgtttgtttggcgtcgcggtgacatccgtcgtcgagcaggaagcggtgggttcggcctttaatatcgatgatggacctcgcggcgtgctgagtgggctgtaatctcgatcaggcctcgctctatccttcaccggtgtcgaaaccagcgcactctgaggtcctttgggtgtcgacgacatcgttacgtcaaaagtgaggttctggatattaggactattcaaaaactgtgaagggctgaaaggtagctgcttaataggggaagctccattccttaacggactgaagaatgaagatttggcggtgtcgaggaagtccacttcgaatttctgaggattaggttgctcggtgacgtccacttcttcggtttcagagctgtcccttcgtttgcgagattttcctcttctcaaaatgggaggcgttgtagaacgtgagacgctcacggtgctggttacaggtacaattgtattttgggttaaagttgaagcaggtccccttgatttgataaagtgcctattcgtcgttttcaacggagtgacaccaggtgattggtagaagcccatatcgaagtctgacaaagcatcgtcattcatgggcgtcaatttgacaggtgaagtttggtttccatacatactgatgaagttgaaagacacgggctcgttagaattttgtgcttgttgaggtggggaagggttgattctttcgtagacactagacatctgcggcgtagggctaggcgttggagcccctgtcgaataactcgactggctgctggcatggtcaaacatttcaaccgtccaatcctgcgtctcttgggtcctttggtggccataatgggaatagaagttctctgagggcctcatattcctccgttgtctcccacgcttggactccccatgatcgcggttctccgactcgtatttcctcctcattgtggaattccaatggttcttgatggcattgtcggtccgtccgggcaatagcttcgctattcgggc

SEQ ID NO: 4709 - DNA, 1472 bp, Diabrotica virgifera
  SmartBlast Evalue=1E-39; Info="Pre-mRNA-splicing factor cef1, putative n=1 Tax=Pediculus humanus corporis RepID=E0VYT5_PEDHC"
gtccagcttggaggatcctgcctgagggtgatagtccatcattcctgtcactcctaaggaatctttcattatcgatgacggagttgaaaataatatcgaggtgtcccctcccaatgacttactaggagtctcgactgcgaatgagatatccgaggagctcatttgggaggaggacgaagcccatgagggggccaacgctttacgcaccctcttgctaggaagtacgttttctttgccggctgcagaagacgcagctccttttcgtttgccggtcatatagccactatcgttagtgaccatgacgctggtgtccgtttcgtagtgggaactgtcttgatctttcttcatgatctccgtgatgtcttccaatcttgaggatggggtgtcaggaaggtttttgatcggaccggacttcatttccaaatccgctagggctttcttgaaggtgtgggtgttcgaggtgtatcactggtgaagcgtttgtttggcgtcgcggtgacatccgtcgtcgagcaggaagcggtgggttcggcctttaatatcgatgatggacctcgcggcgtgctgagtgggctgtaatctcgatcaggcctcgctctatccttcaccggtgtcgaaaccagcgcactctgaggtcctttgggtgtcgacgacatcgttacgtcaaaagtgaggttctggatattaggactattcaaaaactgtgaagggctgaaaggtagctgcttaataggggaagctccattccttaacggactgaagaatgaagatttggcggtgtcgaggaagtccacttcgaatttctgaggattaggttgctcggtgacgtccacttcttcggtttcagagctgtcccttcgtttgcgagattttcctcttctcaaaatgggaggcgttgtagaacgtgagacgctcacggtgctggttacaggtacaattgtattttgggttaaagttgaagcaggtccccttgatttgataaagtgcctattcgtcgttttcaacggagtgacaccaggtgattggtagaagcccatatcgaagtctgacaaagcatcgtcattcatgggcgtcaatttgacaggtgaagtttggtttccatacatactgatgaagttgaaagacacgggctcgttagaattttgtgcttgttgaggtggggaagggttgattctttcgtagacactagacatctgcggcgtagggctaggcgttggagcccctgtcgaataactcgactggctgctggcatggtcaaacatttcaaccgtccaatcctgcgtctcttgggtcctttggtggccataatgggaatagaagttctctgagggcctcatattcctccgttgtctcccacgcttggactccccatgatcgcggttctccgactcgtatttcctcctcattgtggaattccaatggttcttgatggcattgtcggtccgtccgggcaatagcttcgctattcgggc

SEQ ID NO: 4710 - DNA, 2284 bp, Diabrotica virgifera
ccagcatcttaaaccaaacgacctgactaggaatataaagatcttaagggttagagcaatgtacctacttaatccataaagatcccgacagatacctaaactacctaaatatacctaataatcataaacgagtgtgagttaacacataacaaaatcgcataatttataagtcgtgttttcatgttttatactggtacctagatcaaatacatagaagggatggcaattgggatactaatcctaacattagactgtaacagcccttacaaatactcctacaatatttcaaccagaactacaagcaataattcttatgctaaagattcaaaagtgcatgaaaacgtctcaattgagctaaaatatttcttgactctgatagtcaagcttcaccgaggctttgaagtttataagatatgaatcagtaacagattggacctgaaaacgtaatttgctacgaagaattgttcaatgtgttttcatatacactgctgactcagatatatttgacaaatgggcaaagtagacaatgcaacatgaagattctgcgaaaatagagaggaaatggcagaacatattatcttcaactgcaaaatcggtttttattgatgtattatttaactatctcctcaattgcataaaaactatttgtattataaaatactttcctctccataagaaagccaaacgatcttgtcatagtggaagggctattcatgctgggtcgtcctaggtaattctgtgagatgagtataacctagaggcaagggcgtaatttaggaacaagcaagaggaacattaaaatcctagtaattcgaaacaagagttagactagatcgcgccagatcagaccagaataattctatagcatgccgcatttcgaccgccattgttttctgtacctccatcagtttttttttcgatggctctatccgatatcccattatgtgctttcccttcccaggcaattgacagcctttctcttcatattattttatgtggtatgaaatatattgcttgccttggttatatatgttcatccagtcatgttacgtggacataccacactagttgtttagtttcaaccttgtctataacagttgaatatacagtatttgtcgtccttctattatctttatttcttatatgcctgtttttagatatactagatgttctccttagacaatcaatttcgactgcttcaattcttttcctattattgttggcaattgccacacttctaatcctgaagtcatgattatggtactgcaggctgcgacctatacttccgaatataaaaaggaactattgaaataaaatcaagaaactgagaaaatgtttaaaaagttttggtgatcgagcataagcaacacagcgagaaaaatattcaagctgtgactaaagcttattcgaaaacgtcaaacatagcggtagagtatacacactagatctttcaggtgaggttcacatgatctatctttatataaaatctagaatagtatattatgcaacgagcatttaatgatggtcattatgaagcgagtatgagttacgaaacgagccgtatgcgcgagagtttgtatagagtacgagcttcataatgataattaaatgcaagttgtatacactattttttctatgatcattcacaacaaaaaatatattcaaatttattaattttgtaacacaaacaaattaagtagtttgtcagtttgacagtgttacatattgagaactagtcaaagcgtatgtatttgactcgccattggtcactgcgcgtgtgccaccttcatcgcgaatgccatatcgcgattatattggttaaaaatctgtatcgtactgaaaatctgtatcataatggagttcattatgatacaggtagtgaaatcataattgatatattatagtatgagaatagaaaaaataattttaagaaatgcattttaatgttttatattttaaaatgtataataacattctagttttagcatatttaaagagaagttttaatttttaatatgaatataaactcgttataatatatgtaggtacatatatcttaagtggttgaatggagaattttttgcctgactaataattttaattaataaatactgacataactgttcttaccattaaaatagtttagcttctaaaaatattgggatgtgcattaatatggatttatatattgggcattaaggaggcgaaatttttataaaatatatcacaagataagttattttctagtaaaacattccaaataaaacaattttaataagattaa

SEQ ID NO: 4711 - DNA, 912 bp, Diabrotica virgifera
attattcctaaacaaacgttattattgtaacaattgtggctcactttcataaacatgcctaatacttaaattaaacttgccccaataaaacaatttcagaaccttttaaaaattatattatagtatattatgcaacgagcatttaatgatggtcattatgaagcgagtatgagttacgaaacgagccgtatgcgcgagagtttcgtatagagtacgagcttcataatgataattaaatgcaagttgtatacactattttttctatgatcattcacaacaaaaaatatattcaaatttattaattttgtaacacaaacaaattaagtagtttgtcagtttgacagtgttacatattgagaactagtcaaagcgtatgtatttgactcgccattggtcactgcgcgtgtgccaccttcatcgcgaatgccatatcgcgattatattggttaaaaatctgtatcgtactgaaaatctgtatcataatggagttcattatgatacaggtagtgaaatcataattgatatattatagtatgagaatagaaaaaataattttaagaaatgcattttaatgttttatattttaaaatgtataataacattctagttttagcatatttaaagagaagttttaatttttaatatgaatataaactcgttataatatatgtaggtacatatatcttaagtggttgaatggagaattttttgcctgactaataattttaattaataaatactgacataactgttcttaccattaaaatagtttagcttctaaaaatattgggatgtgcattaatatggatttatatattgggcattaaggaggcgaaatttttataaaatatatcacaagataagttattttctagtaaaacattccaaataaaacaattttaataagattaa

SEQ ID NO: 4712 - DNA, 1676 bp, Diabrotica virgifera
  SmartBlast Evalue=7E-38; Info=Heterochromatin protein 1beta- like protein n=1 Tax=Bombyx mori RepID=C8KIP4_BOMMO
tgatattagcgcgcgtgcatcaagttttgtcctgctttaaaaggaaatattcacagttctttacacctgcaagatttcggcatttttgcatttaaggttagagttgctacacaaaggtcacaaagttaaaaaaccaaaaaatgagcaaaagcagaaaaacctctccagaccctgatgaacctatagaggaatacactgttgaaaaaattatagacagcagaattaatgcctcaggggtaaaagaatatctgttgaaatggattggatacgatcataaagacaatacttgggaacctgaaggacatttggactgccccagcctcattaaagaatatgaaatgaacaaggagaaagaaaagagtaaaaataagaaaaaagtggaagaaaaacgtgggaaagatgataaaaaaacccatggatttgacagaggtctagaacctgaaaaaattattggtgctacagatacgtcaggttcactgatgtttttgatgaaatgggtcggtactgacgaggccgacctcgtaccagcaaagcaagcaaacgtcaaatgtccacaggtagtaattaagttttatgaagagcgactaacttggtctgccccaccatcagaagattaccgaaattaaaagtcgtgtattcttaattttaagcatagtatgtaacttagtttctccgttttttactttttttattgatcttgcctttttaataaggtaaaacttaattttaacgtgggattattgaacaaaaaaagtagttgatttttattacattatagagtttataatatgctttattaggtttataactttgggaagatggaagtttttgaatatattgggaccatcaaattttggttgacatacattacacttagttcagtcacatttgattagtcatcgggacgccatgtttctaatcaaatgacataaacaaaaaaacatgtacagtagaataccccggttatccgtgctccatgggaccaacacggcactgataatagttgaaaaatttattttttatatatgatacatatgtacacacataatgtgcctactataacaagataaagaaaagaaatctcataagtttaaaactcatagttcaatcttctgatgtattctatgcaagttcaaaccgcaagattgacaagttctgaaggttctcgttgctcaagcctatctcaagttctcttttgattaataccgttccatcattttcttcgtctttattctcattttcaaatgaatcagttttaaaggttcttttattttcaagtgttcaagttgttatttctgcagaaaccacttggttttattaaagtgctttatcgagttattaaaaagtcaatcgttccaatgattttcttgcagatatgttgagagtagagttcgacctgaacatgaaattttgtattgtttgcttaacaacctcatagattcatgataataatgcaacacgttcacctttctacttctgtttaaaatctgtaatgtttgttcaatatttaaagcatttctcttgcggttaccactggttattgtcagttactggtaaagacacgtattagacacgctaagaatatagcagagtagttaatcttctctagcgcgcaactaaatctcacacatacggagtagcacgcagcagcgtatgatttacagggattcccagag

SEQ ID NO: 4713 - DNA, 1524 bp, Diabrotica virgifera
  SmartBlast Evalue=1E-28; Info=Heterochromatin protein 1beta- like protein n=1 Tax=Bombyx mori RepID=C8KIP4_BOMMO
attgtttagaattaaatggtatgatttatttaataatagattactattcgttcaattcggaataataaatggtatgcagaacaagatagcgaatggttggatacattaaaatgatacgatcataaagacaatacttgggaacctgaaggacatttggactgccccagcctcattaaagaatatgaaatgaacaaggagaaagaaaagagtaaaaataagaaaaaagtggaagaaaaacgtgggaaagatgataaaaaaacccatggatttgacagaggtctagaacctgaaaaaattattggtgctacagatacgtcaggttcactgatgtttttgatgaaatgggtcggtactgacgaggccgacctcgtaccagcaaagcaagcaaacgtcaaatgtccacaggtagtaattaagttttatgaagagcgactaacttggtctgccccaccatcagaagattaccgaaattaaaagtcgtgtattcttaattttaagcatagtatgtaacttagtttctccgttttttactttttttattgatcttgcctttttaataaggtaaaacttaattttaacgtgggattattgaacaaaaaaagtagttgatttttattacattatagagtttataatatgctttattaggtttataactttgggaagatggaagtttttgaatatattgggaccatcaaattttggttgacatacattacacttagttcagtcacatttgattagtcatcgggacgccatgtttctaatcaaatgacataaacaaaaaaacatgtacagtagaataccccggttatccgtgctccatgggaccaacacggcactgataatagttgaaaaatttattttttatatatgatacatatgtacacacataatgtgcctactataacaagataaagaaaagaaatctcataagtttaaaactcatagttcaatcttctgatgtattctatgcaagttcaaaccgcaagattgacaagttctgaaggttctcgttgctcaagcctatctcaagttctcttttgattaataccgttccatcattttcttcgtctttattctcattttcaaatgaatcagttttaaaggttcttttattttcaagtgttcaagttgttatttctgcagaaaccacttggttttattaaagtgctttatcgagttattaaaaagtcaatcgttccaatgattttcttgcagatatgttgagagtagagttcgacctgaacatgaaattttgtattgtttgcttaacaacctcatagattcatgataataatgcaacacgttcacctttctacttctgtttaaaatctgtaatgtttgttcaatatttaaagcatttctcttgcggttaccactggttattgtcagttactggtaaagacacgtattagacacgctaagaatatagcagagtagttaatcttctctagcgcgcaactaaatctcacacatacggagtagcacgcagcagcgtatgatttacagggattcccagag

SEQ ID NO: 4714 - DNA, 1608 bp, Diabrotica virgifera
  SmartBlast Evalue=1E-40; Info=X box binding protein-1 (Fragment) n=1 Tax=Drosophila melanogaster RepID=Q8MLW7_DROME
cgataatttccataaatattttattcagtatagagaaaagagtgaaactgtagagattaaagtaaatggtgattgttgtctaagtaaaacaaagtaaatgagtaaatattgaataataataataatacagtgaaataacaagtgtttactttaaaaataaaaagttgaaatttaaagaaatattaacaattttaatcaagcaacaatgacgacgacagtgtcatcaatattgaaatttttggaaaacgcagataaaaattttgccatggatacagattcagacattccaaaaaccaaaaagagaaaattggaccatttgacatgggaagaaaaattacaaaggaagaaattaaagaatcgtgtagcagcccaaacttcccgagataggaaaaaagccaagatggaacagatggagcaggctctccagcagctctttgtgaaaaacgagtccctattagtcgaatgtaaaaacctcaagctcgccaaccagaagctccaacaagaaaacacagaactgtacaatcgtctgcaggccccttgtctgtcatgtgcccaagctcaaaaccgttctgtcgggtgtgagtccctaaatggatccacagcgtccctccttctgccgaaaggaagagtcacacacccagcagcggctttgagcaaacagcagacaatggtcttgttgaaaatcgtactgacctgccttctttaccggacctccttgatgaactcgaggcagacgtcgaccttaactcgttggaacaactcactcagagcctccttgaagatatcgccagagacttggaagctactgctcagaaaacaagtaatgaagaatcaggaagtaatggaagtagctatggagaaatggtggggacgacatcaacagagttggaatccagtgggtgcacaaccaatacgaagtcgctagaaagcgacatctcggagtatttgctgcttcaccacaactatgctgctaaacccccattagacgacacattaaaaaccaagagcccaattaatagaaaccgaaaattgaaaaccatcaaaccaaaacgcaagattgtcactacaaaacctgttgtacctgaaagtgatgtggtttatggaacacttgatgaagttagcaatgttgtcacgataatagtggacagtaatggagtaccaatgacagaagaagcgttacaaaggttagaaaacagagaggaggaaacccaactcactgttcccttacctcctgtaacacaaggtgaattggttactccgttaccagttgcagaatcaaacagatctacttcatcatctgttgcagaatcacacctcactgttccaacagccatgctagaatgtttgtctccaatgtcctgcagtgactctgatcgaggatatgaatcattagattctccgattagtttacctgaagatctttgggaccaaagtatatcagagctatttccatctttactctaggtttaaacctctaacatcgtgtacagtttaatttaaattaggttacttaatttattttttacttaaagagtgatttttatatatatttgttatattgtgtatattttgtaaatttaggtaataaagttgtggatgtagcagatc

SEQ ID NO: 4715 - DNA, 1599 bp, Diabrotica virgifera
  SmartBlast Evalue=1E-39; Info=X box binding protein-1 (Fragment) n=1 Tax=Drosophila melanogaster RepID=Q8MLW7_DROME
aaatattttattcagtatagagaaaagagtgaaactgtagagattaaagtaaatggtgatagttgtctaagtaaaacacagtaaatgagtaaatattgaataataataataataatacagtacagtgaaataacaagtgtttactttaaaaataaaaagttgaaatttaaagaaataatcacaattgtcaagcaacaatgacgacgacagtgtcatcaatattgaaatttttggaaaacgcagataaaaattttgccatggatacagattcagacattccaaaaacaaaaagagaaaattggaccatttgacatgggaagaaaaattacaaaggaagaaattaaagaatcgtgtagcagcccaaacttcccgagataggaaaaaagccaagatggaacagatggagcaggctctccagcagctctttgtgaaaaacgagtccctattagtcgaatgtaaaaacctcaagctcgccaaccagaagctccaacaagaaaacacagaactgtacaatcgtctgcaggccccttgtctgtcatgtgcccaagctcaaaaccgttctgtcgggtgtgagtccctaaatggatccacagcgtccctccttctgccgaaaggaagagtcacacacccagcagcggctttgagcaaacagcagacaatggtcttgttgaaaatcgtactgacctgccttctttaccggacctccttgatgaactcgaggcagacgtcgaccttaactcgttggaacaactcactcagagcctccttgaagatatcgccagagacttggaagctactgctcagaaaacaagtaatgaagaatcaggaagtaatggaagtagctatggagaaatggtggggacgacatcaacagagttggaatccagtgggtgcacaaccaatacgaagtcgctagaaagcgacatctcggagtatttgctgcttcaccacaactatgctgctaaacccccattagacgacacattaaaaaccaagagcccaattaatagaaaccgaaaattgaaaaccatcaaaccaaaacgcaagattgtcactacaaaacctgttgtacctgaaagtgatgtggtttatggaacacttgatgaagttagcaatgttgtcacgataatagtggacagtaatggagtaccaatgacagaagaagcgttacaaaggttagaaaacagagaggaggaaacccaactcactgttcccttacctcctgtaacacaaggtgaattggttactccgttaccagttgcagaatcaaacagatctacttcatcatctgttgcagaatcacacctcactgttccaacagccatgctagaatgtttgtctccaatgtcctgcagtgactctgatcgaggatatgaatcattagattctccgattagtttacctgaagatctttgggaccaaagtatatcagagctatttccatctttactctaggtttaaacctctaacatcgtgtacagtttaatttaaattaggttacttaatttattttttacttaaagagtgatttttatatatatttgttatattgtgtatattttgtaaatttaggtaataaagttgtggatgtagcagatc

SEQ ID NO: 4716 - DNA, 1632 bp, Diabrotica virgifera
  SmartBlast Evalue=1E-152; Info="Calcium/calmodulin-dependent protein kinase type 1G, putative n=1 Tax=Pediculus humanus corporis RepID=E0VDR5_PEDHC"
ctcatatcttcaaataacaagccacttaaagaattattatttatgtatttctatgtgcagtacagagtgaattttttttaatgaaagtagatgggtactctttagtgtactacaaaatgttttatccaaaatacggtaaattcttaatacggtaaagattctcctactacgaattatcacaatgataaaagtcgacgaaaatgatcccgtaggggaggttcaattaagtttcccacatagagaagttcaaattcaaagagggaaagatccaaaggatttttacacgttagaggaagaaattggaagaggaaaatttggtacagtatacagatgcaaagaaaaatcgaccggattgtgtctagcagcaaaattcatcggttgtcctaaaaaagaagacagacgaaatgtggagagagaaatagatataatgcggtctcttcaacatccccggttaattcagatatatgatgcttttgaaaatggaaagatcatgacagttattttagaattaatcgaaggcggcgagttgttcgagagggtcatcgacgacgacttcatattgactgagaaaagctgcacggttttcatgaggcaaatatgcgaaggcgtcgatttcatacacaaacagaggatattacatttagacatgaagccggaaaacatcctttgtctgacgaaaaccggaaacaggattaagataatcgactttggattagccaggaagttcgatcccaacaagaaactccaagttttattcggcactccagagttcgtagctcccgaagtcgtcaacttcgacgaaatcggatacggaacggacatgtggtcggtgggagttatctgctatgtgctgttatctggtctctctccatttatgggtcacacagacgtggaaaccatggcgaacgtcaccatagccaaatatgacttcgaggatgaggcatttgatgaaatatcggaaaacgcaaaagactttataagaaaactcctcatcaaagacatgaaccagcgcctatcggcaacagactgcctcaatcacgactggctcaaacggaagaagtcgccgcctactctcccgaaaacacccagcatggacgtcaccaaggacaatttgaaacagttcgttgaaaggtggaacgagcatcctaactcaccgtatgtttttgagattagttcccatgtgatatcaccatcgatgctgcctaatggcgaagaaaacctttctggttccagtcaatctctaatcggtgagtcaccttctccgtgtgggtctttagcctcatcaccagggtcagacaacgcttttgtgaacgatggacaagaaagtttagagcagcaactattagcaccaccagttgagcacttcagaagagcttctgacagcacttgtgtggtgaaaacaaatgatattacagagagaatgaatttggctgaagaaattagaaaattatcagataaacttttccaactgtctaatttcaatacgagtctcactaataaagaggcagtatttaaaaacgaagtctctgtagccaaagaggaaactattactaggagtgtaccgataacaatcacaggaagaaagcacaaagatgacgtcatagctctcgatgatgaaaacaaagaaacaat

SEQ ID NO: 4717 - DNA, 1571 bp, Diabrotica virgifera
  SmartBlast Evalue=1E-152; Info="Calcium/calmodulin-dependent protein kinase type 1G, putative n=1 Tax=Pediculus humanus corporis RepID=E0VDR5_PEDHC"
gaaaaggtggttgcgaaattttcttgtcgtgaaaagcgtcgcgccgaattttccgagtcgaatcgaatcaaagaaaagttttttagggccaagtataaaagcagaaaaagaattatcacaatgataaaagtcgacgaaaatgatcccgtaggggaggttcaattaagtttcccacatagagaagttcaaattcaaagagggaaagatccaaaggatttttacacgttagaggaagaaattggaagaggaaaatttggtacagtatacagatgcaaagaaaaatcgaccggattgtgtctagcagcaaaattcatcggttgtcctaaaaaagaagacagacgaaatgtggagagagaaatagatataatgcggtctcttcaacatccccggttaattcagatatatgatgcttttgaaaatggaaagatcatgacagttattttagaattaatcgaaggcggcgagttgttcgagagggtcatcgacgacgacttcatattgactgagaaaagctgcacggttttcatgaggcaaatatgcgaaggcgtcgatttcatacacaaacagaggatattacatttagacatgaagccggaaaacatcctttgtctgacgaaaaccggaaacaggattaagataatcgactttggattagccaggaagttcgatcccaacaagaaactccaagttttattcggcactccagagttcgtagctcccgaagtcgtcaacttcgacgaaatcggatacggaacggacatgtggtcggtgggagttatctgctatgtgctgttatctggtctctctccatttatgggtcacacagacgtggaaaccatggcgaacgtcaccatagccaaatatgacttcgaggatgaggcatttgatgaaatatcggaaaacgcaaaagactttataagaaaactcctcatcaaagacatgaaccagcgcctatcggcaacagactgcctcaatcacgactggctcaaacggaagaagtcgccgcctactctcccgaaaacacccagcatggacgtcaccaaggacaatttgaaacagttcgttgaaaggtggaacgagcatcctaactcaccgtatgtttttgagattagttcccatgtgatatcaccatcgatgctgcctaatggcgaagaaaacctttctggttccagtcaatctctaatcggtgagtcaccttctccgtgtgggtctttagcctcatcaccagggtcagacaacgcttttgtgaacgatggacaagaaagtttagagcagcaactattagcaccaccagttgagcacttcagaagagcttctgacagcacttgtgtggtgaaaacaaatgatattacagagagaatgaatttggctgaagaaattagaaaattatcagataaacttttccaactgtctaatttcaatacgagtctcactaataaagaggcagtatttaaaaacgaagtctctgtagccaaagaggaaactattactaggagtgtaccgataacaatcacaggaagaaagcacaaagatgacgtcatagctctcgatgatgaaaacaaagaaacaat

SEQ ID NO: 4718 - DNA, 1650 bp, Diabrotica virgifera
  SmartBlast Evalue=1E-155; Info="Carboxypeptidase E, putative n= 1 Tax=Pediculus humanus corporis RepID=E0W2S8_PEDHC"
tgggttcgtcgagtatgttgcgttgtttcgcgctagttttagctctcctgtcagcacagagcttccagtttgagtttaaacatcacaacaacgatgatctggtcgctgttttgcaggatgtgaacgcgagatgtccgaatatcactaggatctacactttgagtgagaattcagtgttggggttgccgctttatttcatcgagttttccactaacccagggcgtcatgaaattcttaaaccggagttcaaatacatcgctaatatgcacggaaacgaggttttgggcagggaattgctgctcaagctggcagatttcctctgcgatgagtacacgaagggaaataaacagattaggtctctaatcaggacgacgaggatccatctaatgccgagcatgaatcctgatggatggcaactggcaacggatactggtggccaggattatttgactggaagaacaaacaacaactcagtggatttaaataggaactttcccaatttagataggatcattttcacgaacgaagagcagcaccttaaccataacaaccatttgctagaagatctcacacacctggatcaaccactccagccagaaacaaaagctgtgattcgtcttataatgcaagttcccttcgtactatctgctaatttacatggaggggatcttgtagctaattacccctatgatgatagcagatctggcagacaaaatggagaatatactgccacgcctgatgatgaaacctttagacacttagcattatcgtattcctcttaccatgccgatatggcaaacccaaaaagaaaaggctgcggtgactacgaaagccaagattttcctaaacaaggtggtataacaaacggtgccaaatggtacgcactacaaggaggtatgcaagattttaattatctttcaagtaatgatatggaaattactttggagttaggctgtgaaaaatatccaccagcatctgaattagaacctgaatgggagagaaataaagatgctctcattaacttcatatggcaggctcatattggtgtaaagggagtagtatacgacaaccaatcaaagcgtggcattcccggagcagtaatacatgttagaaacattacagatttagaaaaatcatatgatatagaacacgacgtaacttcagttcatgatggagattactacagactgctgacaccaggcaaatacaagctcacagcctaccgagacggattcttgccccgatcgaaaatagtgactgttctgaataaacccttcgaagaagcacccagggtggatttccctctgaaaccaatcacgatgccaccatatatcagaatccaaacgaacaactacatcaactctaagctagatgacgagttcgacaaccagcagatctccaattgggccgaagaaaacgagcccatccctgaaccgatagcggtgcaataaaaaattccagtgaacaatatttttgtgtcaaactgtatttatttcattagagcacaacatagaaactgaaaaggttattttaaattaagaaaaatactgtgtgggaaaagtaataggataatcttgtcagtaaagtacatctaaactacttatgatcttggtcattttttcacattcttggtcatttggtaaaataact

SEQ ID NO: 4719 - DNA, 1523 bp, Diabrotica virgifera
  SmartBlast Evalue=1E-155; Info="Carboxypeptidase E, putative n= 1 Tax=Pediculus humanus corporis RepID=E0W2S8_PEDHC"
tgggttcgtcgagtatgttgcgttgtttcgcgctagttttagctctcctgtcagcacagagcttccagtttgagtttaaacatcacaacaacgatgatctggtcgctgttttgcaggatgtgaacgcgagatgtccgaatatcactaggatctacactttgagtgagaattcagtgttggggttgccgctttatttcatcgagttttccactaacccagggcgtcatgaaattcttaaaccggagttcaaatacatcgctaatatgcacggaaacgaggttttgggcagggaattgctgctcaagctggcagatttcctctgcgatgagtacacgaagggaaataaacagattaggtctctaatcaggacgacgaggatccatctaatgccgagcatgaatcctgatggatggcaactggcaacggatactggtggccaggattatttgactggaagaacaaacaacaactcagtggatttaaataggaactttcccaatttagataggatcattttcacgaacgaagagcagcaccttaaccataacaaccatttgctagaagatctcacacacctggatcaaccactccagccagaaacaaaagctgtgattcgtcttataatgcaagttcccttcgtactatctgctaatttacatggaggggatcttgtagctaattacccctatgatgatagcagatctggcagacaaaatggagaatatactgccacgcctgatgatgaaacctttagacacttagcattatcgtattcctcttaccatgccgatatggcaaacccaaaaagaaaaggctgcggtgactacgaaagccaagattttcctaaacaaggtggtataacaaacggtgccaaatggtacgcactacaaggaggtatgcaagattttaattatctttcaagtaatgatatggaaattactttggagttaggctgtgaaaaatatccaccagcatctgaattagaacctgaatgggagagaaataaagatgctctcattaacttcatatggcaggctcatattggtgtaaagggagtagtatacgacaaccaatcaaagcgtggcattcccggagcagtaatacatgttagaaacattacagatttagaaaaatcatatgatatagaacacgacgtaacttcagttcatgatggagattactacagactgctgacaccaggcaaatacaagctcacagcctaccgagacggattcttgccccgatcgaaaatagtgactgttctgaataaacccttcgaagaagcacccagggtggatttccctctgaaaccaatcacggtaagtccggaaaatgttgaacctgatgtctttattgttgaagttgacactttttacgacgaatttcaagtacagccagtaccagaagtagggatgtcttatgatggctttacaaacgataactataacgaaatgaatgactatgttaattatgatggctattttcgggattatcctgattggggacaaaattatgagccgtat

SEQ ID NO: 4720 - DNA, 1612 bp, Diabrotica virgifera
  SmartBlast Evalue=1E-144; Info=Beta-glucosidase (Fragment) n=1 Tax=Tenebrio molitor RepID=Q9GSE6_TENMO
cgtacgtatcaattaggtataaaatctaatgttttaatttttagtatttgtcgatccagcaatgatcagtaaagagctgtggcttctatgcattgtgttgtcaactagtttggcaacaacaatcaatgtatccaaattcccgaaagattttatgtttggtacggcaactgcctcttaccaagtagaaggtgcatggaacgaggatggtaaaggggaaaatacttgggacgaagtaactcatagagtgccatcaccaattgtcgataactcaaccggagatgtagcttgcgactcttatcacaaatataaagaagatgtggctatgcttaaacatttgggagtcacccattacagattttcgttgtcgtggtccaggattctacccacaggttttaacaacaaagtcaactcccttggaatcgcttattacaaaaacctcatcaaggaacttagagccaataacatcgaaccattagtaacaatattccactgggatacaccccaaccattggaaaacttgggtggatggaccaacgagctaataattgatagatttgtagattacgccaaggtggtatttgaaaatttcggtgatgatattacatactggttgacattcaatgaaccaaaacaaacctgcaatggaggttacggtagcttgcaaaaggcacctctcgttaattcatctggtattggggaatacctttgcacccataatgttcttaaggctcacgctaaagcgtggcatttgtatgacgagcaattccgtagtacacaaaaaggatttgttggaattactatagatacagcttggatggagccagacacagatagtactgaagatgtagatgctgcagaacgactacaacaatttaatcatggatggtatgcgagacctttactattgggcgactatccagaagcgatgaagaaaacaatcgcagaaagaagcgcacttcaaggcttcagtcagtcgcgtcttccagaattcactcaagatcaaatcgagtacttgaacggtactgttgactatttgggactgaattattatactacggttatggcaacaaatgctgctgataaacgaatagatgttgtctcttgggaagcagacgctgaagttaacacgtatcagaaagaagaatggcctacatcggcttcgtcatggttaagggtcgttccttggggactaagaaaaacattgaactggatcaagaacacatatggcgatatcccaataataataacggaaaacggtatatcagaggatggtacatctctagaagatgatacaaggattgactattaccagcaacacttgagcgctgtgaaagatgcgatggacgatggagtaaatgttttcggtttcacagcgtggagtttgatggataatttcgaatggttacgtggatattcggaggacttcggcctgtaccacgtagatttttcgagcccagatcgaacaagaacaccaaagaaatcagtggaataccttaaaaatgtgatacaatacagatgtgttctaggaaattcctacatgcgatgattaattttttttgtgttttacaaaaacaaatgaattatttgatttattaataaaaaagtaccaaca

SEQ ID NO: 4721 - DNA, 1554 bp, Diabrotica virgifera
  SmartBlast Evalue=1E-143; Info=Beta-glucosidase (Fragment) n=1 Tax=Tenebrio molitor RepID=Q9GSE6_TENMO
gcaatgatcagtaaagaagtgtggcttctatgtattgtgttgtcaactagtttggcgacaacaatcaatgtatccaaatttccaaaagattttatgtttggtacagcaactgcttcttaccaagttgaaggtgcatggaacgaagatggtaaaggggaaaatacttgggacgaagtctctcacagagtgccatcaccaatcgtcgataactcaaccggtgatgtagcttgcgactcttatcacaaatataaagaggatgtggctatgcttaaacatttgggagtcacccattacagattttcgttatcctggtccaggattttacccacaggtttcaataataaggtcaacccccttggaatcgcttattacaaaaacctcatcaaagaacttagagccaacaacatcgaacctttagtaactatattccattgggatacacctcaaccattggaaaacttgggtggatggaccaacgagctaatagttgatagatttgtagatttcgccaaagtagcctttgaaaatttcggtgatgatgttacatactggttgacattcaacgaacccaaaccaatatgccacgaaggttacggtagcaaaaataaggcacctcttgttgactcacctggtattggggaataccattgtgcccataatcttctcaaggctcacgctaaagcgtggcgtttgtatgacgagcagtttcgtagtacacaaaaaggactggttggaattactgtaaatacagcttggtttgagccagacacacctagtgttgacgatgtagttgctgcagaacgagcacaacaattcaatcatggatggtatgtcagacctttaaccttcggcgattatccagagcaaatgaagagcgtaattgcaaaaagaagctcacttcaaggtttcagccagtcgcgtcttccagaattcactcaagacgaagtcgagtacttaaaaggtactcttgactatttggggctgaactattataccacaagtatggcacgaaatgctgctgataaacgaagagatgttgtttcttatgacgcagattcggaagttgatacgtaccaaaaagaggaatggcctaaaacggcctcatcatggttaagggtagttccatggggactaagaaaattattgaactggatcaagtttacatatggcgatattccaataataataacggaaaacggtgtatcagaagatggttcgtctctggaagatgatataaggaccgactattaccagcaacacttgagcgctgtgaaagatgcgatggacgatggagtaaatgttttcggtttcacagcgtggagtttgatggataatttcgaatggttacgtggatattcggaggacttcggcctgtaccacgtagatttttcgagcccagatcgaacaagaacaccaaagaaatcagtggaataccttaaaaatgtgatacaatacagatgtgttctaggaaattcctacatgcgatgattaattttttttgtgttttacaaaaacaaatgaattatttgatttattaataaaaaagtaccaaca

SEQ ID NO: 4722 - DNA, 2470 bp, Diabrotica virgifera
  SmartBlast Evalue=0; Info=Beta-mannosidase n=1 Tax=Harpegnathos saltator RepID=E2C737_9HYME
tggaaccatggccgctattaagggattcctgctgtatcttttatttatagctagttcttattcagcaaaggtcaatagtttgaatggactgtggaagttcagagatgaaagtggtgaatatgccggtcttactggtactattcctggtggtatttatagtgatttgatgagcaacaaaattattgatgatatattttacggagataatgatgtcaagactaaatgggttcctagacgtaactggacctactacagaaactttgatgttacggaagatattctgaacaatgataatgttaacctggttttcgaaggtctcgatacgtttgccagcgtggttgtaaacgatgtcattgtgggttccagcagaaatatgtttgtgagatacattttcgatgtgaagaaagctttaaaagtgggacaaaacaaaatagaagtaagcttcctttctcctattgaagttgcagctaatctagctgctgaacaagctaaagcctatgtcgtacctccaacctgtccacccaatgagtacagaggagaatgtaacgttaatatgatcagaaaaatgcaagcttcttattcttgggattggggtccagcattcgcatctgtaggaatctggaaggacgcatacattgaatcctacgcagagagtgtaataagatatgtagcagttgatatagaagatgacgatcagaactggatacttaaagtcgatacttacctaggagacaatgcaaaacaccatgtgcaaggaaaacttacattacaacaaaaaaccgaagaccagactcttgaacaaagtgtggatattgacattgtgcctaatgaccacagtgaactacttcatagcagggtgatatccgtatccaaaaacgctgtcactccttggtggccaaatggatatggtggacaacaactttatgatttgacagtcacctttgatagcaaaagtggtgatgaatctaatagtaaggtcactcgaattgggttcaggaaaattgagcttattcaagataaacttgatcatggtactactttttactttaaagtgaacggaatgccaatttttatgaagggatccaacgaaatacctctagacatccttccagaacggggacaatcaaaaagtttaataaagaaactgctcagcacagccaaaaactcgcacatgaatatgttgcgcgtgtggggtggtggagtatacgaatcagattatttctacgatttagccgatgaatatggtattctgatttggcaggatttcatgttcgcttgtgccatgtatccaacgtccgacagttatttagaaaatgtcgcggaggaagtaagacaccaagttaatcgtttgcgttctcaccctagtattgcattattcgctgggaacaacgaaaatgaagcagctttacgtcaaagttggtacggtaccgctttcgatttccagcggtattataacgattatgtcaaactctattatacaactattcaaagtgaggtagaacgtattacgggaaaaagaagaatttacctaatgtctagtccatcaaatggagttgaatctattagtgaaggatacgtagcacagaatccgggtgattatgcttatggggatgtccacttctacaactacgtttccgacccatgggattccaatatataccctgtatcaaggtttacttcagaatatggttaccaggcattgccaagctacagatctttgttagaagcgaccaataacgaatcagacctgaacattaatagtgcttttatggatcacagacaacaccatcctcaaggaaaccaacagatgaaagctctcatcgaatttaatttgaaattgcccgatgaaggtcatcagaattattcaaaagctttcatttactatctacagatagcccaagcagtcggaataaaaattgaaagtgagcattaccgtcgttaccgaagcattttgaatgatcaaggtctaggcaggacgatgggtgctctctattggcagctaaatgatgtatggttagctcctacatgggctggaattgacttcaccggtaggtggaagatgctccagtattttgtaggagaatttttcgcacccatcattattactggtcatatcaactcggctcgaactcttgaaatatatgtggtttcagatgttatagcacctcttccgggtctagtagcttcaattagagtatttaaatgggattctttcacaccagtctctactgaagaagtcgctgttgatatggaagcaggtgaatccaaactaataaaatcagttccaacagacagctacttgagtgagaacggatgtggcgattctcctaaagacaactgcttcttctcgttagttgttaaaaatggaaattatccagttggaccaaataattatgtattcccatctcatcttaaaaattcacatccagaaaggcccaatgttaaaattgattcagtaaaagtatacaat

SEQ ID NO: 4723 - DNA, 681 bp, Diabrotica virgifera
  SmartBlast Evalue=5E-35; Info=Beta-mannosidase n=1 Tax= Camponotus floridanus RepID=E2A2D8_9HYME
tttatttctaacgcgtgttgttgtaggccattggcattccagatagctaagtattttatatttgggttgtactgtcattaagctaatttactaacgactgcgatagcccaagcagtcggaataaaaattgaaagtgagcattaccgtcgttaccgaagcattttgaatgatcaaggtctaggcaggacgatgggtgctctctattggcagctaaatgatgtatggttagctcctacatgggctggaattgacttcaccggtaggtggaagatgctccagtattttgtaggagaatttttcgcacccatcattattactggtcatatcaactcggctcgaactcttgaaatatatgtggtttcagatgttatagcacctcttccgggtctagtagcttcaattagagtatttaaatgggattctttcacaccagtctctactgaagaagtcgctgttgatatggaagcaggtgaatccaaactaataaaatcagttccaacagacagctacttgagtgagaacggatgtggcgattctcctaaagacaactgcttcttctcgttagttgttaaaaatggaaattatccagttggaccaaataattatgtattcccatctcatcttaaaaattcacatccagaaaggcccaatgttaaaattgattcagtaaaagtatacaat

SEQ ID NO: 4724 - DNA, 1626 bp, Diabrotica virgifera
  SmartBlast Evalue=6E-89; Info=Lipid storage droplets surface- binding protein 1 n=1 Tax=Harpegnathos saltator RepID=E2BDR6_ 9HYME
aattaatagtgagtgatcgttgtgtggttactaaatacataggatatttttagaggaggtaacatggctcatagaaaacgaagaaatcgaataagaaaatcgtatgcaactaaacgtttggaaaaagaaattttggaacaactgactactacatcacaaaatacaaccaagccggttattgcacaaccatgctatgttacagttggggtacagactgaagatgaattgccgtcaatacataagaagaaagcttttgatattaatgatctagaatcagtagcacgaatctctcatataccaattgtagaatcaggatggagttatgccgaaggagtctatatgaaaattaagagatcaaattcgttgatacactggactttggacactgccgagcaatcggctcagtcagtgtacgaagctgcttcaccggcaatgattctactaaaaggacctttgtcgtctctagatcaaattgtttgcaaaagtctagatattgttgaacaaactgtaccttctatcaatttaccgccagaaatgatttactggaacacgaaacagtacgttcaagaagtcggaacgaagatagctcagcctgttttaaagagagccgattcagtgaagcagattggaaacagtgtattatccagcaaatacactgccatagctgctgatactttggacggcgctttagttgtagctgagaagtacgtcgataaatatttgccggctcaggatgatcaagcttcagaagaagtttctgttcctgttactgaggatggtcctaaaggaaaagcgattagcacaattcatcacgctgacaggttttcaagaaagcttagaagacgcttgactcaaagaacaatcgccgaagtcaaagccctaaaacaccaaagtgccgaagcagtacacgttctcacatatgttctagaactgattgctactgatcctgtcctggcttaccaaaaaggaaaagagttgtgggctagtttgagccaagacgaaccggagaaccaggcaaggccagaaaatctcgagcagttgattgtactcttgaccagggaatctgccagaagagttgttcatctaattaatttctcaagcaccttgcttagcacacttccaaagaggatttcatattccatcggtgctgttgtcaacaagttcttggctttgacggattctgctgtcaagacggtccatatggaaaatgttcaagaaaaagttgtggctgttttaaaagctcaggctcacgtattggcacttgctataaagaacgtcaataatcaaattagcgaatatttggaacaaatcgccgaagacttatctaaacgaggagaaagacccaaagctgtgctttccgttcctcaaataactgtcaatactcccaaagcaactctggtcaactccaagcaaaacgcaaacggcgttgaaaataattaagaacaaatttactgattgatatattatgataacgaattatgtaaaagatataatataatagtatttgggccttaatgtactaaaagtaaacatttttaggtgtagtgataccttaacaaatagagctttaagtactagattcagattatatcatctcacacttagactaatatacagactattctc

SEQ ID NO: 4725 - DNA, 1515 bp, Diabrotica virgifera
  SmartBlast Evalue=2E-84; Info=Lipid storage droplets surface- binding protein 1 n=1 Tax=Harpegnathos saltator RepID=E2BDR6_ 9HYME
aattaatagtgagtgatcgttgtgtggttactaaatacataggatatttttagaggaggtaacatggctcatagaaaacgaagaaatcgaataagaaaatcgtatgcaactaaacgtttggaaaaagaaattttggaacaactgactactacatcacaaaatacaaccaagccggttattgcacaaccatgctatgttacagttggggtacagactgaagatgaattgccgtcaatacataagaagaaagcttttgatattaatgatctagaatcagtagcacgaatctctcatataccaattgtagaatcaggatggagttatgccgaaggagtctatatgaaaattaagagatcaaattcgttgatacactggactttggacactgccgagcaatcggctcagtcagtgtacgaagctgcttcaccggcaatgattctactaaaaggacctttgtcgtctctagatcaaattgtttgcaaaagtctagatattgttgaacaaactgtaccttctatcaatttaccgccagaaatgatttactggaacacgaaacagtacgttcaagaagtcggaacgaagatagctcagcctgttttaaagagagccgattcagtgaagcagattggaaacagtgtattatccagcaaatacactgccatagctgctgatactttggacggcgctttagttgtagctgagaagtacgtcgataaatatttgccggctcaggatgatcaagcttcagaagaagtttctgttcctgttactgaggatggtcctaaaggaaaagcgattagcacaattcatcacgctgacaggttttcaagaaagcttagaagacgcttgactcaaagaacaatcgccgaagtcaaagccctaaaacaccaaagtgccgaagcagtacacgttctcacatatgttctagaactgattgctactgatcctgtcctggcttaccaaaaaggaaaagagttgtgggctagtttgagccaagacgaaccggagaaccaggcaaggccagaaaatctcgagcagttgattgtactcttgaccagggaatctgccagaagagttgttcatctaattaatttctcaagcaccttgcttagcacacttccaaagaggatttcatattccatcggtgctgttgtcaacaagttcttggctttgacggattctgctgtcaaggaacaaatcgccgaagacttatctaaacgaggagaaagacccaaagctgtgctttccgttcctcaaataactgtcaatactcccaaagcaactctggtcaactccaagcaaaacgcaaacggcgttgaaaataattaagaacaaatttactgattgatatattatgataacgaattatgtaaaagatataatataatagtatttgggccttaatgtactaaaagtaaacatttttaggtgtagtgataccttaacaaatagagctttaagtactagattcagattatatcatctcacacttagactaatatacagactattctc

SEQ ID NO: 4726 - DNA, 1583 bp, Diabrotica virgifera
  SmartBlast Evalue=8E-81; Info="Sugar transporter, putative n=1 Tax=Pediculus humanus corporis RepID=E0W0A9_PEDHC"
aaacaatcataatttattataattaaacataaaaaagacaaataatacaaaattttaaatgaaggtacaatgttttatttattgagctcctgttgtatttcctcgagagttttacctttagtttcaataacaaaaaattttgtaaagggtattgaggctgcacagcaaacagtaaatatcaaaaaacaaactcctaagccaatagcatctttaattggatcgaaaaaatatacgattaagaagccaagcagccaacaaaaggaggctgtaagtgatgaagcaatggattttacattagctgggtagagttcgcccattatagtccaaggaagagaacccatacccagattgtaagtaaggatataaacaagaaggcaaagaattggtaagaaagaaatactctttacatatacatctgttttttcatctaagtagctgtatatgcctagtagtaattcagatattaccatgccaattccagatgctaaaagcaatatttttctacctaatctatcaattaacgacattgacataaagctagaaagaagctgaaatattccgactaaaattgaacaaacatcagatgatattggagtcttcgcagcctcaaatattggcgcagtattagataatacagcattaattccagaaaattgttgaaagaaaataagtccagatgcgataatgaatgctttgacattaccactggatctaaatatatccataattccacctttaccttcctccttcagtgctttttctataaacgttacttcactgtcgatatctgcagtggctccacgtaattttttaagaatcactttagcttcagatatattttgtttgccaattaaatatcgaggactttctactgaaaaaataaagaataatatcaaaaagaaagcaggaaaaagggcaagaataatattaaagacgagaatagtagtataaggccctactgcatatgagaatagaattcccaaacatataaatatatttaatagtcctgctaacactcctctgtttgaactatctgcaatttctccaatgtacataggcattactgtaaaaacacccccaacaacaactccagtaataaatctacatactaaaaaagctcctactgatttaacgaacgccataataaaaaaacatattactaatggcacgcccatcgatagaagcgttatccttcttccaattttatctgcaagccagccaaaaggaaatgtaccaaaaactgcgcccaggagaaaaatagcttttacccacgactcttcacttgccgattttgttatggaagcgtcagctagttttgatatttctggtgatgcccatgagattgctgtaccagctgagaagctaactaggttacttgaacgctcccttatgcgactttgtagacgagtggcactcccccaaaaaacgcttatttctcgagatactgaccacggtgtggtgaatggctaattttggtcatactttatgtttttgatggtgcagctactgttgtaattatggcattcattttatacaataatagtttgtaatgaagtaaaattaattttaattttgactagcta

SEQ ID NO: 4727 - DNA, 1544 bp, Diabrotica virgifera
  SmartBlast Evalue=2E-80; Info="Sugar transporter, putative n=1 Tax=Pediculus humanus corporis RepID=E0W0A9_PEDHC"
aaacaatcataatttattataattaaacataaaaaagacaaataatacaaaattttaaatgaaggtacaatgttttatttattgagctcctgttgtatttcctcgagagttttacctttagtttcaataacaaaaaattttgtaaagggtattgaggctgcacagcaaacagtaaatatcaaaaaacaaactcctaagccaatagcatctttaattggatcgaaaaaatatacgattaagaagccaagcagccaacaaaaggaggctgtaagtgatgaagcaatggattttacattagctgggtagagttcgcccattatagtccaaggaagagaacccatacccagattgtaagtaaggatataaacaagaaggcaaagaattggtaagaaagaaatactctttacatatacatctgttttttcatctaagtagctgtatatgcctagtagtaattcagatattaccatgccaattccagatgctaaaagcaatatttttctacctaatctatcaattaacgacattgacataaagctagaaagaagctgaaatattccgactaaaattgaacaaacatcagatgatattggagtcttcgcagcctcaaatattggcgcagtattagataatacagcattaattccagaaaattgttgaaagaaaataagtccagatgcgataatgaatgctttgacattaccactggatctaaatatatccataattccacctttaccttcctccttcagtgctttttctataaacgttacttcactgtcgatatctgcagtggctccacgtaattttttaagaatcactttagcttcagatatattttgtttgccaattaaatatcgaggactttctactgaaaaaataaagaataatatcaaaaagaaagcaggaaaaagggcaagaataatattaaagacgagaatagtagtataaggccctactgcatatgagaatagaattcccaaacatataaatatatttaatagtcctgctaacactcctctgtttgaactatctgcaatttctccaatgtacataggcattactgtaaaaacacccccaacaacaactccagtaataaatctacatactaaaaaagctcctactgatttaacgaacgccataataaaaaaacatattactaatggcacgcccatcgatagaagcgttatccttcttccaattttatctgcaagccagccaaaaggaaatgtaccaaaaactgcgcccaggagaaaaatagcttttacccacgactcttcacttgccgattttgttatggaagcgtcagctagttttgatatttctggtgatgcccatgagattgctgtaccagctgagaagctaactaggttaccagctactgttgtaattatggcattcattttatacaataatagtttgtaatgaagtaaaattaattttaattttgactagctatgggatgttaagagagtgtctctctctaattgttttgaagtattatggaatggaagtatctgttctataatcttatcaaatctacc

SEQ ID NO: 4728 - DNA, 1565 bp, Diabrotica virgifera
  SmartBlast Evalue=1E-145; Info=Cytochrome P450 9Z4 n=1 Tax= Tribolium castaneum RepID=D6WWU4_TRICA
aatagtaccagcaaagttatcttgtgtcatttttgtaatttggcagagcagtaataatgttttggattctggtggcagtgttgctggtaacactgttttactacttctgctataaaccttcgatatattggagggaacgtggggtgaaacaaactgattttcctaatgttttgatagacaattattttggtatattcacacaacgcccgctggtgcagttcatatctgacctttataatagatttccaggtacaaggtacaatggtctataccagtttaacaggcctgctctaattgtcacagacgtggatttgattaaacagatgcttattaaagattttgaacattttaacgaacatcgtgattttgctagcgaagaagttgatccattgtggtcaaaaaatctgttttccctaaaaggcaacaaatggagaaatatgcgatctacccttagtccatcctttaccagcagtaaaatgaaaggaatgctctacctaataacaaatgtagcggataagttcaccaagcactttctcaaccaggacaaagacctcatcgaggttgaaatgaaagagctggctagtcgatatggaacagatgtgatagcatcgacagcttttggactcgaagtcgattctttggcaaatcccaataacgaattctttttaaaaggaaaagagtttttggatttgaggaacataaaagtgatggcaagatttatagtagcaatgtttttaccaaaaatagcgaagttgtttaatatcaaatttcttgtgccgtccattgaaaagttctttacaaaaataataaaagatactattaaactgagagaagaaaaagggctagtgagaccagatatgattcaccttttattggaagctagaaagggaaatatacattctgaagatcagaatattgttgatgcaggatatgcgatagtggaggaacatctgaaagctgataagactgccgaaataactgatgatgacattatcgctcaagcttttgtttttttctttgccggttttgattcaagttctactcttataagcttcttagcatacgaactttgtgccaatcaggacattcaagaaaaactcagagatgaagttaaagacacattggacagctgtaacggaaaactcacctatgaagcacttgtgaacatgaagtatatggatatggttgttacagaaaccttacgaaaatggccagttcagccagcaattgaaagagtatgcactaaaccgtataccatagaacccactttacctgatgaaacaccagttcattttaaaataggatcctcaatgataatcccaacttacggaatacaccataacccggattactttgcagatccagatatcttcaatcctgaaagatttagcgatgaaaataaatcagatattaaaccatacgcctttcaaccatttggagtaggtccaaggaactgcatcggttccagatttgcaattttagaaacgaaagttctgttcttctatattttgaagcactttagtattgtccctacagagaagaccgtaatacctgttaagatggtc

SEQ ID NO: 4729 - DNA, 1562 bp, Diabrotica virgifera
  SmartBlast Evalue=1E-145; Info=Cytochrome P450 9Z4 n=1 Tax= Tribolium castaneum RepID=D6WWU4_TRICA
gtaccagcaaagttatcttgtgtcatttttgtaattttggcagagcagtaataatgttttggattctggtggcagtgttgctggcaacactgttttactacttctgctataaaccttcgatgtattggagggaacatggagtgaaacaaactgattttcctaatgttttgatagacaattattttggtatattcacacaacgcccactggtccagttcatatctgacctttataatagatttccgggtacaaggtacaatggtctataccagtttaacaggccagctctaattgtcacagacgtggatttgattaagcagatgcttattaaagattttgagcattttaatgaacatcgtgattttgctagcgaagaagttgatccattgtggtcaaaaaatctcttttctttaaaaggcaacaaatggagaagtatgcgatctacccttagcccttcgtttactagcagtaaaatgaaaggaatgctctacctaataacaaatgtagccgataagttcacccaacacttcctcaaccaggacaaagacctcatcgagatcgaaatgaaagaactggctagtcgatatggaacagatgtgatagcatcgacagcttttggactcgaagtcgattctttggcaaatcccaataacgaattctttttaaaaggaaaagagtttttggatttgaggaacataaaagtgatggcaagatttatagtagcaatgtttttaccaaaaatagcgaagttgtttaatatcaaatttcttgtgccgtccattgaaaagttctttacaaaaataataaaagatactattaaactgagagaagaaaaagggctagtgagaccagatatgattcaccttttattggaagctagaaagggaaatatacattctgaagatcagaatattgttgatgcaggatatgcgatagtggaggaacatctgaaagctgataagactgccgaaataactgatgatgacattatcgctcaagcttttgtttttttctttgccggttttgattcaagttctactcttataagcttcttagcatacgaactttgtgccaatcaggacattcaagaaaaactcagagatgaagttaaagacacattggacagctgtaacggaaaactcacctatgaagcacttgtgaacatgaagtatatggatatggttgttacagaaaccttacgaaaatggccagttcagccagcaattgaaagagtatgcactaaaccgtataccatagaacccactttacctgatgaaacaccagttcattttaaaataggatcctcaatgataatcccaacttacggaatacaccataacccggattactttgcagatccagatatcttcaatcctgaaagatttagcgatgaaaataaatcagatattaaaccatacgcctttcaaccatttggagtaggtccaaggaactgcatcggttccagatttgcaattttagaaacgaaagttctgttcttctatattttgaagcactttagtattgtccctacagagaagaccgtaatacctgttaagatggtc

SEQ ID NO: 4730 - DNA, 1668 bp, Diabrotica virgifera
  SmartBlast Evalue=1E-109; Info="Tetraspanin-14, putative n=1 Tax=Pediculus humanus corporis RepID=E0VTN4_PEDHC"
gtcaccgtcaatatccatcagttcagcttgtcagttcccaaaaattattattaagaccgttataaactaaaataaatactaattatatcagtgaataagttataaaatgtggtgaaccttaaatcaaatccaacagagtcctatgtgaactaaagaattaactccattcaaaatcatttacatatgctgtgctgctgcagttcccattgtgcaagagcacaatagataatactatcaattttataaagaatccaaaaacttagggaattatggctactgcctatagaagagattattatagacgtcaacctactagtaattttacatatgtgagtccctgtgtgaaatacctcattttcatactcaacttcatattctggctatttggaggtctactgattggtatcggcctctacgctttcgttgacaaatggcagttgacaggctgggtacgactagaaaatgtctatgatgtgattttaaatatatcgttagtgatggtcattatgggaggagtcgtttttatcgttagcttcgccggttgtgtaggagcgctcagagaaaatacatgcttgctcaaattttactcactctgtctattaatattcttcctattggaaatgggaatagccatcgttggattcgtcttcccccattctatgcagtcagttttggaagaaaatttcaccgacaagatcattcatacttatcgagatgatccggatctacagaatttcgtagattttgctcaacaagagttccgatgttgcggactcagctcagaaggatatatggactggtcaaagaatgagtactttaactgcagctcgcccagtgttgaacactgcggtgtgccattttcttgctgcataaatgcgactgatcttagctcaagactggttaatataatgtgtggatatggagtacaaaccttgtcggttgctgaagctggaaagaaggtctggacttccggctgtatagagatcgtcagatcttgggccgaaaggaacttgtacacgatcgctggaatcgccctaggtgtagccttatcacaattgttcgttatctatctggccaaaactctagaaggccaaattgacctgcagaaatccagtcattaccgagtacaatattatgaattcgagagattcaactagaaataagaagcctacaacgcccaataaaaacaaaaaatatggtccatgaagattcctcataaaaaacatataactgaatatccttatccaactaaacctactaaagagaagaaggaaaaactactttggcatgacttggcaacaacgtctctgagagctgttttacacatagttcactttacgggattgttattaagataatatacattaaataaagattttaaaacagtggccgatagtcaacgtaaagtttgagataaacaaatcaaactttaaatgtgaaagtgaaagattacaaaaatttgagtccggacggcacctgtaaacgacaatcagccatgtgtaaaaccgctcttatgagagctaacttcactccattgaaatttgtgactttgactttgacatatttttaaatatttgatttttgttttgtttaattaataaggttttatttaatttatcttatcaaattgttattgctctaatctatattttaaagacttctatgtat

SEQ ID NO: 4731 - DNA, 1441 bp, Diabrotica virgifera
  SmartBlast Evalue=1E-109; Info="Tetraspanin-14, putative n=1 Tax=Pediculus humanus corporis RepID=E0VTN4_PEDHC"
gtcaccgtcaatatccatcagttcagcttgtcagttcccaaaaattattattaagaccgttataaactaaaataaatactaattatatcagtgaataagttataaaatgtggtgaaccttaaatcaaatccaacagagtcctatgtgaactaaagaattaactccattcaaaatcatttacatatgctgtgctgctgcagttcccattgtgcaagagcacaatagataatactatcaattttataaagaatccaaaaacttagggaattatggctactgcctatagaagagattattatagacgtcaacctactagtaattttacatatgtgagtccctgtgtgaaatacctcattttcatactcaacttcatattctggctatttggaggtctactgattggtatcggcctctacgctttcgttgacaaatggcagttgacaggctgggtacgactagaaaatgtctatgatgtgattttaaatatatcgttagtgatggtcattatgggaggagtcgtttttatcgttagcttcgccggttgtgtaggagcgctcagagaaaatacatgcttgctcaaattttactcactctgtctattaatattcttcctattggaaatgggaatagccatcgttggattcgtcttcccccattctatgcagtcagttttggaagaaaatttcaccgacaagatcattcatacttatcgagatgatccggatctacagaatttcgtagattttgctcaacaagagttccgatgttgcggactcagctcagaaggatatatggactggtcaaagaatgagtactttaactgcagctcgcccagtgttgaacactgcggtgtgccattttcttgctgcataaatgcgactgatcttagctcaagactggttaatataatgtgtggatatggagtacaaaccttgtcggttgctgaagctggaaagaaggtctggacttccggctgtatagagatcgtcagatcttgggccgaaaggaacttgtacacgatcgctggaatcgccctaggtgtagccttatcacaattgttcgttatctatctggccaaaactctagaaggccaaattgacctgcagaaatccagtcattaccgagtacaatattatgaattcgagagattcaactagaactaagcctacaacgtccaataaaaacaaaataatatggtccatgaagattcctcacaaaaaaatcctaactgaatatcttgttccgactaaacctacaaaagagaagaagcaaaaacgacttggcaacaacgtcgcttagagctgttttacacatactgagttcactttacggaattgtgattgtgattaataatatacatattattaaataaagattttaaaacagtgcccaatagtcaacgtaaagtttgagataaacaaatcaaactttaataagaaag

SEQ ID NO: 4732 - DNA, 2413 bp, Diabrotica virgifera
  SmartBlast Evalue=0; Info=Vacuolar proton pump subunit C n=1 Tax=Harpegnathos saltator RepID=E2BTC0_9HYME
aacaattggaatagtttttattttctaacaattacattgaacaaataaccacttaaaattatttctgaaataaattcaaaaaaagtagtcaactaattgaactatattacaatatggaatcatcttttataaatagattcaaaaggcaaaatattttattggtttgtagtatatatacaatatttatttacaataaatcaatactggtttacattaaagagtggcccataataaaacacgtcaaatatattgtcactgatgaagcatcatactacatctaaaatattttgttggggcaatcctataatacccagtcatttcacacaattttataataaatttctattctttttcgataagtagttatattattagaacaagtacaattgaaattatgacatcgttttgtattaaattcagagtaaattatttatctacaatcataacggataaggtattttaatggtgtcggtaatattcaacaaatattctgtaggagtaaatatatattgtatcacaacctcaagtctctgacgcaaatattttatgacaaattatatgtaatctatttccagcttttcgtcaattttacgaaacatatgtacatctataacatagatggtttgttgaaatttcatgtttagatatcaatacatcttaacacgtcacttgtcagctcatctacgcgtcataatatctatcatttttttaatttttcgaatgcagtttctaataatatggtctcttttgtattatcaacaagaaataatattaataacgatttatatgttcaatcggagtattacatgatacattaaagcaattatatcatcgttaaacgaattttaaatgcattttaaaataaaaaaaagttctacattttttgttgcgcatttttaattaatttacatacaatgacggggtactaaatggacattgagtaaggacaaaacttaaaaataccgacattaaaacagcccctcgaaagagtgagtaatcaaaaatatactatttgtatctgtagtacgtttttttaaaattgtttggaacctattaataacaaactcttggattgatgcgtgagtttagatcttcgattctaacatgtcgacgttcagcttgtagtaaacgtatgggtaatactctgattggccgaatccgaggcctggaatgtcaacgctatcaacgttaggtcctgaaagggcagcactactatcgaggtggccgtaaagttggttcaagacatctcttaaacgttttaattgtttcttattggggtggattaaaatagcttggaaattgacggggaggccatatcttaaaacagattcaacaaataccctcaacgctttaacgtgaatccaggcgcagaaacactcgctgaagttgactttaagccatctaactaatggaccaaattgcttctttttatcggtgacgagtttggttatctcgttctttccagctgccagttcctcttcgttatatatgaaatcacgaacgatgaacttcttttctctagcgtgtaacttgaattcttcgacgacctttttgaatagggatacagtatatagaccgtattcgttatcctgtttaatcagttgtgaagaacgagggactatcatgtcggtaatcttttcgtatgtcgcattccattcgttgaattgggcttttggaacaataaccaacaatgtctgcaaatattcagaatccaaaataaaatgttcctttttcaccaaatctgccaagtttcttgttagtaaacttcctgtctgtttcttctccaaattctgaagacttcctttcaagttattgtacgcagacgatttggtcttcagatcagcgtcaatttggccaacttgtttgctgattatatcggcgatgttacggagcgattgcttgatgggatatttggcgatgtcccaagtaaatcgggttaaataagtgggcaaatcgctgttattggcctgcaggttttctgaccacttgtccctctgttcttcaagtacttctccaaggtactgagctaccttcctggtaacctgctccacgaacccatcaagcttgcccagatcatcagaaagtcctactaactgatccagagtaccaactttcaagtccgggatttgaaacttgtagttggttgacaaattattctgtttacttgtcatattattcatcgtgtcccatgtctgttgacaggtcttatcccctggggcagatatcaaccaatactcagtcatttcttcttggtgatcagaaagtatgctggttctatgtgaattaagtctatggtggcttccaagatcttctttatcactccttcaaataatggaataactccaaaaaacacccctttcaaccactccccaatgaacagagtcagcccagctgatcgttattgaagtttcac

SEQ ID NO: 4733 - DNA, 693 bp, Diabrotica virgifera
  SmartBlast Evalue=5E-16; Info=Vacuolar ATP synthase subunit C n= 1 Tax=Culex quinquefasciatus RepID=B0W3Q1_CULQU
aacaattggaatagtttttattttctaacaattacattgaacaaataaccacttaaaattatttctgaaataaattcaaaaaaagtagtcaactaattgaactatattacaatatggaatcatcttttataaatagattcaaaaggcaaaatattttattggtttgtagtatatatacaatatttatttacaataaatcaatactggtttacattaaagagtggcccataataaaacacgtcaaatatattgtcactgatgaagcatcatactacatctaaaatattttgttggggcaatcctataatacccagtcatttcacacaattttataataaatttctattctttttcgataagtagttatattattagaacaagtacaattgaaattatgacatcgttttgtattaaattcagagtaaattatttatctacaatcataacggataaggtattttaatggtgtcggtaatattcaacaaatattctgtaggagtaaatatatattgtatcacaacctcaagtctctgacgcaaatattttatgacaaattatttgttgaatctgttttaagatatggcctccccgtcaatttccaagctattttaatccaccccaataagaaacaattaaaacgtttaagagatgtcttgaaccaactttacggccacctcgatagtagtgctgccc

SEQ ID NO: 4734 - DNA, 1600 bp, Diabrotica virgifera
  SmartBlast Evalue=1E-162; Info=Muscle-specific protein 300 n=1 Tax=Tribolium castaneum RepID=D6X2J9_TRICA
gtttacgttcaatttctggttgttttgtaacctctggttctaaaatttgaggaatattttcaaggggtgctttaatttcactttttacttccatctgaacaggtggttctacatgttttgactcagggagaagtacagttaagtttctctccaaatgcatagattcggcatcgtgtttttcgtaggcgggcgaagctgatcggcgttcttgcgatttagagcgtccggcggctatatctgcgtacgatactccgagaagggagtactcggggtggggttgtgtggagtaagggtccacttgttggattttggtgacgagcgtggagatctcctgccggttggattcgatccgcgcctgttggtcgcggagcgcttggtctctgtcatggggaagataatttggcgccattgtggttctgagctgttgttcaacttggacgatctgttgacggagctgttggacttcttgttggtagttgtctacttgggcaatggcggtttctagttctgtgctttgagtttttatggcctgggcaagctggtcgagttcgatgagtaagtcttcggccgattcggtgaccttggagtcactctctataccggaacggaaatggacctgtaatttttctactgacagcgatattttggttttctgaatatggatgtcggctaacattttttctctgataccgtgttggtccctaagtggtttcttcttgttttgtggcgagtctaaagctgtcttagtcttttctatccagctcttaacatcctttatctttttctcgcattgttcccattcttcggatgtttcttgaagtaatccgttcctctttagaatcattgcttcaacttcgttcttagcttcttcggcttcttccatcttctgcggaaggtcgcccacactggtaacatttccaatattttctaattctttggccatatcactcaaatttttggtagcacctttgcagctcttcacggcattcgaatattcatgtaatttttgtttagcttcagtcaaagtactcagacgaagtggatctttgaggaagaccttcttctcagccacccactgcatcacagcctggtataacatcaagaacctctgccaagcatccaaagtttccccaacttgttgttttctttcatccaacaacgatttaatgtgcgacaattgttcagtcaaattattaattgtcgactgggtgatttctttttcttcgtcgtctttggtcttttggataataatccttccgtttctggtcaatttgtcaagcctgtcgttgatgcttgcgaattcagactgaatttgttggagatgttggtgtaagacttgaggttcgatggatctgtcttgaatttggagctctgcgtccttgatccaggattgtacttcatcaacgtcgttactgaaatcagttctgatggttttagctttcttgaattctctgtctttttcttccatggcgttagaaatagattctgctagtagctctaattggttcagttcttgtgctacgtcagatggaacaagattttgtagagcagtatattttttaataataccgctggagaagtctttagtcttttcaatctc

SEQ ID NO: 4735 - DNA, 1494 bp, Diabrotica virgifera
  SmartBlast Evalue=1E-147; Info=Muscle-specific protein 300 n=1 Tax=Tribolium castaneum RepID=D6X2J9_TRICA
acaatgcaagaaatcagtaacgcgcacacaataacaataatatatacacgcgtaagagttggtggccatgtcgcgcatcaagataaggtcttaagtttcaaggtcttgtcgggaggtttgggaggtaaggatttagtgctaagtaccaagtggttcttggtcgggcgtgcccctttgcgctatggttttcattcgctcgttccgagcgcttaattttcgttgcaaagtacgagctcgctctgtatggacctgttggtcgcggagcgcttggtctctgtcatggggaagataatttggcgccattgtggttctgagctgttgttcaacttggacgatctgttgacggagctgttggacttcttgttggtagttgtctacttgggcaatggcggtttctagttctgtgctttgagtttttatggcctgggcaagctggtcgagttcgatgagtaagtcttcggccgattcggtgaccttggagtcactctctataccggaacggaaatggacctgtaatttttctactgacagcgatattttggttttctgaatatggatgtcggctaacattttttctctgataccgtgttggtccctaagtggtttcttcttgttttgtggcgagtctaaagctgtcttagtcttttctatccagctcttaacatcctttatctttttctcgcattgttcccattcttcggatgtttcttgaagtaatccgttcctctttagaatcattgcttcaacttcgttcttagcttcttcggcttcttccatcttctgcggaaggtcgcccacactggtaacatttccaatattttctaattctttggccatatcactcaaatttttggtagcacctttgcagctcttcacggcattcgaatattcatgtaatttttgtttagcttcagtcaaagtactcagacgaagtggatctttgaggaagaccttcttctcagccacccactgcatcacagcctggtataacatcaagaacctctgccaagcatccaaagtttccccaacttgttgttttctttcatccaacaacgatttaatgtgcgacaattgttcagtcaaattattaattgtcgactgggtgatttctttttcttcgtcgtctttggtcttttggataataatccttccgtttctggtcaatttgtcaagcctgtcgttgatgcttgcgaattcagactgaatttgttggagatgttggtgtaagacttgaggttcgatggatctgtcttgaatttggagctctgcgtccttgatccaggattgtacttcatcaacgtcgttactgaaatcagttctgatggttttagctttcttgaattctctgtctttttcttccatggcgttagaaatagattctgctagtagctctaattggttcagttcttgtgctacgtcagatggaacaagattttgtagagcagtatattttttaataataccgctggagaagtctttagtcttttcaatctc

SEQ ID NO: 4736 - DNA, 1562 bp, Diabrotica virgifera
  SmartBlast Evalue=1E-75; Info=Heterogeneous nuclear ribonucleoprotein n=1 Tax=Culex quinquefasciatus RepID=B0W368_ CULQU
ttttgcgtcttttcctggttttctgtctactctaccaccagccattaagaaattattgaattttagtgttattttatttaaagttaagtaataataattagtattattacattatctctattttaaattacgccttgagctggtggtgtgtaaaggttcaaaatgaagggggatgatagtaaaaaccaagaacctgagcaattcaggaaactatttattggtggacttgatttccgcactactgacgaatctctaaaggaacattttgaaaaatggggtacaattgtggacgttgtggtaatgaaggatcctacaaccaaaagatcaagaggatttggctttattacgtattcaaaggcccaaatggtggatgatgctcaaaatgccaggcctcacagagttgacggtagagtagttgaacctaagagagctataccaagacaagatattggtagacctgacgctggagcaacggtaaaaaaattgtttgtcggtggaatgaaagatgatattgaagaagaagacctaaaagagtatttcacgaagtttggtaacattatgtccgtcagtgttgtttgcgacaaagattctggaaaaaagaggggatttggatttgttgaatttgaagattatgattctgttgataaagttatcttacaaagaagccacacaatcaaaggtaggaatgtcgatgttaaaaaggccttgagcaaatcagagatggatcgttctggaaatagaggaggaggttcaatgggtggtggcagaggtggaaacttcaaccaagacaacttgcgtcatataataggtggcggaggtggaaactggaaccgtggaggtggagattggaatcaaggcggagcaggaggttatggaggaggtggcggtggtggaccctggtctcaaggaccatgggataatagccaaggtgggcaagatggtggccaaggagtatccggaggatggaatcaaggtggatacaacaatcaaggagcagcaggaccatggggacaaggaggacaagacaactttggtaacaactatcagcagagttatggaggtggggctatgagaaacaattttcagcaaccaagacccggaccatacaataatacaggaggtggctatggtggtggtggtttcaatgccggcaaccaaggcggtccaggaggcaacaggagatattaagacgtaagtgcaccgatacactgcagaagttgtttcatgctaaaagtatatcgatgcagtgcaagtgtacctcatatcgcataagcaaaaattcatccactcattttataaatccacaaattactagggaatttagagtttcgtcagtcagtgttaggaaatcttaaaaagtgacagcatagactttcgtttagtgttttcggttaatttttaaggaactttttgataatgcagatttaattttagaatgtcgtataacttacttaaggtagtagttttgtattgtgtgacctattaaattttgactctacctctatcgagataggtacgtaggttaactgttgtattgtattttcagattaaagatatgtagt

SEQ ID NO: 4737 - DNA, 1541 bp, Diabrotica virgifera
  SmartBlast Evalue=2E-76; Info=Heterogeneous nuclear ribonucleoprotein n=1 Tax=Culex quinquefasciatus RepID=B0W368_ CULQU
ttttgcgtcttttcctggttttctgtctactctaccaccagccattaagaaattattgaattttagtgttattttatttaaagttaagtaataataattagtattattacattatctctattttaaattacgccttgagctggtggtgtgtaaaggttcaaaatgaagggggatgatagtaaaaaccaagaacctgagcaattcaggaaactatttattggtggacttgatttccgcactactgacgaatctctaaaggaacattttgaaaaatggggtacaattgtggacgttgtggtaatgaaggatcctacaaccaaaagatcaagaggatttggctttattacgtattcaaaggcccaaatggtggatgatgctcaaaatgccaggcctcacagagttgacggtagagtagttgaacctaagagagctataccaagacaagatattggtagacctgacgctggagcaacggtaaaaaaattgtttgtcggtggaatgaaagatgatattgaagaagaagacctaaaagagtatttcacgaagtttggtaacattatgtccgtcagtgttgtttgcgacaaagattctggaaaaaagaggggatttggatttgttgaatttgaagattatgattctgttgataaagttatcttacaaagaagccacacaatcaaaggtaggaatgtcgatgttaaaaaggccttgagcaaatcagagatggatcgttctggaaatagaggaggaggttcaatgggtggtggcagaggtggaaacttcaaccaaggtggcggaggtggaaactggaaccgtggaggtggagattggaatcaaggcggagcaggaggttatggaggaggtggcggtggtggaccctggtctcaaggaccatgggataatagccaaggtgggcaagatggtggccaaggagtatccggaggatggaatcaaggtggatacaacaatcaaggagcagcaggaccatggggacaaggaggacaagacaactttggtaacaactatcagcagagttatggaggtggggctatgagaaacaattttcagcaaccaagacccggaccatacaataatacaggaggtggctatggtggtggtggtttcaatgccggcaaccaaggcggtccaggaggcaacaggagatattaagacgtaagtgcaccgatacactgcagaagttgtttcatgctaaaagtatatcgatgcagtgcaagtgtacctcatatcgcataagcaaaaattcatccactcattttataaatccacaaattactagggaatttagagtttcgtcagtcagtgttaggaaatcttaaaaagtgacagcatagactttcgtttagtgttttcggttaatttttaaggaactttttgataatgcagatttaattttagaatgtcgtataacttacttaaggtagtagttttgtattgtgtgacctattaaattttgactctacctctatcgagataggtacgtaggttaactgttgtattgtattttcagattaaagatatgtagt

SEQ ID NO: 4738 - DNA, 1627 bp, Diabrotica virgifera
  SmartBlast Evalue=1E-114; Info=Transmembrane protein 135 n=1 Tax=Camponotus floridanus RepID=E1ZX13_9HYME
atcaaatatgtcgtaattatactaattgtactatcttgtaattaaaacaatacgatcggtactgttttcgttactctaaggacggtgttgagggaatctgacgagttgagtccccagacatctaaaggtgctcttgccatacaagcaattctgcctcccgatatggaatgtaaaaatttccaataactaggtctaagatttgtaggttccaatatggcggcgtggaagagtacagccgtactgaagcaatacagaaactctgtaaatccaggtactttcggtaatatgcctttgtcaattcccaaattatatgtaatctgcgccactttccataaaacatataaggaaactgtcgagtctggataccgactgaacgccattccagccaaaataccagcaggaagagcatgaacaggactgtctccacctcttactctacgtaaaatgcagaggcacgccctaaagacaccattatacaaccctaggaacattgctaaattaaaagtttctttcctaaataatatacttttgatattttgtggagattgtaatacccgtttcaagtttaacaccagtttcaaggtgacttgtagacctaagcctaacgaaaacatccttccagctccctcaatggtataatataaacaactaaacggatgtttacaggaaggatgtctactacaactctttagtttattaattatcctactgtacaccctcaacatctgacacacgatccgatatactccgtttttccgcctggtcgtctgccagcttcgagaagatcccgctcccgaggatgtactcggttcgtcatctttgtgtacctccctgtagaaggtattggactgactaggactgcgcatgtagcctttttcctcgtaaggaccaatcacaaatctcattactctaaacatagcgtcatcgtggctatcggggcaatccgagcttttgtggtaacctcccttaaagtacatggatagaatggccatgctgatgctgtatatggcgacgtctccgtaccggatgctgctgatcatgttccgggacttcgccatgttccataatgtttcggtagctacattgctgacgtacaaggctaacaaaatccgccggctcggtcgttctatgagaatggagaagacactggagagaaacactggtattgcggagacggtgaggatattgtagttgccgaatgtctttcttaacaaacacaagaatagagaatatccaaatcctgtgccactgaggaaggctgtggactgtatgatgccgaaaaaagtcttctttagatcgtccttcgttggtattcgtcctttcattaacagcgtcaacatgtaaacagtgccatagatcctcaaagaatcgtaaatgcagtaaaggtaaagtccacaagtagcttgagcacagctatctgtccagggatggacatattccatacaagtagcagcaatggggctagtaattgggattattttgctaaaagtttgggacattttccaaaacaattcacaacactatttatataaatttgatcataatggtaaagactataagtatcgtagaggtttttggagaagaactttgtaccgttttgtctccgcaaaccttctgtacaacctca

SEQ ID NO: 4739 - DNA, 1461 bp, Diabrotica virgifera
  SmartBlast Evalue=1E-100; Info=Transmembrane protein 135 n=1 Tax=Harpegnathos saltator RepID=E2B9A3_9HYME
atcaaatatgtcgtaattatactaattgtactatcttgtaattaaaacaatacgatcggtactgttttcgttactctaaggacggtgttgagggaatctgacgagttgagtccccagacatctaaaggtgctcttgccatacaagcaattctgcctcccgatatggaatgtaaaaatttccaataactaggtctaagatttgtaggttccaatatggcggcgtggaagagtacagccgtactgaagcaatacagaaactctgtaaatccaggtactttcggtaatatgcctttgtcaattcccaaattatatgtaatctgcgccactttccataaaacatataaggaaactgtcgagtctggataccgactgaacgccattccagccaaaataccagcaggaagagcatgaacaggactgtctccacctcttactctacgtaaaatgcagaggcacgccctaaagacaccattatacaaccctaggaacattgctaaattaaaagtttctttcctaaataatatacttttgatattttgtggagattgtaatacccgtttcaagtttaacaccagtttcaaggtgacttgtagacctaagcctaacgaaaacatccttccagctccctcaatggtataatataaacaactaaacggatgtttacaggaaggatgtctactacaactctttagtttattaattatcctactgtacaccctcaacatctgacacacgatccgatatactccgtttttccgcctggtcgtctgccagcttcgagaagatcccgctcccgaggatgtactcggttcgtcatctttgtgtacctccctgtagaaggtattggactgactaggactgcgcatgtagcctttttcctcgtaaggaccaatcacaaatctcattactctaaacatagcgtcatcgtggctatcggggcaatccgagcttttgtggtaacctcccttaaagtacatggatagaatggccatgctgatgctgtatatggcgacgtctccgtaccggatgctgctgatcatgttccgggacttcgccatgttccataatgtttcggtagctacattgctgacgtacaaggctaacaaaatccgccggctcggtcgttctatgagaatggagaagacactggagagaaacactggtattgcggagacggtgaggatattgtagttgccgaatgtctttcttaacaaacacaagaatagagaatatccaaatcctgtgccactgaggaaggctgtggactgtatgatgccgaaaaaagtcttctttagatcgtccttcgttggtattcgtcctttcattaacagcgtcaaatcattccaattaatgaatgggtacactggtacacatgtacttagttctgaaaacacgaatagttgttgaagcctaacatttttgtgcacttagaaacgataggtagatttaaacatctatcat

SEQ ID NO: 4740 - DNA, 1583 bp, Diabrotica virgifera
  SmartBlast Evalue=1E-146; Info=Cystathionine beta-lyase n=1 Tax= Culex quinquefasciatus RepID=B0W7Q2_CULQU
ccgataataattttgtattgtagtatgatatttgcgtagtatttgtattttcattttgtattgttgccaaatttatttatcgttttggagaggttcatttcatttcaggctagggttagagtctagaggcagttttagtttttttaggttaagcgtacagacggcggtttacatacaacttacgtcaagattttatcaaaattaatttttaattgcctgtaatcaattgtgttttgttttgttcagtggttaattcattcagttttgtccagttctgtcgtctgttatttgttctaaaagattgtaggtaaatatggcgttaacaaatggcaaggttgttggtgcagatggagataatgatggatacttgccctttcccaaaggttttgccacggccgccattcatcactctcaagaacccgaacagtgggattctatggctgttgtaacaccgttagtaacgtctactacttttaaacaacatggtccagctcaatttaagaaatacgaatatggccgatctggaaatccaactagagaagttctggaaaatgtgctagccaagttagacaatgtttcatacggtttagctttttcttctggtcttggcgctctcacggctattgctggactgtttaaaagcggagataatgttattattggggatgatatttacggaggaactttccgcttctttagcaaagttctcactaactacaatattgagattactattgtggatatggttgatataaaaaatctcgagaatgccattaaaccaaatacaaagttaatatggtgcgaaaccccaacaaaccctacattgaaagtaatggacattagagccgctgctaaaatcgccaagaaacacaatgtaattttagctgtagataatactttcctaacgccatacctacaaagacctctcgaccttggagcggatttggcagtttattcactcactaaatatatgaatggacattcagatgtaataatgggttctattgcaacaaacaacaaagaattattcgataagctaaaatttttacaaaattcaatgggaatagtacccgcacctttcgattgttatcaagtcaatagaagccttaaaaccttagctttaaggatggcgcaacataagatcagtggtcttgcagtagctaaatatttggaagcccatcctcaggtggaaaaggtgttgcatccaggtcttcagtcacatccacagtatgagctttttaagagccaaaccagcggacacagcggagtattctctttcgttctaaaaggtggtttaactgaatcacaaaagttcctatctgcacttgaagtgcttactctgggcgaaagtttaggaggttacgaaagtttggtagagttgccgtctctcatgacacatgcttcagtaccagccgaacagagagccgtgttagggatatctgacagtttaataagaatatccgtagggctagaagatgtcgaagatttgattgccgatttagaacaagcatttaaaaagattaaataagtgaaagaattttagaaattttaaaaatgtatataaatatatttttgtaaacagt

SEQ ID NO: 4741 - DNA, 1496 bp, Diabrotica virgifera
  SmartBlast Evalue=1E-146; Info=Cystathionine beta-lyase n=1 Tax= Culex quinquefasciatus RepID=B0W7Q2_CULQU
gtattaaacgatgttttaatttaatcaaaaaaacccatcaaccacatagagtggaaaatacacatacaaatgttcaaggttgtcatttcaatctcgtacaggtatagaattggttttcgatattattctggttctgattcagaagctgcctgtacataggtatagttattgtgagtttgtaatccatatttgagtttcacttttgttctcgagattgtaggtaaatatggcgttaacaaatggcaaggttgttggtgcagatggagataatgatggatacttgccctttcccaaaggttttgccacggccgccattcatcactctcaagaacccgaacagtgggattctatggctgttgtaacaccgttagtaacgtctactacttttaaacaacatggtccagctcaatttaagaaatacgaatatggccgatctggaaatccaactagagaagttctggaaaatgtgctagccaagttagacaatgtttcatacggtttagctttttcttctggtcttggcgctctcacggctattgctggactgtttaaaagcggagataatgttattattggggatgatatttacggaggaactttccgcttctttagcaaagttctcactaactacaatattgagattactattgtggatatggttgatataaaaaatctcgagaatgccattaaaccaaatacaaagttaatatggtgcgaaaccccaacaaaccctacattgaaagtaatggacattagagccgctgctaaaatcgccaagaaacacaatgtaattttagctgtagataatactttcctaacgccatacctacaaagacctctcgaccttggagcggatttggcagtttattcactcactaaatatatgaatggacattcagatgtaataatgggttctattgcaacaaacaacaaagaattattcgataagctaaaatttttacaaaattcaatgggaatagtacccgcacctttcgattgttatcaagtcaatagaagccttaaaaccttagctttaaggatggcgcaacataagatcagtggtcttgcagtagctaaatatttggaagcccatcctcaggtggaaaaggtgttgcatccaggtcttcagtcacatccacagtatgagctttttaagagccaaaccagcggacacagcggagtattctctttcgttctaaaaggtggtttaactgaatcacaaaagttcctatctgcacttgaagtgcttactctgggcgaaagtttaggaggttacgaaagtttggtagagttgccgtctctcatgacacatgcttcagtaccagccgaacagagagccgtgttagggatatctgacagtttaataagaatatccgtagggctagaagatgtcgaagatttgattgccgatttagaacaagcatttaaaaagattaaataagtgaaagaattttagaaattttaaaaatgtatataaatatatttttgtaaacagt

SEQ ID NO: 4742 - DNA, 1552 bp, Diabrotica virgifera
ggataaagtggatataacattttaccatcctttatcgtatttgtagattgagtctttggttactcagaaatttcctcatcttcaagaaaactgctcttgattgctctattcttgatcgaatttcggatttagaccttctgtaatccagactcttaagtatttcattttgcccactggttcaatatcttcagtttttatctggatccttactgataatccaggtttttgttttctttgtttattgttaaatcaaactatttcccaatatcacaaattgggtttagtagcgtctgcaggtctttcccagtttcagcgataatgactatgcattttgcatgactatgattctttaaagacaatcgtaataaatgtccgtgtgatgtttaacagttttaattaataaaatagataactaaattatagatactattaaattgacgaaatgtaaaagtgtttgtgtaattgcgaccaaaatttgcgaccaaaaagaaatgtaggtatttagagataattgcatctaattaatattataaccggcttttcataatattcgttttaaagcgtctttttacgtcttatccccaataacacgtccgtcgtcgttctgatcttaaaatcgactaactctcgcacctacgctaaaacaaattctcttcggctaatctcccttctccgttttcccctgagcggggaccaacgttcccaacccaataaaattggttcaaagtatgtaccgcccttttccaataaactaaaactataaaaattagtcaagccggctccttgtttatctttaacgattgaaaataaacacaatcttctcactaaactacccgtcgattagatacgcccacacagctgtccctaagggtgtcgacagccgctcgtttcgtgtttctactaataattagagaaaaaatatatacaggtgtcttaaaaattaaggtaaaatatttacaaatctacattcggccatcctgctcggaatccgacccggattccatgtagttatctatccacggcttcatgtactctgcacacgttgaagtgctctgaggtccatcatggtatccagatttctttacctcgtatctgtcatttggattcacttttactaccacgtactaaatattttttctgcagtttgagtcctccaccaaactgtgttctcttgattgccattgatcttgccactctccctttctgtgttccaactcgtttcgataatccaactcattttgggggttataatcccccccccccccagagactatcaagtagttgtaactcccccttaggatcattctggttacacctctgatcccttctgtgaagttttcaagttcttgtgtaaagaactcttgtggatctgttactaaattcaaaatgtgttctaattatctgagccagaattgcgttgaaatagttcttcactcttctcaagtggtactgaactgcatttttgtctttctgtaatagcagaattggctttagtgaaatttttctttataattctgatagtacagaatagaactttcaatattaaaataga

SEQ ID NO: 4743 - DNA, 1504 bp, Diabrotica virgifera
ggataaagtggatataacattttaccatcctttatcgtatttgtagattgagtctttggttactcagaaatttcctcatcttcaagaaaactgctcttgattgctctattcttgatcgaatttcggatttagaccttctgtaatccagactcttaagtatttcattttgcccactggttcaatatcttcagtttttatctggatccttactgataatccaggtttttgttttctttgtttattgttaaatcaaactatttcccaatatcacaaattgggtttagtagcgtctgcaggtctttcccagtttcagcgataatgactatgcattttgcatgactatgattctttaaagacaatcgtaataaatgtccgtgtgatgtttaacagttttaattaataaaatagataactaaattatagatactattaaattgacgaaatgtaaaagtgtttgtgtaattgcgaccaaaatttgcgaccaaaaagaaatgtaggtatttagagataattgcatctaattaatattataaccggcttttcataatattcgttttaaagcgtctttttacgtcttatccccaataacacgtccgtcgtcgttctgatcttaaaatcgactaactctcgcacctacgctaaaacaaattctcttcggctaatctcccttctccgttttcccctgagcggggaccaacgttcccaacccaataaaattggttcaaagtatgtaccgcccttttccaataaactaaaactataaaaattagtcaagccggctccttgtttatctttaacgattgaaaataaacacaatcttctcactaaactacccgtcgattagatacgcccacacagctgtccctaagggtgtcgacagccgctcgtttcgtgtttctactaataattagagaaaaaatatatacaggtgtcttaaaaattaaggtaaaatatttacaaatctacattcggccatcctgctcggaatccgacccggattccatgtagttatctatccacggcttcatgtactctgcacacgttgaagtgctctgaggtccatcatggtatccagatttctttacctcgtatctgtcatttggattcacttttactaccacgtactaaatattttttctgcagtttgagtcctccaccaaactgtgttctcttgattgccattgatcttgccactaagggccaatttctcatatcgagttcaactccagtttaacctgaacttttagtgaacgtcagtttaaagtcaaaatcgtctttctcaattcacgttctaccgatggcagtttaaacttgaacgatggaattcggccgttcagagatttcagaacccagttcagatgatttcatggattacgcatgcgttgtattaacacgaaacactgtcataatataaatatatcatattttattatattaagcccaacgataaacgataacattatttttgatgttattacatttatttataattattaaaatgact

SEQ ID NO: 4744 - DNA, 1505 bp, Diabrotica virgifera
ctatagtcgatgcgctgatctgagacacaactgtctgcactgcaatcacaataaaaatgcactatatagaaataaacaaaccaagacatgttgaatgttcgagaagcactcttaaatcatgattttgaagtgctccttgtgcttgtttattttatttctagtgcatctttattgtgattgtaatgtagacagttgtgcctcagtttagcgaatcggctatactaaagctttgtttgataattgacaccagatatttatctaaagatttttaatgtagtggtttctcgttaccttctacatccttctgcagttgaccactttttttattcatacgcctttggagtcgatttctcaactccaggagaaaagagtgccctatcacttaccaactcatctgcccgtagccgttagtcaataattaagagattactttataccgacaatcactcggtccctatctgcattggcaatctacagatagatgttgcccatcttctaccacgtggagtttgcagatttagatctatctttcattagaattaagacctttcggcatttcctaatccgtccagagctgtagaagaaagttacaatttttccggccacgttatgaatggagatgaacatgtgttgctacaaaccattatgcagggaaaataaagggaaaacgaagtattggaagaaaacgcatggatgcatctcctggctcaacaatctgacaaagtggtatacctgcagttccattgacttgtttagagctgcaatctcaatagtgaaaatagctgtgatgattgccaacctccctagaggagacggtacctagtgaagaagaaagctatgttttattttcgacaaaatactataaagcaataacttcatagtacttctaaaaaattttactcctctttgattctaaatgtattccatttatattattatccagcttttacatccatttagtagaggaaaatataggtgatgacatataatgaagtccaagataaaaaagtagccacggcaactcttctacggaataacaaagttctatctgcctcaggtgccatttttagttatgactgtttaaagtttctatgttatgtatttattttactattgtcgccacttttatgtgttaacaatgtaaattaaaaaaattcatatatttttattaacagtaaaaggttacttcaatagttaatacaaaggagttctgatttgagaaatgaattaaacttattaagtcaagttctattttacacatactcacatacataataatatacccctgtttaacaattagtatacaataaaacaacttcaacttctttaataaagtcttattgttaacttataaacacttttagctcttgcagataggaccttgtgtacttagttgactgtttttatgtcagttagaaccttgttaacttataaacatttaaaagtctctcagatagaaccttgtaacttacgtatttcagccacctgttaatagatgtcggtgc

SEQ ID NO: 4745 - DNA, 1485 bp, Diabrotica virgifera
ctatagtcgatgcgctgatctgagacacaactgtctgcactgcaatcacaataaaaatgcactatatagaaataaacaaaccaagacatgttgaatgttcgagaagcactcttaaatcatgattttgaagtgctccttgtgcttgtttattttatttctagtgcatctttattgtgattgtaatgtagacagttgtgcctcagtttagcgaatcggctatactaaagctttgtttgataattgacaccagatatttatctaaagatttttaatgtagtggtttctcgttaccttctacatccttctgcagttgaccactttttttattcatacgcctttggagtcgatttctcaactccaggagaaaagagtgccctatcacttaccaactcatctgcccgtagccgttagtcaataattaagagattactttataccgacaatcactcggtccctatctgcattggcaatctacagatagatgttgcccatcttctaccacgtggagtttgcagatttagatctatctttcattagaattaagacctttcggcatttcctaatccgtccagagctgtagaagaaagttacaatttttccggccacgttatgaatggagatgaacatgtgttgctacaaaccattatgcagggaaaataaagggaaaacgaagtattggaagaaaacgcatggatgcatctcctggctcaacaatctgacaaagtggtatacctgcagttccattgacttgtttagagctgcaatctcaatagtgaaaatagctgtgatgattgccaacctccctagaggagacggtacctagtgaagaagaaagctatgttttattttcgacaaaatactataaagcaataacttcatagtacttctaaaaaattttactcctctttgattctaaatgtattccatttatattattatccagcttttacatccatttagtagaggaaaatataggtgatgacatataatgaagtccaagataaaaaagtagccacggcaactcttctacggaataacaaagttctatctgcctcaggtgccatttttagttatgactgtttaaagtttctatgttatgtatttattttactattgtcgccacttttatgtgttaacaatgtaaattaaaaaaattcatatatttttattaacagtaaaaggttacttcaatagttaatacaaaggagttctgatttgagaaatgaattaaacttattaagtcaagttctattttacacatacctttgtttaacaattagtatacaataaaaccacttcaacttctttaataaagtcttattgttaacttataaacacttttagctcttgcagataggaccttgtgtacttagttgactgtttttatgtcagttagaaccttgttaacttataaacatttaaaagtctctcagatagaaccttgtaacttacgtatttcagccacctgttaatagatgtcggtgc

SEQ ID NO: 4746 - DNA, 1784 bp, Diabrotica virgifera
  SmartBlast Evalue=2E-22; Info=Insulin-like growth factor- binding protein complex acid labile chain precursor (ALS). n=2 Tax=Gallus gallus RepID=UPI0000ECAB61
ctaaaaataacttatttgtctcatttacacaaacatttcatttatcacatatttgttttcaacaacagatatctataaacattgtcaatcgttaagtccaatttattcttgcaaataattattatcttcaccattttcgataatttccgaagacactaaacctgctgaagatatcgccctggttggtcctttactgttgatctcctggtacgtacggtactgcatataaaacaagaacccaatacaaacgaacactacacacatgagtacaatgatggtaacttctgcaccagtaactctaggtggtactggttgcgtagaaccgaccgcttcattgaccaccttcagagaactcttgataggtgtgtccacacacttgaaggcgcctatggcagcatcgtagagtacatatttaaagttgtcttcttcgaaatatctttccatctcatcttctaacgcacaaggcaacttattgtcctctaattttaggtaagagagcctgggaagcctatcaataagccctacgtagtcaaaatcggtaagtttgttgtaagaaagatctagagcgtgtaagctatgcagagagaatacaccagtaattgtaatttcgttaatttcattgtgggaacagttcagcaattctagttggggcaagcctgtaaaagttcctgtctgcatggatgtaattctgttgttgaacaagtttagatgacgcaaattatacagatctgcccacgtttttgtattaatgttcacaacttgattgttactcaaatctagattttctaaattgtgtaatcccttgaggaacttagcttgaattttatcgatcaaattgttctgcaaataaagattctttaaaaggttagttggttgtagttcaatcacagggcttctaaggttattgtgtgctaaattcaactctaatagtccagttaggttaaggaactcgtcaccacccaacgtttgtatgtggttgccttctaagttcagaatactcaaagctgtcatattggtaaaaacacctttaacatccgatatttgattatttttaagattcaggatcttaatattagtaagtccattaaatgctttcccagcgatagtttttatgttattagcttccatgttcaactcttcaagattaactagttccagaaacccatcatctgacagtatatcgagctgattgtgagatagatcaatcgtttttattttcttaactccagtaaaggttcctggataaatagatctgacactgttgtagctgataatgagacgttctaagaatatcaatccaacaaagccctttggattgatcttttctattttgctattatttagccagaggttcttgatctggtttccggatatatcgaaagttccagaatctataacagttaaggtacagtgttcacatttgacagtttcatccagctgatcaaacctgtacggagtacttctaaaataggctggataggcgttgacacacgtcgatgtgagagatcctctttctccataagaacatttggataagtcacctggtccgacagaggtctgtactgttcgttccactagcatcagtattagtagcatccatatttctttcctcatcgtggctctcatcctgcccaattggtacgctttaacaacaaaattttcactcttctggtggagcaaaaacaataaatactggagctggcttatcagaagcggaagaacgcacaatgttttgataagacggacactgatggtttgaaattttcgaagagtttataaatacg

SEQ ID NO: 4747 - DNA, 1248 bp, Diabrotica virgifera
  SmartBlast Evalue=6E-16; Info=Insulin-like growth factor- binding protein complex acid labile chain precursor (ALS). n=2 Tax=Gallus gallus RepID=UPI0000ECAB61
tatagtccaagtcatctatattgttattggacacatctaggctcatgaggctcggtaaagaaaatcttcctgtaacttttagagtgtgtatattgttccgagatatgttgagtactcgcaaatgaggcaagccagagaaagtaccagtattgattgtagttaatgagttatcatttaaatttaaaactctcaacctgaacaaaccgtgaaacaattttactgttaaattgccaaagttgttgttgctcaagtccaactcttccaaaaaatttaggttattgaatgttccaggcctaaagctgttgacatggaggaagttattacccaaacgaagtgtcctaagttggttgtctggacctaaattagtagtgaaagtgtacatgttgttagattctaaatttagtaaaagtaatgtctttaagttgttgaactcatctccataaacagtctttataaaattgttcctaagtttaagaacctttagattaactaaaggatcaaaactattatttacgtgtttcagcccattgtcgcttaaatctaacgttcttaaattacgcaagccatcaaaagtgccaggtttgatgtcgtgcaatttgttattttttaagattaaagactccaaaagataaagatcttggaaaactttaggttctaggttatggacagtgtcctccatatcaaggtacttaacttttcttacgcccaaaaatgcttctggatagactacttcgattggattgtgagccagtagaagctgctccatatagatcattcctatgaacgctttaggccagattttcacgatactgctatttctgatatccagtgttttgatctcatttccaggtatgtcaaacgtgccttgctccaaagattttagagaacagttgatgcattgtaaggtttcgtccagataatcgaatctatagttggttagtttgaagtaatatgccgtggcgttaacacatctggcagtaagtgagccccttggtccatagaagcatgacatttgagctggcggccatgtagctagtgaagatgtggattgaacgaggatgataaatgtccatatgaccgtggctctcatcctgcccaattggtacgctttaacaacaaaattttcactcttctggtggagcaaaaacaataaatactggagctggcttatcagaagcggaagaacgcacaatgttttgataagacggacactgatggtttgaaattttcgaagagtttataaatacg

SEQ ID NO: 4748 - DNA, 1782 bp, Diabrotica virgifera
gtgtaaatattttagctgcgcaatttagatgtaaaaattgacgattaaacaagattaagcttttttgtgggatacatgttgttttattaaatattgtaattttgaaaaactctaaaatcgaagtgaaaacttctgttttaattggtaaatatatttaattaaaaattcaagtgagactacatacttgaagtatatcaacgacataaactcgatgaaaatggatataactatccgggaacagtatgtaggtatgtgtcccgactcggaaaaacaattacatgtgtcttggtctgcaatggagtaggcttggaggtaatggagccaagacatatgtaattgctatttcaagtaaggacacatgctgtttctggtagctatatccattttcattgtcgtttaatttaatactaaatatgtaatcaacaatttaaacccaaccattgtttggttttgcggttattagcgcaagtaattgcaaagtttactgatgatggactgataactccgaaaacgttcattctgaacaataattaactgttgtaatccatttgcatttttaattacacatttataccaattacaacagaagtgttcactttaagttgtggcgacacgcttcaattgctattttgctgattttaatttttaataaaattcacaaaccatatgcgtaaagggcctgttaaattttaagaaacgaaatatatcagtattcagataaaacgccttctcagcttataaagcaccagatgatgatggcctgttcagtttatgtatgggaaacgcaaattccataatagattacgggacgataaagggccagcctccttatgtcaataaatcagtcttcaacttctttaaaaaccacagaaatgtaaaactaatgtttttagttcatccacaggcagtctgacacaaaccctcgtcccgcgaagaataacaaaccctcttacgagatataagcacgcctttttaaccaaaaataaataaaatattttattgttcgttgtcttacacttattttaatttcatttaatcgattccgtaaacggccaacggaacaaagtagttttaactaaatggtatacagccaattcccggcaactatctcaatttagattttaattttgatcagttgtacaattattgttgacactcctttgtgataattttcgccaaatactaaacgaaattacagtaaaaaagactgtctcactattatcaaagatcttagggaacaccctctatattgttacaattttgggctcttctcgatttcctcctttgtgcaatataagggtttgaaggtagtaaaagataattacgtttttttattaatttcgtagcaacattaacatcctgtagaattctagagatttgaaattaaaaaatctgtttatatttgttccggtggtgggtgttaacggaatcaattaaaaataagtgtaaacaacgaacagtaatatttgttttatttttggttaaaatgcgtgcttattcatcacttaagagggttgtttattgttttggggcagcgagggtgcgtctgaactgcctgcctgctatgacgatactgaagagaccataacacggtcatcatgtttgtggttttacaatatggctagaaaaggcaataaattactacatctggcgttttaaaagctcagaacctttctgtagctttaagagacgtctttgaatgcatttccaaagtgcgttgacataaggtctgataaggtaattaatttatggggaattcagtttgtcaaactgaacacacgc

SEQ ID NO: 4749 - DNA, 1246 bp, Diabrotica virgifera
ggtgtgcacagataatttaacaatgtagcaactgtggcgacaagcttcaattactattttgctatttaatttttaataactttttcaaaatgaaataatacgtcctattttaataaaattcacaaaccatatgcgtaaagggcctgttaaattttaagaaacgaaatatatcagtattcagataaaacgccttctcagcttataaagcaccagatgatgatggcctgttcagtttatgtatgggaaacgcaaattccataatagattacgggacgataaagggccagcctccttatgtcaataaatcagtcttcaacttctttaaaaaccacagaaatgtaaaactaatgtttttagttcatccacaggcagtctgacacaaaccctcgtcccgcgaagaataacaaaccctcttacgagatataagcacgcctttttaaccaaaaataaataaaatattttattgttcgttgtcttacacttattttaatttcatttaatcgattccgtaaacggccaacggaacaaagtagttttaactaaatggtatacagccaattcccggcaactatctcaatttagattttaattttgatcagttgtacaattattgttgacactcctttgtgataattttcgccaaatactaaacgaaattacagtaaaaaagactgtctcactattatcaaagatcttagggaacaccctctatattgttacaattttgggctcttctcgatttcctcctttgtgcaatataagggtttgaaggtagtaaaagataattacgtttttttattaatttcgtagcaacattaacatcctgtagaattctagagatttgaaattaaaaaatctgtttatatttgttccggtggtgggtgttaacggaatcaattaaaaataagtgtaaacaacgaacagtaatatttgttttatttttggttaaaatgcgtgcttattcatcacttaagagggttgtttattgttttggggcagcgagggtgcgtctgaactgcctgcctgctatgacgatactgaagagaccataacacggtcatcatgtttgtggttttacaatatggctagaaaaggcaataaattactacatctggcgttttaaaagctcagaacctttctgtagctttaagagacgtctttgaatgcatttccaaagtgcgttgacataaggtctgataaggtaattaatttatggggaattcagtttgtcaaactgaacacacgc

SEQ ID NO: 4750 - DNA, 1560 bp, Diabrotica virgifera
attaatttgtttaaacatcccggacaaatatcattgttatctaagcacctcaaggatgccccagcaaaattttcaaaatgaaatgtttacagcgaccaaagatacagcgaggtaaatatgaaaaatcatcaaaaatgatttttcgtatttttgcaaataatttgatttttgaacatgttccaccaattctagataaaaataaacttcatattcggattcagcgacctcgaaaacatgaagaatgaccaaaatttgctactcacctatcatggtcgctttttcgatttctaagcctcaaattaggggtttgtcgctcgcctataatacatcaccatgagagcacttaatcaatcaaaaacatattcttgtcatcattttcttgctgatggcctgtaatattttaaagccgattccacagctgccttggcgaattcgttgccacaaggactattaccccaaaatggacccggacaacctcttgcttcgaagcatccttcgggatacatatcactattcgcagagcagcatgaaacaactgcccaaacacagtcactaggaccatcagtctttggggtacgtctggtggttggagttggagttggagttctgggagttgtaggtctcgtacgttgagttggtcttgttggacgagttggcctagttggcctagttggacgggtttgcctgttgggtggagattgcgttgtttttgtggtaaagatttcatttagggtatcttcgtcttgggctgaaagtggaatggtggcgccatttgagggaggtcgtgcaggcctgttatattctttgtcgtttatgtcgttggtacctttatcccacactggtctgtcatcctcatcatcaaactcgaatctgggtttcaccgtcatcttggtttccatgggcctttctgaggtgacgtcatattcttttggtggaagataggaaggtcctacgtacggtggtttatcataaggctgtggagcaaaatatatcggaattcttccattagaaccgtagatcggaataaagtagggtctgttgagttggtatactggtggtttccaaacagaataagttgtaaatgacttaaactcggaatgttctccgtcccaaggatcgttggctcttttccacctatccgcctcgttctcatcggaatcgggaaaaacttcactcgccgctggagcagctgcattcgtccgctggaaatctgttgctctggcggccctgttgccgtctctcgcgaatcgattttccgccgccgccaagggtgtcgagccagcacagcacgccgtggccaaagccactatcgccgccacagctacgtattccgatttcatcatttaaattttctacagaaactccggatcaacgataaaactaactaaaatttacgaaataaaaaaggttcagtcaaaactcccgacgaataaactttgcgttgcgtcagtcgcactttgcgcactgtcgagatgtcctaactcaactcactctaccgttttgtaacgtaatgatatcgataatgatctctacaccgccttcctcctacgtacttaagcg

SEQ ID NO: 4751 - DNA, 1456 bp, Diabrotica virgifera
attaatttgtttaaacatcccggacaaatatcattgttatctaagcacctcaaggatgccccagcaaaattttcaaaatgaaatgtttacagcgaccaaagatacagcgaggtaaatatgaaaaatcatcaaaaatgatttttcgtatttttgcaaataatttgatttttgaacatgttccaccaattctagataaaaataaacttcatattcggattcagcgacctcgaaaacatgaagaatgaccaaaatttgctactcacctatcatggtcgctttttcgatttctaagcctcaaattaggggtttgtcgctcgcctataatacatcaccatgagagcacttaatcaatcaaaaacatattcttgtcatcattttcttgctgatggcctgtaatattttaaagccgattccacagctgccttggcgaattcgttgccacaaggactattaccccaaaatggacccggacaacctcttgcttcgaagcatccttcgggatacatatcactattcgcagagcagcatgaaacaactgcccaaacacagtcactaggaccatcagtctttggggtacgtctggtggttggagttggagttggagttctgggagttgtaggtctcgtacgttgagttggtcttgttggacgagttggcctagttggcctagttggacgggtttgcctgttgggtggagattgcgttgtttttgtggtaaagatttcatttagggtatcttcgtcttgggctgaaagtggaatggtggcgccatttgagggaggtcgtgcaggcctgttatattctttgtcgtttatgtcgttggtacctttatcccacactggtctgtcatcctcatcatcaaactcgaatctgggtttcaccgtcatcttggtttccatgggcctttctgaggtgacgtcatattcttttggtggaagataggaaggtcctacgtacggtggtttatcataaggctgtggagcaaaatatatcggaattcttccattagaaccgtagatcggaataaagtagggtctgttgagttggtatactggtggtttccaaacagaataagttgtaaatgacttaaactcggaatgttctccgtcccaaggatcgttggctcttttccacctatccgcctcgttctcatcggaatcgggaaaaacttcactcgccgctggagcagctgcattcgtccgctggaaatctgttgctctggcggccctgttgccgtctctcgcgaatcgattttccgccgccgccaagggtgtcgagccagcacagcacgccgtggccaaagccactatcgccgccacagctacgtattccgatttcatccttttacgatttgcagatccgctttcgacacaaacacaaaaccgacgaactgaattttcggtacaataattattattactgaatattattagagaaccatcgaccgtggttccag

SEQ ID NO: 4752 - DNA, 1574 bp, Diabrotica virgifera
  SmartBlast Evalue=1E-168; Info="Purine biosynthesis protein 6, pur6 n=2 Tax=Culicini RepID=B0WPD0_CULQU"
actacaaaagaatatattcaaaagtaaaaatttaacgtaataaagatatcaaaacaaaaaccttaaaattaacttctcattgccttatcggcttttggcaacgactcgaaatatcccagccttctaagacgcagtctgctccagacaatatagttagtcatggcgatgttagtggctgcacaaagagctgcagtttctgggtagatgactgtactacatcccaaacctgaaggtacattaacactagaccaaatatccctcgacaaatcatctcttgatccaggtgggcagttaataacgggataatctgtgtttccagagatcactggacccaaaccgtttgatcgtccagctacagcgatgaaaataagaggaatgttcataccttcataataactcactagttcaagagcaaaatcagtagttttgtgagctgaagctactcttatttctacattaagacctagatcttcgcactgctgcttgattttgttgcaatgatctttatctgcagggctgcccatgataatgaccaccagatggttgttgggagggattagatggtccaactgatcagcgatccattcgaagttcctttttactgtgtcgagatccttgtctgttactgttgttagatttctgtagacctgtttgtctaccatcagacgtttgtctccagaaggccaaagacgccaggaatcagagtctataacgtcagctactagtaagtttccttgatcatcaactccaaattcgatcttcatgtctataagtgcacaatttcttgttgcccaaactttttcgaggatttcgaaaactatgattgatgttttagtcattaaatctacttcgtgttttccaatcacaacaccattgaccttgaattcagcagaaatgatttgttcttcagaccattggggatcgtggttggcatcatccttgaagaaagtttcatgtttgactggagtaaagcggaatccttccttaacacctggatgtctgcgtaagaatgatcctgtagccagacgtctagtaacccattcgatggggatcatttcacattttttggaaaggaaggcattgtcagatactgattttacataggcagttttcataccaactttcctcaagatttcgaaaacttttccattggttttatttgagataacagattttccagccaaatcatgagccttgacaccatctccagcggtgattctgtctttgcttaacaagatacaatgtccaggcacagagggtacatcgtaaacctgttttgtttttccttcaatgattaggttacctaatttgtatcctccaatttctttcactgaagccatttctactggatgatgaattatttaataaactaaagaaacaaccaataccaaattctacaatactaaaaggtatcttaaaaggtattttattgaacgtgaactccaaagagcgggacctcgtttagctttttattagttgaacaatttatcaacgcatgcgtcacaattgttgattagaaataattattaatgtcgtaagatgttatttgttcttaatttaacccaatattacac

SEQ ID NO: 4753 - DNA, 1426 bp, Diabrotica virgifera
  SmartBlast Evalue=1E-168; Info="Purine biosynthesis protein 6, pur6 n=2 Tax=Culicini RepID=B0WPD0_CULQU"
actacaaaagaatatattcaaaagtaaaaatttaacgtaataaagatatcaaaacaaaaaccttaaaattaacttctcattgccttatcggcttttggcaacgactcgaaatatcccagccttctaagacgcagtctgctccagacaatatagttagtcatggcgatgttagtggctgcacaaagagctgcagtttctgggtagatgactgtactacatcccaaacctgaaggtacattaacactagaccaaatatccctcgacaaatcatctcttgatccaggtgggcagttaataacgggataatctgtgtttccagagatcactggacccaaaccgtttgatcgtccagctacagcgatgaaaataagaggaatgttcataccttcataataactcactagttcaagagcaaaatcagtagttttgtgagctgaagctactcttatttctacattaagacctagatcttcgcactgctgcttgattttgttgcaatgatctttatctgcagggctgcccatgataatgaccaccagatggttgttgggagggattagatggtccaactgatcagcgatccattcgaagttcctttttactgtgtcgagatccttgtctgttactgttgttagatttctgtagacctgtttgtctaccatcagacgtttgtctccagaaggccaaagacgccaggaatcagagtctataacgtcagctactagtaagtttccttgatcatcaactccaaattcgatcttcatgtctataagtgcacaatttcttgttgcccaaactttttcgaggatttcgaaaactatgattgatgttttagtcattaaatctacttcgtgttttccaatcacaacaccattgaccttgaattcagcagaaatgatttgttcttcagaccattggggatcgtggttggcatcatccttgaagaaagtttcatgtttgactggagtaaagcggaatccttccttaacacctggatgtctgcgtaagaatgatcctgtagccagacgtctagtaacccattcgatggggatcatttcacattttttggaaaggaaggcattgtcagatactgattttacataggcagttttcataccaactttcctcaagatttcgaaaacttttccattggttttatttgagataacagattttccagccaaatcatgagccttcacaccatctccagcagtgatcctgtctttgcttaacaaaatacaatgtccaggcacagagggtacatcgaaaacctgttttgtttttccttcgatgattaggttacctaatttgtagcctccaatttctttcactgaagccatttttacttctacccgataatgaattatttaataaactaaagaagcaaccaaattctaaaatactactaaaaggtattttattgaac

SEQ ID NO: 4754 - DNA, 1506 bp, Diabrotica virgifera
  SmartBlast Evalue=0; Info=TBC1 domain family member 24 n=2 Tax= Aculeata RepID=E2ARX4_9HYME
atattatataaactactatatttttcttcgttggctgtcgttgtctagctgagttggtcggtggcaaatccgtagacttccagtactctgatttcgaaatcaccacctggcactaaggggggattgttaaatgttgcacaagtatccgttttgccgtatcttatgttttcgtccatccagatagcttggccttctcctcctccaatcgtaatcatcttggaatcagccgccataaaaagttctgcgccgtgttgaaccttgtccacctccataccaacccaaggatatttcgctcgttctggatataacgaaaacagaaatgtttctcccgtgccgaaatacgcctgtctgttacccctatcgtcttttatatttctctcgacccaacgtgatgaacagtacgcaccgaatacctcattgttgcaggtcttaatcatcaacagggtaggctcgtgctgttccaccctaacgtagaacgtcgtcaaggaacagccatgttcttcggtggtatatagcagtatcggttggtacattgtaattcttacaggtaaccaggaccaaagagtaagtaacatttcattgtacatctcttcggacattttctcccgaatggtaagtgtatgcgataccatctggatattgttttgactctggctattcggcaagttttcgctcgacctcgacctcaccaacctcgagccgttcaccacatttttgctctttagaatcatttcagtcttcaaaaaaaccctcgatatgtacgaggaactcaatcccctaatgccaaacgctaccttgagcaccttctgcggcgacactgggcattccttgcagaacttcgtcagcgcgctgtcgacaccgttcttctggatttcggccagccattccgaagacgatgacgatgaaaatttttggaataggataaggatggccatcgccgttcggtatagcacctttaccccttcatggaaaaaacagtccataaccctcacgagatgctgaaacggtaatccctgaaatatccaccagatccagtccatgtatattttttcttgtcgattagtcgtacaatgcctctgaaggtgaactgcagctgacttcacatgttttttgcatatttgcatgacagtcttccacgttacttcgtataaaagttttgtttgtgtgatgaatgttttttctttcgatgctaccaaactggccatacagtgatatgcctcctcttcagtcatgaagtgaagaagtagagcacatattggatatatcgttggactataaacaatatcggggcaagcatatcctaacactgacacaacacgatctgtaatacttcttcctttatgtgtcatataatatgactgacagtgagacggttccacgaagggtggcaaactgacagatttgtctggtagatcagtggtcccgtaaacctggttaaccatatcccagtagaacccttccataaaattggacttgtcattttgtatgctgtgtacacaactctgg

SEQ ID NO: 4755 - DNA, 1476 bp, Diabrotica virgifera
  SmartBlast Evalue=0; Info=TBC1 domain family member 24 n=2 Tax= Aculeata RepID=E2ARX4_9HYME
atattatataaactactatatttttcttcgttggctgtcgttgtctagctgagttggtcggtggcaaatccgtagacttccagtactctgatttcgaaatcaccacctggcactaaggggggattgttaaatgttgcacaagtatccgttttgccgtatcttatgttttcgtccatccagatagcttggccttctcctcctccaatcgtaatcatcttggaatcagccgccataaaaagttctgcgccgtgttgaaccttgtccacctccataccaacccaaggatatttcgctcgttctggatataacgaaaacagaaatgtttctcccgtgccgaaatacgcctgtctgttacccctatcgtcttttatatttctctcgacccaacgtgatgaacagtacgcaccgaatacctcattgttgcaggtcttaatcatcaacagggtaggctcgtgctgttccaccctaacgtagaacgtcgtcaaggaacagccatgttcttcggtggtatatagcagtatcggttggtacattgtaattcttacaggtaaccaggaccaaagagtaagtaactcccgaatggtaagtgtatgcgataccatctggatattgttttgactctggctattcggcaagttttcgctcgacctcgacctcaccaacctcgagccgttcaccacatttttgctctttagaatcatttcagtcttcaaaaaaaccctcgatatgtacgaggaactcaatcccctaatgccaaacgctaccttgagcaccttctgcggcgacactgggcattccttgcagaacttcgtcagcgcgctgtcgacaccgttcttctggatttcggccagccattccgaagacgatgacgatgaaaatttttggaataggataaggatggccatcgccgttcggtatagcacctttaccccttcatggaaaaaacagtccataaccctcacgagatgctgaaacggtaatccctgaaatatccaccagatccagtccatgtatattttttcttgtcgattagtcgtacaatgcctctgaaggtgaactgcagctgacttcacatgttttttgcatatttgcatgacagtcttccacgttacttcgtataaaagttttgtttgtgtgatgaatgttttttctttcgatgctaccaaactggccatacagtgatatgcctcctcttcagtcatgaagtgaagaagtagagcacatattggatatatcgttggactataaacaatatcggggcaagcatatcctaacactgacacaacacgatctgtaatacttcttcctttatgtgtcatataatatgactgacagtgagacggttccacgaagggtggcaaactgacagatttgtctggtagatcagtggtcccgtaaacctggttaaccatatcccagtagaacccttccataaaattggacttgtcattttgtatgctgtgtacacaactctgg

SEQ ID NO: 4756 - DNA, 1744 bp, Diabrotica virgifera
aaatatttatatttatttaaccaaataatacaaaaggtggttgcatatatttttccataatctcgttaacttccttgtattgtcttggattttcttgcatacttaaagtgttattaatatttagaaatctcaacgattttggttcagatggttgccagatgacgttatccaaaagtggatggatctcaggagttggattgtaaaattttacaaaattagtatacaatttgacaaacttgtgaagaacgagttgatctgattctggaaatttattaaggtcactgttgcttccatcgtcccataaatacagattatcttcaccatgcgaaactgtatctacatctggtggcaaaaatggcagcacatccattgctcctcctaattctcctttataggaaaatcggtataagtagttcgtgacattggcagatgccaattctacttgtttgcatattccatagatacagaacgcgtcacttaaatgccttataaaagcgccgaaatcttccacaaaactagaattatgtgtgtatagttgttttctcaaatttccagcaattgctctagcttcaggggacatatttattttgctattaatcagttggcttgggtctgaatccaacaattgtagtatgccttcattttttacgaaagcagcacctcctccttcttctgaagtaaatccagttagtacaggtacctttttataatttcctgataaaaatgctgcataaccgccataggagaatggtccttctggttctgtagacactcctattttgattcccgccttttgaatatcgtcggcttctgcattctgcagcacatttagtaactccttcgtgtcgttagttgtaaactgagggttcacaattctaccaagtgctaaggctgtgttggtttcatcatcctgtgtaagtaaaccactaagtatacttccactttgcattattgcagcatgaaacagttgtttgccgttttcccatggtcctataagatgatagccaacagataatgatcctgaactctcaccagctatagtcacatgatcgggatttccaccaaacaaattaatatttttattcacccattccatggccaacctttggtctttaagtccaatattcagaggaataactccgtcgttagtcccaacaaagccaaaaggtcccagtctgtagttaaaggttacaactacaacgccagcatccattatatattttggtccaaagtactcgattgttccggcttcataagtaaatgttcctccatgaatccataacaaaacaggaagaaggttgttgctaccaggcttttgtggcgagtaaacgttgatatataaacaatcttcacttagtttaaggttgctaaatggtgatggggcttgatagcaaatctttgtatttctagtggtattgagaatatctgtccaaggcttcggtggtttggctagttgaaatctgttttttcctacaggcggtgcagcatacgggatttcttggaaagcaaaatagtcgttacccttctcacttttaaggatatgtccatgaattcttccttccttaagttgcactatagtcccatcatcttcataacgttttgctatactttcatgtatagcaattgcactgattaataaaaatacttttgatgtttttaacaccctcatgaccacttattttagttaaataatttgttctctaagaaacactggtacattttttaaaacaggtacaattttttt

SEQ ID NO: 4757 - DNA, 1228 bp, Diabrotica virgifera
  SmartBlast Evalue=1E-47; Info=Pheromone-degrading enzyme 2 n=2 Tax=Antheraea polyphemus RepID=Q2TIL4_ANTPO
ctagaattatccgtgtatagttgttttctcaaattgccagcaattgctctatcttcaggagacatgtttattctgctatcaattagttggcttggatttgatccaacaattttaaaatgtcttcgttttttaaaaaagcagcacctcctccttcttctgaagtaaatccacttaatactggcacctttttataatttcctgataaaaatgctgcaaaactgccataggagaacggtccttctagttccgtagacactcctattgggattcccgccttttgaatatcgttggcttctgcattctggagaatatttaacaactccttcgtatcgttagatttaaactcaggatccacaagtctacaaagtgctaaggctgtattggtttcatcatcctgtgtaagcaaaccactaattgtacttgcactttgcattattgcggcatgaaacagttgtttgccgttttcccatggtcctataagatgatagccaacagataatgatcctgaactctcaccagctatagtcacatgatcgggatttccaccaaacaaattaatatttttattcacccattccatggccaacctttggtctttaagtccaatattcagaggaataactccgtcgttagtcccaacaaagccaaaaggtcccagtctgtagttaaaggttacaactacaacgccagcatccattatatattttggtccaaagtactcgattgttccggcttcataagtaaatgttcctccatgaatccataacaaaacaggaagaaggttgttgctaccaggcttttgtggcgagtaaacgttgatatataaacaatcttcacttagtttaaggttgctaaatggtgatggggcttgatagcaaatctttgtatttctagtggtattgagaatatctgtccaaggcttcggtggtttggctagttgaaatctgttttttcctacaggcggtgcagcatacgggatttcttggaaagcaaaatagtcgttacccttctcacttttaaggatatgtccatgaattcttccttccttaagttgcactatagtcccatcatcttcataacgttttgctatactttcatgtatagcaattgcactgattaataaaaatacttttgatgtttttaacaccctcatgaccacttattttagttaaataatttgttctctaagaaacactggtacattttttaaaacaggtacaattttttt

SEQ ID NO: 4758 - DNA, 1890 bp, Diabrotica virgifera
caaattacagaacgctagcttttggggatagtagtttggggtggtttcattaaaggtttgtaaacgatacggatgaaaacgtaaatcttgcttaaaatgcgctggcaagttccacataaaagatctacttgatgtaaatgctgaattgaagcgcttattgtataaagggtataagtccgcaatacttagttttgagaaaaacgaaaaaaactgtttatgtttagaaacttgatgatctatcaaattttgttctacagatgaaatgtagaaggagactagtagagtgacatgtgatacagcaaacttggctttgaaaacgattaaagccaaaaagtcgtttttaaaggctgggacttgattcctttatacaattaatgaataaaagacgaaatagtgctacttctctacagttaaattattaatttatttataaaaaaggtttattactacaaacaagatctaaaacgctcactatactactcgcgaagtcgatcgaagttcatcaagtacgagagtgtagacagtaaccttgtgcgacttcgctgcgcctcggtctacttccattcggtggcgatattgcgatcgactcaaaggaatcgaagtccttgtccttatcgcccggcgtgaatgtgttcctcgcgaagtagaacgagtgtgtagtgacgggcacttcggacttctgtaaactttgccgaagtaacttcgctgaaagtgtggtgctcgcttaaaattcatcgtaagactaactaacgtaagctaaccgaagtaataaaataaacgagtctgtaaacaaaatgacacaaacgatggtggcacaagaattattgtataaaggtaatcagtcccggactagtttcctttataagctcaacaaaaattttatcgtgcgatatttcgcgtatggtgagagatactaatttcctttattatatactcatcgatccctcgatgttggtttaacaaaatgtatatctcactttaatttcgtacggaagtggagttattccctttatacaataagcgattcatatgtaagtataacaaaaagcaggtttctcaaaaacagtgcgtgatacaaaaacactaagaacagacttggtttcagcacataaaaatcagctattgaagtctaaaaagtcttcaaccaaaattctttttgtgttggcctgtgttatgaattacagtttaagttgtgtggaaaggacgcgatattcctgagtattttttgtgtaatacaaaagtagtaagaatcgaatcatcaacatgggcgcccaaataaaaattttcaggggggggtggggggaaacgtgaagatgttgcacaattttgtattctttggatgacaatatatacctagtttaaagcacccgaaagtcatgggtatgggcgcccatgatcatcaatgaaatgatatgaaacttccgaaaactactctacaaccatgctttcatatgatattaaagcacaacattttagtattctatttttgtgagcctgagatattttggacataggaagaagaaaaggcatgaaacgaatgatagtcgaagccaacgtagcgggaaaaagatccagaagatctacagtatgatggtcggatcaaataaaagacatggctggttattcattctctgaagcaaaacaacacgcacagcagagaataatttgacagcaataattaaacaaattacatgagaggaaggaggagagccttattattatcattattaatacgatatgtttaggataattgaacgatttttgaagaataatggtctcacatagaaataaaacaagaagtaagaatatttttctttagcaacaagcctttgttatatctaaaataccatgcaactgatagaaaactttaaatatacaatgtaataacac

SEQ ID NO: 4759 - DNA, 1080 bp, Diabrotica virgifera
caaattacagaacgctagcttttggggatagtagtttggggtggtttcattaaaggtttgtaaacgatacggatgaaaacgtaaatcttgcttaaaatgcgctggcaagttccacataaaagatctacttgatgtaaatgctgaattgaagcgcttattgtataaagggtataagtccgcaatacttagttttgagaaaaacgaaaaaaactgtttatgtttagaaacttgatgatctatcaaattttgttctacagatgaaatgtagaaggagactagtagagtgacatgtgtacagcaaacttggctttgaaaacgattaaggtcaaaaagtcgtttttaaaggctgggacttgattcctttatacaatcaacgaataaaagacgaaatagtgctgcttctctacagttaaattattaatttattcataaggtttattattacaaacaagacctaaaatacgtcgtaagactaactaacgtaagctaaccgaagtaataaaataaacgacaaagtgccacaaacgatggtggtgccacaagaattattgtataaaggtaatcagtcccggactagtaccctttatacgctcaacaagaattttatcgtgcgatatttcgcgtacggtgagacatacaaatttcctttatagactcatcgatccgtcgacgttggtttaacaaaacgtatatctcactttaatttcgtacggaagtggacttattccctttatacaataagcgattcaattgatgtatgtggttgattgacaataactgttctgaccagttcgatgttttattcagttcgctctttaggcctgcctgcccctggcttgtgagttacgcttcccgtttctctataaacatctacaatgcgacaaatagttctgcaaagacgtcataatgaatagcaacattgggaaattcttcaacataaacttcaaaagcatctcggttggagtaaacccattctccgttaattctttggccatttctaaaatacatttcgagcaaagatcgcttttattcatttttaataataattttgttgtttactaaaacttgaaaagtcaaaat

SEQ ID NO: 4760 - DNA, 1508 bp, Diabrotica virgifera
  SmartBlast Evalue=4E-15; Info=Juvenile hormone-inducible protein n=1 Tax=Culex quinquefasciatus RepID=B0XJU1_CULQU
ttgttattaatctttccgtatacattgttttttcattgtgtcctaaattaataacggacaaattttctgataccgaactcatatcatctaagttatccaatgatggagcatcgtctggtttaacaaaattaaaatccatgtagcaacatgcatatgcaaatccatatatagcgtattttttccaatgatccattagcagagaatatggaaatatggaattggcatcattccccaattccgtaaaaaatcttgttaactcttcgtgatagtatttcaacaaagctgtggattcattaatttctggtttagatgcaactgaatacaaaatgaatgataaatctatcactggagagtgatatctgactagtttgccaatctacaatagccatatcaagtagattttccctgttattgtccttatatttaaacataaagttgttattatggcaatcacaatgtaccataacagatagctcaggattttctttaacgatgatatcagatatgatttcagatattcccttttccattaacttatcaaattttgtagataaatccaatcggttcccttctcttaaatgttttgaaacttttaccacacaggcattgaaaaaatctgacatgccaaaatctacggttttcttagttataagatcattctctaagatttttagaaacgactcattttgttgttcttttaaagaaagagaaatagcatgaaatttggcgtaagttttcattaataatttaagatgattcatattcatagatatatggcgatcatgtaatatgtatccttgctgatacaaattgtctagaaatattatgtccacatcttcatccgagaaggtggcatgacattttgccactgctttaaatggcttagaaacattttgtttattttgatgatcattaaacacttccattatttccttatagaataaaagttcgttcttatacatacatttctaaaaacttcgaactttcgcatagatgctttcgaaaattttatggccaaatgatgttcttgtaactttttgtcaaaatcagctaatttaatttttgcaaataccatgtctgatgcatatccttcagttttattagtttttcttccttgcaattcgatcgaaaaatcttcgtaacagtcagctcttagtgcttttcgaatataacttacaattttgttattttccatattaaaaatgtaacaaatattgaataaactcagcaaaattgatcggttttaacgaatcactataattttcaatactagatatacgtacattataggtactactgtaacacggtaattcttaatttttattaataatattaataaaaatatattatgtacctactgatattgaaacacaattgatatctataagtgaaaacatgtgccacagatcacaatcacaatatcacagtaatcttattaacactaaaaatttcaatgcaaatgcaaatcaagttcttatgacttcgtcaacaggtacgtggtacgtttg

SEQ ID NO: 4761 - DNA, 1467 bp, Diabrotica virgifera
  SmartBlast Evalue=4E-15; Info=Juvenile hormone-inducible protein n=1 Tax=Culex quinquefasciatus RepID=B0XJU1_CULQU
ttgttattaatctttccgtatacattgttttttcattgtgtcctaaattaataacggacaaattttctgataccgaactcatatcatctaagttatccaatgatggagcatcgtctggtttaacaaaattaaaatccatgtagcaacatgcatatgcaaatccatatatagcgtattttttccaatgatccattagcagagaatatggaaatatggaattggcatcattccccaattccgtaaaaaatcttgttaactcttcgtgatagtatttcaacaaagctgtggattcattaatttctggtttagatgcaactgaatacaaaatgaatgataaatctatcactggagagtgatatctgactagtttgccaatctacaatagccatatcaagtagattttccctgttattgtccttatatttaaacataaagttgttattatggcaatcacaatgtaccataacagatagctcaggattttctttaacgatgatatcagatatgatttcagatattcccttttccattaacttatcaaattttgtagataaatccaatcggttcccttctcttaaatgttttgaaacttttaccacacaggcattgaaaaaatctgacatgccaaaatctacggttttcttagttataagatcattctctaagatttttagaaacgactcattttgttgttcttttaaagaaagagaaatagcatgaaatttggcgtaagttttcattaataatttaagatgattcatattcatagatatatggcgatcatgtaatatgtatccttgctgatacaaattgtctagaaatattatgtccacatcttcatccgagaaggtggcatgacattttgccactgctttaaatggcttagaaacattttgtttattttgatgatcattaaacacttccattatttccttatagaataaaagttcgttcttatacatacatttctaaaaacttcgaactttcgcatagatgctttcgaaaattttatggccaaatgatattcttgaatctttttgtcagaatcagctaatcttatttttgcaaataccatatctgatgcatatccttcagttttcttaggttttccttggagttcgatcgaaaaatcttcgtaacagtcagctcttagggctttccgaatgtaacttacaattttgtgattttccatattaaaaatgtaacaaatattatacttaaacaaagtaaaattaaccagttttaacgaatcactatacttttcaatactattatttcaccactgtcacaggttaacacttaattgttattaatatttataattataggtacacctaattactataaatattatcacgttatagatatctattggtgaaataataaataatttgccagagatgaatatcacagtgattttgataacactaaaaaatatttcaatgtcgatcgagttttcactacatc

SEQ ID NO: 4762 - DNA, 1532 bp, Diabrotica virgifera
tgacaattcacatgttatttatttctaaaattttgcagtacaaagtataaaaaataatttgacttaatgcttaatgcttacttatagaattattttggtcaacctaacctttcactttcatatttgacatcttaaattcgatgagttcctgtgctgacaaaatatattttgcaacaacgttaggatcgaccgtcaaatttttatcaatgtcatttataattgctttcaatctgttttcaacattagttaatgttgcggctgaaggaccattgataaggttattgtttttattccagtaatataaaatctttccatttttaatactttcgtagtaggattttaggagtgtcatgaatacataacttaaagagcttgaccagaaggcttcgggtcttttctccttttcccacagtgctatagttttgaggtagtaactagctatgcaggcgtggttagaggtatccctcattttctttaaaaacttgatagatggtttcaaatactgctttttgtcaattagttctctttcctgctcttggaacgacaacctccaatagtgttcgcctaccagatttccgttcttctgtggtttgggcacaatgaagaaggttgacctcctcctggtgtaagtcattatataaggacgaacggaactgtgtttattgttattatttttgcggagtctaggtctataatatacctttgctggagttggattgggtctgaacggactcttaggccatttatcttgcgcaaatctaaaacatgggtaccaagtctatgtctaaaacgacattatcctttccgactcgtccatttactttcagtgtaaaggctggacctgctttgctaaatttcgccaaaaacttgccacttttaatgtttatgacatgggagcccttctcttggggaaaatcgtttatggtcagcgtcactatacgttccatccactgacgaaccttcagattatcaagatggtgttggttatctactaatttttccaaaccgttaaagcgttcctttaagtgaggttgattgaaaagttctaaaaggttagttatcttcacatgaacgaagcctggaatgttactaacatttaaatctatgttaagcatctttggcagagtcataagcaaatccaaatcgaattcgtctggtgcgccgactcttaagccatcatagaagctacctccaaaaaatgtggtgaaatacagttgcttaaaaagagtattcttttccttcatttttggaattaaggcgtccaaaagctcaagaagaattttattgtttcttttcctcatttcttcaggaaacgaaatgtatttttgatttatatctttaagcacgttttccagcacattgtatctctttttttcctcagcatctaccatgttttacagctgtatctattgtattattcactttgaacaaaaacaatcgaatcgaatatgtgtaacaattaatatctgacgttattataaaaatatctaagcttattgcacacttatatacgataaaacaatgaaatgaaa

SEQ ID NO: 4763 - DNA, 1445 bp, Diabrotica virgifera
tgacaattcacatgttatttatttctaaaattttgcagtacaaagtataaaaaataatttgacttaatgcttaatgcttacttatagaattattttggtcaacctaacctttcactttcatatttgacatcttaaattcgatgagttcctgtgctgacaaaatatattttgcaacaacgttaggatcgaccgtcaaatttttatcaatgtcatttataattgctttcaatctgttttcaacattagttaatgttgcggctgaaggaccattgataaggttattgtttttattccagtaatataaaatctttccatttttaatactttcgtagtaggattttaggagtgtcatgaatacataacttaaagagcttgaccagaaggcttcgggtcttttctccttttcccacagtgctatagttttgaggtagtaactagctatgcaggcgtggttagaggtatccctcattttctttaaaaacttgatagatggtttcaaatactgctttttgtcaattagttctctttcctgctcttggaacgacaacctccaatagtgttcgcctaccagatttccgttcttctgtggtttgggcacaatgaagaaggttgactttgctggagttggattgggtctgaacggactcttaggccatttatcttgcgcaaatctaaaacatgggtaccaagtctatgtctaaaacgacattatcctttccgactcgtccatttactttcagtgtaaaggctggacctgctttgctaaatttcgccaaaaacttgccacttttaatgtttatgacatgggagcccttctcttggggaaaatcgtttatggtcagcgtcactatacgttccatccactgacgaaccttcagattatcaagatggtgttggttatctactaatttttccaaaccgttaaagcgttcctttaagtgaggttgattgaaaagttctaaaaggttagttatcttcacatgaacgaagcctggaatgttactaacatttaaatctatgttaagcatctttggcagagtcataagcaaatccaaatcgaattcgtctggtgcgccgactcttaagccatcatagaagctacctccaaaaaatgtggtgaaatacagttgcttaaaaagagtattcttttccttcatttttggaattaaggcgtccaaaagctcaagaagaattttattgtttcttttcctcatttcttcaggaaacgaaatgtatttttgatttatatctttaagcacgttttccagcacattgtatctctttttttcctcagcatctaccatgttttacagctgtatctattgtattattcactttgaacaaaaacaatcgaatcgaatatgtgtaacaattaatatctgacgttattataaaaatatctaagcttattgcacacttatatacgataaaacaatgaaatgaaa

SEQ ID NO: 4764 - DNA, 1541 bp, Diabrotica virgifera
gtaacgaatgtcattttttgaacattcgcgaatacgaatgcaatgcgaatatctgctaccgacattcgcgaatgcggatgcgaatgcgaatattctattttttttaatttgtttctatttttgaaatgttttctaaatttataatgagaagttaattgatatttagtgtaaatcaatctgaatcttaagctttattacattataccaaataataaaacaacgtgaagcctgataatctgattatacgaggttaagttaccatttcttaataaaaaaagatgagaaaaagaatagattttgattttattaatctcacgttattttcaaattattttttctctgatattcatattcgcaaaacattcgcacaaattttgcgaatgcgaacgcgaatgcgaatatgcaaaaatatgcggatattcgcgaatgcgaatgcgaatacgaatattcgttacatcactagttagtactataacgtagttagttttatgaagaaacttcaaaagcaattcacaattgtgtctaaaaaaacgggtaattcttgttgttcttaggtttcacctcaaaaaccctatgttagaaggtcagaagagtatgaaaaggtcgtatgtatttcttgccaaaagtacaaacaataaaacaaaattgaatgtgtgaagtcttgctggaatgaattctaagactgtttatatcagaagattttatttatggttctagaataaatagctacttgttgttggtttacttcattaaaacttcatgttgattattacatctttgttatgtaccttggatataggtatactcgaagatgatcgggttttaacagaataacagcgataatcctctgcaagtacctgcctaatactgcctttacggctactgccctgaagagcggcaacgtaaattctcatttagtttgcatggccttatccttagtacactgcatcacatatctgaaatacgctggtggttaaggaggcagatttgtatgcagcgtaccctttttgttttctttaatgtcttacgaggaagagggcttctaaatgatatataatattacatgcagcgggtctgtgttttttgatgttgatatcttctagtacgacctttttgaattttaaaaacctttcgagacatagagatcccagtaaataatcgtaagttcttgcttagagtatagcactgatgatgaaacaaaatcacatgacaaataaagtatattgagtatgttgtcaactactgaaatctgatttgttcaaatttgatttgacattttacttagaataagttctttattcattctttttatagatccttttgtaaaattgctgttgctttttgatataaaaaaaaaacagttacacttttaaaatgaatacaatttaatacttgagaacccgatacctcaaagttgtgaattttgtttgcttttacatacttggcaattggataacaaattatagttgcagaacattttttaattttaaggaagttccattattgttttgtttttaatttcgggaagccgttgacggaac

SEQ ID NO: 4765 - DNA, 1417 bp, Diabrotica virgifera
cacatttcacatgccaagctacatattgcttgtgacgatgatttttcggctctagctctccgcctataaacaaagtttgtcaaaacgcgtgagctgcgtcgctgacagtcaataggctaagagacaaatgttagggacacatgatcggaagtcatattttactttattcagtaattacttatatgcaaatatttcctaattcccaaatttccatcgtcgtaacgttgtgaacacatctagcttcagtgttagacataatgttatcagatctaagtgttagctacagtagttttttaccgcaatatgatacgtactacagatagccaaatatgttttgtgttagtactataacgtagttagttttatgaagaaacttcaaaagcaattcacaattgtgtctaaaaaaacgggtaattcttgttgttcttaggtttcacctcaaaaaccctatgttagaaggtcagaagagtatgaaaaggtcgtatgtatttcttgccaaaagtacaaacaataaaacaaaattgaatgtgtgaagtcttgctggaatgaattctaagactgtttatatcagaagattttatttatggttctagaataaatagctacttgttgttggtttacttcattaaaacttcatgttgattattacatctttgttatgtaccttggatataggtatactcgaagatgatcgggttttaacagaataacagcgataatcctctgcaagtacctgcctaatactgcctttacggctactgccctgaagagcggcaacgtaaattctcatttagtttgcatggccttatccttagtacactgcatcacatatctgaaatacgctggtggttaaggaggcagatttgtatgcagcgtaccctttttgttttctttaatgtcttacgaggaagagggcttctaaatgatatataatattacatgcagcgggtctgtgttttttgatgttgatatcttctagtacgacctttttgaattttaaaaacctttcgagacatagagatcccagtaaataatcgtaagttcttgcttagagtatagcactgatgatgaaacaaaatcacatgacaaataaagtatattgagtatgttgtcaactactgaaatctgatttgttcaaatttgatttgacattttacttagaataagttctttattcattctttttatagatccttttgtaaaattgctgttgctttttgatataaaaaaaaaacagttacacttttaaaatgaatacaatttaatacttgagaacccgatacctcaaagttgtgaattttgtttgcttttacatacttggcaattggataacaaattatagttgcagaacattttttaattttaaggaagttccattattgttttgtttttaatttcgggaagccgttgacggaac

SEQ ID NO: 4766 - DNA, 2151 bp, Diabrotica virgifera
  SmartBlast Evalue=0; Info="Myospheroid protein, putative n=1 Tax=Pediculus humanus corporis RepID=E0W1M5_PEDHC"
gtgcaatgaaggtaccaacgatgaagagctatgtacggaacagttttcttttactattaatcatcacaagtgtgatagcccaatttgcctcaaagttcattatttccaaccgctgtgcacccaaagaaacatgtagcgaatgtattcaaataccggattgctcttggtgttttgaccccaactttggtaatggacctcgctgcttcgatgcagaaatacagttcccccaacataaaaagtgtcccgaagaattcgtattttttccggaaaatatacaaaatgttgtgaccaatctagagttaacaaaagctcgtaaatgggacaccgatggtgatgaaacgatcacggaaggagttgtaggaagctataaaactggtggtaccagagatcagatggtacaagtcgcacctcaaagaatacgtttgaagttgcggcctggagcagtgcacaccatcgcaatgaaatacacccaagcagaagactacccattggacatttactaccttatgggtttgagtaagtctacgtcagtcaacgagaaattgttgagtttgggcgagacgctggcaacgatgaaaaaactgacctcaaacttacaagtgggctttggtacttttagtgacaaagctcttatgccacatgacaacaacttaacagagaattttctgcattctgctccttacggctacaaacacgtcttaagactatcgacagatgccgaattgttttcacgcactgtgaaacaagccaatgtttctggaaatttgatggcaccaaaaggtggtttcgatgcagtattacaagcgttgcaatgtagtgatcagattggttggagacaacaagctagaaaattactggtggttgccacagatgcaaatttccacgttgctggagatggaaaacttggaggtattataaaacccaacgatggctattgtcatttatcccatgatggttcctacacacagtcatcctatcaagactacccctctatcgaacaaatcaattggagcgtaaagagaaattcaatcaacgtcatttttgcagtcaccgataatactgtgaacacctacgaacagattgccaaaatgatagagggttcgtcagtgggaaaaatggatggcaatagttctaatattatttcccttataaaagaacaatatgcaaaaatttcttccattgttgagatgaaagataattcttctaatgcgttaaacattaaatatttgagtaaatgtttggattccacaggactgttggtttatactaataagtgtaataatataaaggtcggtgatgttgttacattcacaatcgatataaaagtcctaaagtgccccaaaaatccagcagattatttccagactattcaaatataccctgttggtttgtatgacagattaataatcgatttagaaattatatgtgaatgccattgcgaaaaacctggcaatccatattatcaagaacatgccccggtatgttcaaggatgggtacatacaaatgcggcatatgtgaatgcaatcccggaaatttcgggaaacattgtgaatgcatcgcagatgatatatataccaacataactgccaactattgtagtcctccgaatgcaccaaatgagttagaatgctctggcagaggacaatgcgtctgcaataaatgtgtgtgtgaggcaagagagaacgaaaatgagagaatctacggcaaatactgcgaatgcgaaaacttctcctgcgagcgccatgacggcaaactttgcagcggtcccgaccacggtatctgcgactgcggcgtatgccactgcaaagaagaatggtccggcccgaactgcgcatgtgccaaatccaacgccacctgttacgcgccaggtgttacggatggtaagatttgttcaggacacggaacatgcgagtgcggcgtatgtcactgcgatgtcagcgacgagggacagtactctggaaaattctgtgatagatgcccaacttgttcagacagatgtgccgaattcaaagactgtgttcaatgccaacaatataagactggtcccctcaagaaaccagaagattgctctgcccagtgtacaaaattcactccctcatcggccgatgtgataactgtggatcagaagaacaacgaagtactttgcgcct

SEQ ID NO: 4767 - DNA, 797 bp, Diabrotica virgifera
  SmartBlast Evalue=9E-90; Info=Integrin beta subunit n=1 Tax= Aedes aegypti RepID=Q16M01_AEDAE
tcatttccagactattcaaatataccctgttggtatcaatgaaagtttgaccatcgatttagaaatgttgtgtgaatgtaactgcgaaagacccggcgacaaatattataaagaacatgccccagcatgttcaagcatgggtacatacaaatgcggcatttgcgaatgctacccaggagcattcggcccacattgtgaatgtcttccagatgatctaccgactaacattactgccaccgattgtattcaacctgacgtaccaaatgcggtagagtgttccggcagaggacaatgcgtctgcaataaatgtgtgtgtgaggcaagagagaacgaaaatgagagaatctacggcaaatactgcgaatgcgaaaacttctcctgcgagcgccatgacggcaaactttgcagcggtcccgaccacggtatctgcgactgcggcgtatgccactgcaaagaagaatggtccggcccgaactgcgcatgtgccaaatccaacgccacctgttacgcgccaggtgttacggatggtaagatttgttcaggacacggaacatgcgagtgcggcgtatgtcactgcgatgtcagcgacgagggacagtactctggaaaattctgtgatagatgcccaacttgttcagacagatgtgccgaattcaaagactgtgttcaatgccaacaatataagactggtcccctcaagaaaccagaagattgctctgcccagtgtacaaaattcactccctcatcggccgatgtgataactgtggatcagaagaacaacgaagtactttgcgcct

SEQ ID NO: 4768 - DNA, 2412 bp, Diabrotica virgifera
  SmartBlast Evalue=1E-96; Info=Porphobilinogen deaminase n=1 Tax= Camponotus floridanus RepID=E2A1J7_9HYME
cagtactgtgaacatgatataacataagtatgtagaaattttttgtaatttgtggtttagtatttgttatttattttttattaaattcaattattttattaaagaatactgaaacatgaaattataatagagttatattttttaaggataagaacttcaaatagacaaacaattataggtatttaaaaattcaaattgtagtgttttacatgatatagcatttttttctgtcttaaaattcaaattatagacaacatgagtggagaccataaagttattcgtgttggttcacgaaaaagtgagctagctcttatccaaaccagacatgttatttccttacttaaagactgttttcctgacaaagaatttgaaatagttactatgagcacactaggtgacaaagtactagatattgcattaccaaaaataggcgagaagtctctctttacaaaagaactggaaacagcattagcgacagactgtgtagattttgttgtacattccttaaaggatcttccaacttgtttgccattaggtatggctattggtgctgtattaacaagagaagatcccagagatgctttagttcttcgtaaaggtttaactggtctttctctagaaacattaccagaaaatagtattataggcacatctagcttaagaagaactgctcaattagcaaaaaagtatccccatctgatagtagaaaacataagagggaatcttaatactagactaaaaaagttagatgacttggagcattatcaagctataatattagctgctgctggactcaaacggataggttgggaagagagaatatcaaaaattttaatagaagatgacttactgtatgcagttggccaaggagcactagctgtagagtgtagagctgataatgaagaaatcattaacctacttcaaccactgtatgacttagaaacagcattacaagttgcagcagaaaggagttttttaaaaaccctaggtggcggatgtagtgctcctgtagctgtggtctcaaaccttaaggtggttaaagagaacgagctggatttatacctaaagggtgctgtttggtccctagatggcaaggaagaagtagtgggtagtgacagtataagtattggagtgaaaaaagatttgcggtgtgcgcagtgtccatatagaactattaaagtaaaagatatagaaaacttggaatgtattaaatgtcctgttaatagtggagaaccttcatcaaaaaacctaaactggatgacattccgactgaattattaaaaatgatccacatgacaagtgcccaattcagttacctgtaggttcggactttatgggtaaatgtccctatctagaaaacaaactagcaacgtcggaaggttttgaaccaactgaagtggaatacgcaaagtgtccatttctccaaggagaaattatgaaatattccgaaaataatgctttggaacaatcgacttctgatgatgataagaatttattttgtgggttggtcattcacaaagatgctacttatgagggaatgttaacagcgaaaaagttaggagaaaagttagccaataatttaatagcaaaaggagcaatggaagttatgtctaaagctcaagcaattatacacaatcaacagtcagttccaccagtaacttccagttagttgttttgtttctaatataatttatagtgtgctacacaaagtaagcggaatacttttttgaggtgcggtaattgtaccgaggaaaatgcttatctgcatagctaatttctcaaaaaaaaagaacggtccactaattttgtggagcactgtaggtaggaactaaacgttgtttttttattggctgggtataattattttaagttttaaaatgttttttgaaatataaacaatagtattcaatttattaatacgacaaaaccatagcaactaaatcttgaaactatttctttgatatagttttgaggtttacaggatagtatatcaacgacagttctcttgtataataaataccattttatactatatataatttttttagaagtaaataaaattctgtttgggtcaaatggacgcgaacaaaacagcagggttaaaatcaaaatgggcttggaaaatttttaagagattgtgtataggtgtggattttggaaagagctatgaccttgaaaatgtcacataaacttgtgtactaaatcggaataattcatagctcttgttaaaatccaacaccttaataatataactaaatattttcgattctaaaatattgtaaaagactaaagaatctgacatttttttcatttttcaattgtgacattttcaaggtcatcgctcttcccaaaatccattacctatattatatattattcactgttttccatagatctcagtctatatagctc

SEQ ID NO: 4769 - DNA, 528 bp, Diabrotica virgifera
ttgatatgtgatggttaaatcttaggttttggacaatgcagagctttttacgaagaaagcttttttccgtaaaagtgaataatgaaaagttttccatgtggatgcaacttacagggacctattgtataataaataccattttatactatatataatttttttagaagtaaataaaattctgtttgggtcaaatggacgcgaacaaaacagcagggttaaaatcaaaatgggcttggaaaatttttaagagattgtgtataggtgtggattttggaaagagctatgaccttgaaaatgtcacataaacttgtgtactaaatcggaataattcatagctcttgttaaaatccaacaccttaataatataactaaatattttcgattctaaaatattgtaaaagactaaagaatctgacatttttttcatttttcaattgtgacattttcaaggtcatcgctcttcccaaaatccattacctatattatatattattcactgttttccatagatctcagtctatatagctc

SEQ ID NO: 4770 - DNA, 1523 bp, Diabrotica virgifera
  SmartBlast Evalue=9E-95; Info=Canalicular multispecific organic anion transporter 2 n=1 Tax=Culex quinquefasciatus RepID=B0WXD5_ CULQU
gagctaggaaaagggtttgaatggtggctgtgatgaaaagtagaacagcgtagaggtaacccttccacatttcttggttgaatcgagtgtaggaaataaggaaacctaaaatctgggggctcacaaaagtgagcagatcttgtatcaacttcaacagcgctccaaagaaatagataggtccgaaacatttgaacagtgccggtaagatggaggcttgtttcttcttcttgttattaacgaaatcgacgctggccgaatctgatttaaatttggcatgggcaacttgtgtgggggaggtgctttcggctttttttaaagtttgactccaatatttttcaaaaacgggtaccaactccctcgaactatcttcgacattgatatcccacaggtctttggtttctaaaggttttctgaaacctttccaagccagcgggtcgaaccatgcgaagagtagacgtgataagaagctggcactctcttctggtgacggattctgtgattgtggatacttcctttccaaaggtgccttgtccgcgaaacagttaagaagaaacatcaacacgaccagaggaaaatatatcaggtagctggtgtaaaaatagtaataatcgggcaatatctcgttcctttggcttcttctgatttcggtcctgaactgaggaatggcacaaaggacgacgaagaaccagaacaagaataacagtccggacgtttgtagaccgtgctttctattgtagaaaataaaaactccggtaagggcaaatgttagtattttgatcaacggcgagtaaatatccacatcattcacttcgctgcctctgttacctgccgttttgaatgagtttactatatcactaattgttaaaactattagagtggctgttattgctaattttgataaatttaaccagttccatggtatattgcgtcgtttgctgttgaatatgtaaaatacttctaggccggcgaagacccatagaaaaatacacggtatccatactagtacagttttctcgaaacacggtgtgaactctgggtcgtttgtgttccatgttaggtttgtgtcccaaaaaggagatccacaaaatgaactcaacgctgcataagcttcttcttcaatagttgcattttgttgtgaggagttgctagttaattttggtaattcggttacagttgtcgggagggtggttaattctgttaagtttgccatattttaaaatacaagggtacagatagctgcagttaaatattccctttttaatatcatcaatagaatgcaatttcaacaaacaccttgaaaaccatccacaatgcacatttacttgaacactttatgtaacattaatttaataaaagcgaaacaccgcttgattaactgtaaatggaacagcgagagatcgtaataattttattcacagcatttcagtaaactgtaatttaaaactgtaaaacctcgcgcacgaagtattttgtattcctcgaatctcaccgaatcgccgacctgaccgaccttacctcactcc

SEQ ID NO: 4771 - DNA, 1415 bp, Diabrotica virgifera
  SmartBlast Evalue=8E-95; Info=Canalicular multispecific organic anion transporter 2 n=1 Tax=Culex quinquefasciatus RepID=B0WXD5_ CULQU
gagctaggaaaagggtttgaatggtggctgtgatgaaaagtagaacagcgtagaggtaacccttccacatttcttggttgaatcgagtgtaggaaataaggaaacctaaaatctgggggctcacaaaagtgagcagatcttgtatcaacttcaacagcgctccaaagaaatagataggtccgaaacatttgaacagtgccggtaagatggaggcttgtttcttcttcttgttattaacgaaatcgacgctggccgaatctgatttaaatttggcatgggcaacttgtgtgggggaggtgctttcggctttttttaaagtttgactccaatatttttcaaaaacgggtaccaactccctcgaactatcttcgacattgatatcccacaggtctttggtttctaaaggttttctgaaacctttccaagccagcgggtcgaaccatgcgaagagtagacgtgataagaagctggcactctcttctggtgacggattctgtgattgtggatacttcctttccaaaggtgccttgtccgcgaaacagttaagaagaaacatcaacacgaccagaggaaaatatatcaggtagctggtgtaaaaatagtaataatcgggcaatatctcgttcctttggcttcttctgatttcggtcctgaactgaggaatggcacaaaggacgacgaagaaccagaacaagaataacagtccggacgtttgtagaccgtgctttctattgtagaaaataaaaactccggtaagggcaaatgttagtattttgatcaacggcgagtaaatatccacatcattcacttcgctgcctctgttacctgccgttttgaatgagtttactatatcactaattgttaaaactattagagtggctgttattgctaattttgataaatttaaccagttccatggtatattgcgtcgtttgctgttgaatatgtaaaatacttctaggccggcgaagacccatagaaaaatacacggtatccatactagtacagttttctcgaaacacggtgtgaactctgggtcgtttgtgttccatgttaggtttgtgtcccaaaaaggagatccacaaaatgaactcaacgctgcataagcttcttcttcaatagttgcattttgttgtgaggagttgctagttaattttggtaattcggttacagttgtcgggagggtggttaattctgttaagtttgccatattttaaaatacaagggtacagatagctgcagttaaatattctgtattaaaagtaaggaaacttatcaagttcatatcaaaactcactgcactaacacggttacatatttattatccacaaaaatatctacaactcacgactgttttaaataacaactgagatgcagcaggaatgaattggcaatggcaatgatcgcgagagtac

SEQ ID NO: 4772 - DNA, 1567 bp, Diabrotica virgifera
  SmartBlast Evalue=2E-46; Info=Tetraspanin family integral membrane protein n=1 Tax=Glossina morsitans morsitans RepID= D3TNV1_GLOMM
cttattgtttcgtttattgcaggaattattagttaatggttttaaaagttgacaagtgcggacatcaggtagatttttaaacgaaagtaaaagtgatactgctaaaccagtttattaacatttaaaaaaatatatcaaaatgaatctcagttgcggttcaaggactataaaatacctaatttttactttcaatttttttttcgtgataactggtataattttaattgcagttggagctagtatacatacctactatacaaaatatgattttttccttaacagcgaatatttttcattaccaaatatgttaattgctactggaacatttatctttcttatatgctttttgggatgctacggagcaattaagaacagttggatcatgctaatggcattttcattactgttgggtattatattcatttttgaattttccgctggaattgctggttacgtattaagagacaaaacagaaaaatatttgacagattcgctaaccacagcgatggataaatataacagttcgtcatcaactgctaccatgtgggatctcgttcaaacaaccttcacatgctgtggagttaacagttataaagactgggagccagttatgaaaaataccgatttacccatatcttgctgtcctacgaaggcgggtacatctggttcattctattgcaacgctgttactcctactattagtacatcatcttctgagacaactagtagtaccccttctaccaattctacccctactactactatcaaaaccacaccctctaccacttctagtactgttgtcaccaacgaaatgagtgtaccaactccatcaactacttctgtacctactgcttctaccgcaaaaccctcctctattactcctactgttcaaagtacaactaccaatgagactagcgcacaacatcccaatccaacttcatctagaagaaaacgacgagatgtttcacaaccagccaccaccacatctccctacaatattggatgtgagacggcatttggaaaatgggttaaagctcatgctgtagacatcggagcagtgtgtttcacattagcagtgttacaactcatcggaattggattctcctgtcatttgtccaaacaactgaagaattcatattatagtacataaagtagttatcaaatcactaattatgttattttctaagaattattgttatttttgtaattttttttccgtatttttatttttaagtatagatattttatttcaatatttcaagaggaacgaataaaacagattattttgatgtaccgaatgtaagatttttgattttgtacttaaattttttggtaaagaaaaatcataattttggtattaaaaattgaagcacaattaaatttttcacaatatttagtgttgatcctgtaattggcacttatttttaattagtccactttagaataagttcaataattgttaaaatatattgtaaagtatttaaaaataaaagttggaaagaaatgtataccagaacgttattgttatgaattgcagtattttttaaataaataaccatacatggtg

SEQ ID NO: 4773 - DNA, 1375 bp, Diabrotica virgifera
  SmartBlast Evalue=3E-55; Info=Tetraspanin family integral membrane protein n=1 Tax=Glossina morsitans morsitans RepID= D3TNV1_GLOMM
cttattgtttcgtttattgcaggaattattagttaatggttttaaaagttgacaagtgcggacatcaggtagatttttaaacgaaagtaaaagtgatactgctaaaccagtttattaacatttaaaaaaatatatcaaaatgaatctcagttgcggttcaaggactataaaatacctaatttttactttcaatttttttttcgtgataactggtataattttaattgcagttggagctagtatacatacctactatacaaaatatgattttttccttaacagcgaatatttttcattaccaaatatgttaattgctactggaacatttatctttcttatatgctttttgggatgctacggagcaattaagaacagttggatcatgctaatggcattttcattactgttgggtattatattcatttttgaattttccgctggaattgctggttacgtattaagagacaaaacagaaaaatatttgacagattcgctaaccacagcgatggataaatataacagttcgtcatcaactgctaccatgtgggatctcgttcaaacaaccttcacatgctgtggagttaacagttataaagactgggagccagttatgaaaaataccgatttacccatatcttgctgtcctacgaaggcgggtacatctggttcattctattgcaacgctgttactcctactattagtacaactaccaatgagactagcgcacaacatcccaatccaacttcatctagaagaaaacgacgagatgtttcacaaccagccaccaccacatctccctacaatattggatgtgagacggcatttggaaaatgggttaaagctcatgctgtagacatcggagcagtgtgtttcacattagcagtgttacaactcatcggaattggattctcctgtcatttgtccaaacaactgaagaattcatattatagtacataaagtagttatcaaatcactaattatgttattttctaagaattattgttatttttgtaattttttttccgtatttttatttttaagtatagatattttatttcaatatttcaagaggaacgaataaaacagattattttgatgtaccgaatgtaagatttttgattttgtacttaaattttttggtaaagaaaaatcataattttggtattaaaaattgaagcacaattaaatttttcacaatatttagtgttgatcctgtaattggcacttatttttaattagtccactttagaataagttcaataattgttaaaatatattgtaaagtatttaaaaataaaagttggaaagaaatgtataccagaacgttattgttatgaattgcagtattttttaaataaataaccatacatggtg

SEQ ID NO: 4774 - DNA, 1694 bp, Diabrotica virgifera
  SmartBlast Evalue=1E-111; Info=Connector enhancer of kinase suppressor of ras 3 n=1 Tax=Harpegnathos saltator RepID=E2B870_ 9HYME
gtacgaaatattttcattgttcaaactcgccaaactagcaacactaatacttttctcggtatccaaattggaaggacccaacaacttctcgtctttttgtttcttatcgagttcctcctcttgttttttctcctttttatcgtcgaccttcttctcctcctggaagttcactttctttttgtgcgatttggcgggattcttccggtgcgccgaactgttggtgtgtgccaaaccgatgactgtggtcggtcgaggagttaagtctaagcctacgttgcaggaagcacttttgtctctcaggaacttggaatcttcttcgaacttggaactgtcaatgttgtaagtactggaatggctattgttcgtgcgcgatttgatgaaatcccaatactgttcaatggacggatgagctcttttattcgtaggtgtaccacccgatatggtatttcgtcgctgtaaaataggcctaggcttcaaaggatacatacgacaactggaatccaatggactgtctggaggttcgctatcactactgcttaattctgtttcagcatcggcaacttcagcttcatcttcacttttggaaatagtaatgggtggtaaattgataataggaagcagcctgggagacgggatgttttcgttccatctcgtagaccagttttggccgtttcttttcctacttggcaagcggtatggtttcatatatatctgaccatagactttcgtatgtcttggtcgtttcttcagcgttaacactatctccggtggcgattcctgtagtagcatcatcactttcttcctttgccagccgactacagtctggtaattcacctgcactatttcgtcaccctcttcaatttttgaactgccatgtgctggggaaccatgtttgatttccgctatttgatgtatcgactggtaattcggcaaaataaaaaatcctagttcttgttctttcttttttaatgtagctaaatctaaggaagcaggttgtaatatcatcggatcaacgatttcctgtataatgtggtctgcaattttagctagtttctcacaattttttctaatagtacatacaggcttttcagaaaatattcctctatgagcgctcgtagccatttcgaatcctaattgcaaaagatttgttttattatcgatataatccttatcgcctgcaaatggcgacctgtctagccagtatgctaaaggttttattgtagtgatgatattatggacatctgacataacttgagtatgcagttcagtacagttgtcatctataagcaaaagctccttatataaggaatttgctgcacaagacagcctaagagctagtgtttgtaaattctctttgtctaattcaaagtgaaaatttcttaaatgttctacagcctccaagataatctcttggtgtcctaacatcttaactcctaaatgttccaaatcatcagctctcaagttcagtaactgatgaccagtcacaccattgttcaagaatgaagaattgtattgtaaaattacgctatctaaacctttcagccaatctgtgacttggtccacagaccagtcttttacgttaacataagccattttaaaaaataaaaacttaaacactacactacttgtatttatttaaatatttcacattttgctcttgataaataattattgttattactgctagagaattg

SEQ ID NO: 4775 - DNA, 1231 bp, Diabrotica virgifera
  SmartBlast Evalue=3E-46; Info=Connector enhancer of kinase suppressor of ras 3 n=1 Tax=Harpegnathos saltator RepID=E2B870_ 9HYME
gtacgaaatattttcattgttcaaactcgccaaactagcaacactaatacttttctcggtatccaaattggaaggacccaacaacttctcgtctttttgtttcttatcgagttcctcctcttgttttttctcctttttatcgtcgaccttcttctcctcctggaagttcactttctttttgtgcgatttggcgggattcttccggtgcgccgaactgttggtgtgtgccaaaccgatgactgtggtcggtcgaggagttaagtctaagcctacgttgcaggaagcacttttgtctctcaggaacttggaatcttcttcgaacttggaactgtcaatgttgtaagtactggaatggctattgttcgtgcgcgatttgatgaaatcccaatactgttcaatggacggatgagctcttttattcgtaggtgtaccacccgatatggtatttcgtcgctgtaaaataggcctaggcttcaaaggatacatacgacaactggaatccaatggactgtctggaggttcgctatcactactgcttaattctgtttcagcatcggcaacttcagcttcatcttcacttttggaaatagtaatgggtggtaaattgataataggaagcagcctgggagacgggatgttttcgttccatctcgtagaccagttttggccgtttcttttcctacttggcaagcggtatggtttcatatatatctgaccatagactttcgtatgtcttggtcgtttcttcagcgttaacactatctccggtggcgattcctgtagtagcatcatcactttcttcctttgccagccgactacagtctggtaattcacctgcactatttcgtcaccctcttcaatttttgaactgccatgtgctggggaaccatgtttgatttccgctatttgatgtatcgactggtaattcggcaaaataaaaaatcctagttcttgttctttcttttttaatgtagctaaatctaaggaagcaggttgtaatatcatcggatcaacgatttcctgaaacagatagtttcgagtacctcttattaaagaatttataaaatgatttgataatcttaattctatcataaaaagggtgcggctatatttggtaacattttgataatatagtttatttaaagatccttaaatacttaaaccaagttataataaggttatttcaaagttaagcagctacgggagaataacgacacatctttactttgcg

SEQ ID NO: 4776 - DNA, 1467 bp, Diabrotica virgifera
aaaattaaaaaatatttctaaaaagactgttatatgctattgacaatttattctcaacatttatttttctcccataccgttatttcatcagaaaaacaaacaaaatcttgaatgttttgcacttgaatgttatttcaataccaataccggtaaaatctacaattttattttaaataagatctatgggagatattgaaaataatttataaatagcataaaacagtcttagagaatcttttaaaacggatggtaagcaatacagcaagtaattgtgtagacaatcaatcgaatagtaagaaccaaatattttttcgtcaatgttacaaagttttacaatataaatattataaaacaaaacagttcatattaaagtaatgaaaaatattttatactattccctagatgttatcaattgtcattatcactttaatatcacagaagtacgtacacttgattttctctatacttccacttcatttctacttggcctgtcaacatttttggagatatgtttttgaattgttctcaaatttccctgaatatttctaggtctaagtgctcgtatatactaatgtgatattagttacacatattcaacatgttataaacgtttatttaaaaaagtttattcttatattgactcgaatatattacaatataataaggccacttatgtaagctcacagcgaatcaatcatcatgtccgtgaataccacccatcatagtcattcatctgatgctagtcaaacaggcaagaggagctgttgcttttaaagcaataacttaagcttgtcacgaacggggagctatactataatatatatgctagctaaatagttaaatataatttatattatagtaagtacacccacaaacgatatcagatatatttcagaatatgtaatatatgtttagtattttgtaaacagaaatcagtaaacaactaattaagcaatgccatagctctgcgttttcgtattcgtctagaacttacaatacctacgtcataaatcataaacaaaccgcactttggtttggtagactgaaaagtgagaagtatagaggggaacgaaatatgaagagtggacatatatttaacgggccaagtaacaaaaatcaatatttctgctttttccattataagggtctatgcaacaaggccgttaacctgtattacgtgcaaagtgacagttgcattggaaacagctctaaataaactcaacagatagcatccgccgctaagtacagagttccgtttcctgataaaaactcatttttctcgattgtgtatttatttcaccgttatatatctccactcttcatatagtccgtcagctgtaacctttcccatgcggtacgacccattttcaatcaaaccaagtcaaaacataaattgaaacgaacgtcgatgtgtatattatacattttgtatactgtatactatatactacacacatcggacgtaac

SEQ ID NO: 4777 - DNA, 1459 bp, Diabrotica virgifera
aaaattaaaaaatatttctaaaaagactgttatatgctattgacaatttattctcaacatttatttttctcccataccgttatttcatcagaaaaacaaacaaaatcttgaatgttttgcacttgaatgttatttcaataccaataccggtaaaatctacaattttattttaaataagatctatgggagatattgaaaataatttataaatagcataaaacagtcttagagaatcttttaaaacggatggtaagcaatacagcaagtaattgtgtagacaatcaatcgaatagtaagaaccaaatattttttcgtcaatgttacaaagttttacaatataaatattataaaacaaaacagttcatattaaagtaatgaaaaatattttatactattccctagatgttatcaattgtcattatcactttaatatcacagaagtacgtacacttgattttctctatacttccacttcatttctacttggcctgtcaacatttttggagatatgtttttgaattgttctcaaatttccctgaatatttctaggtctaagtgctcgtatatactaatgtgatattagttacacatattcaacatgttataaacgtttatttaaaaaagtttattcttatattgactcgaatatattacaatataataaggccacttatgtaagctcacagcgaatcaatcatcatgtccgtgaataccacccatcatagtcattcatctgatgctagtcaaacaggcaagaggagctgttgcttttaaagcaataacttaagcttgtcacgaacggggagctatactataatatatatgctagctaaatagttaaatataatttatattatagtaagtacacccacaaacgatatcagatatatttcagaatatgtaatatatgtttagtattttgtaaacagaaatcagtaaacaactaattaagcaatgccatagctctgcgttttcgtattcgtctagaacttacaatacctacgtcataaatcataaacaaaccgcactttggtttggtagactgaaaagtgagaagtatagaggggaacgaaatatgaagagtggacatatatttaacgggccaagtaacaaaaatcaatatttctgctttttccattataagggtctatgcaacaaggccgttaacctgtattacgtgcaaagtgacagttgcattggaaacagctctaaataaactcaacagatagcatccgccgctaagtacagagttccgtttcctgataaaaactcatttttctcgattgtgtatttatttcaccgttatatatctccactcttcatatagtccgtcagctgtaacttttcccatgcggcacgactcaccctcaatcaaactaagtcaaaacataaattgaaacgaacgtcgatgtgtatattatacattttgtatactgtatactatatactacacacatcg

SEQ ID NO: 4778 - DNA, 1512 bp, Diabrotica virgifera
ctacaaacagtattggaataatcatatactcatagttatttttgtgttaagattttgtagcttgcttattaccttattaatcattaaatcttcttatcagataataaaatccacacatgaatgtttgcacaatcaaacattgttctgctctcgcgtcgttatcactttagaccatcgcgagaaagtaaaaaagttcgttctagtgaaaaagtttaggccttttcgacgttatgtagtttgtaaacgtacaaatttcaaattgacaaatggccctaaacgactttgttaacacgactataaaatgtctcactctgccggctgctatcatcactgggattcaagcagcaatatggttcacgttatcattattagcaatattttgctataataatatcattggaagatcggattcattagaaaaaacaagctatggatatatcatttatacgtattatctacaacccactgatgaaatacaagaacagtatattgtacatcctaaagcacttaacatatttatgtacgtctatttggtgctcagcttcatatggttggtgatatctatatctttggcatgggtgacgataaaaaagaaatggaaggctgtatcgaaagtattgatatgttgggctataactaccataattatagcaattctggacataactcttatgagtttactggcgtcggatatacagaaagcaagaagtaataatcaatctttaataagaggacagtcctatgaaatgagacagactgaatatacagcgttaggaatcgtcatgtctatagttgcaagaggatacatattatggatattgaatgtagtttttgccatcgttttaatggtttctgtttgtcgacagagacggaagccccgtcgatcgttactttcacctataaatgcctatcaatcagggccagcgccatttagtctgtacgacaacgtacaaatagacaacaccttcgaaaacagaggcttcgactcagaggaaagcctatttagccctccatcaagtgaactccgaagaccttcaaatggtctaaatccactgagcaacagcgcaatgaatccattacacccctacgaatacggaagacctccgtcagacgaaagcaggctggccaagattggtaaggcccaagcacctggaagaagatctccacctcgcaacgttccttcacctactgtaccaaatctgtcagatatgtatccctatggcatgccgccttatattcctgaaccagattacacgccaccaagcagtcccaaattgcaaccgaaatcagtattgagacccaaaacgaaatacgaactttaaatcgaagaaatgcgaagaaactacgagaagaattacgctttaaatcgaaatcaaaatcctgttggattttacattgagagtatcgtaactatgtatcattaacaaattatttattccctctacaatgaaatattgtaaatgtagaataaatatatcttgtagatttttcttattatataattagacaagt

SEQ ID NO: 4779 - DNA, 1412 bp, Diabrotica virgifera
  SmartBlast Evalue=8E-18; Info=Hemolysin-type calcium-binding region protein n=1 Tax=Lyngbya sp. PCC 8106 RepID=A0YRU7_LYNSP
agattatccgtccccattcacaatagcaactgaaccgtccccgttgacaatcacaactgaaccatctccatttactataacagctgaaccgtcgccatttactataacagctgaatcgtccccagtcacaataacaactgaaccgtccccgttgacaataacaacagaaccctcaccatttactataacagctgaaccgtcgccatttacaataacaactgaaccgtccccgttgacaataacaacagaaccgtctccagtcacaataacaactgatccgtctccattcaaaataacgactttaaccacaattaaattatctccttcaagttcaattacacatatacctcctgtacccattcgaagtgattctactagtaccactaaatcatacagtattgataacgagattgaagacagttctctatcgtcacgtgatgttaataggccgttatttgatgttcacgatttgggtccgttgttagataactcggcttttgtaaatactaagcttaaagcagacaatggtgaaaatagtttcttatctgctcctgtacatactaacatcaagactaacattaatcaactcaagtctgatcatctaacaaatgctttatctaaatcaattgatccaacgtcctatgaaatgagacagactgaatatacagcgttaggaatcgtcatgtctatagttgcaagaggatacatattatggatattgaatgtagtttttgccatcgttttaatggtttctgtttgtcgacagagacggaagccccgtcgatcgttactttcacctataaatgcctatcaatcagggccagcgccatttagtctgtacgacaacgtacaaatagacaacaccttcgaaaacagaggcttcgactcagaggaaagcctatttagccctccatcaagtgaactccgaagaccttcaaatggtctaaatccactgagcaacagcgcaatgaatccattacacccctacgaatacggaagacctccgtcagacgaaagcaggctggccaagattggtaaggcccaagcacctggaagaagatctccacctcgcaacgttccttcacctactgtaccaaatctgtcagatatgtatccctatggcatgccgccttatattcctgaaccagattacacgccaccaagcagtcccaaattgcaaccgaaatcagtattgagacccaaaacgaaatacgaactttaaatcgaagaaatgcgaagaaactacgagaagaattacgctttaaatcgaaatcaaaatcctgttggattttacattgagagtatcgtaactatgtatcattaacaaattatttattccctctacaatgaaatattgtaaatgtagaataaatatatcttgtagatttttcttattatataattagacaagt

SEQ ID NO: 4780 - DNA, 1475 bp, Diabrotica virgifera
  SmartBlast Evalue=1E-107; Info=Arf gtpase-activating protein n= 1 Tax=Aedes aegypti RepID=Q16RU5_AEDAE
aattcatcatctccccacttatcattccacgtattttccacctttttttgtgtttctttttccttgggttttctttcttttttgttacttttactggatctatcttctgttggcgatgttatactatttgaggaataagtttttaaatcggattggtaactaccgtgatcttcattttgataaccactccaatctccttcccagttttgattgggagatttaggacttgatgctttcgaaccttgctgactattacaactccaatcctcctctctaacatatccgtttccttgactatacaatgatgatttttcactcggagaataattgtccccagctacttcaccatatcctccgccactgttgttctcattgcctaaattgctcacttctttccacccccttttgcccagttcggacatcttattggttaaactagtaacttgacaaccaacttcttctaatagtgttccttctctaaccttttcccctacatgtgaactaacttcaactaccttctgacttgctaatcctccatatttaacggcgttttcggacgctttgctcgctagttttgttgctgaagaggacaagaaggaccaaccattagctagagatgatatggctgaatctacaaattcttgagattggcttctaggtggaggttccattgtatatccaaatccgctgtatttccctccttggctcggtggaacgtcatttggtctacttgcattctccatttgtttctttgagaaaaatgcttccttttggtttttaaactctggtgagttcatattctgataaccaccctcatatgtatcataagacgatgattggtaagtactggcagaagaagtgtgattggtttttgagctagaatgttgtaatgagttgcctccaattaaattacttgtgtaattttgagcgggagatttcctttcatcccatggttttccttgagctaaagtggaaatcttatccctgtaaagagctgcagctttagaattgtatttttgttgtagggtcatatcatcgtgccagtctggttgtgcttcaaaaaatatccgagcatttctgttacctcctaatttcattttttctagttctatatccttccatttatccatagtaacagatcgtacaaatgataaatggactcctaacccacgatgtttcccagaacattctaaacaaatccatattccatatgtgactgacacccattgtggattaagtgttccacactcaaagcatttatcgttttcattactgggttttaattcttgtaaaacacgtcttgttcttggacttgccattatattgaaactatttgttggaatatttataaataaaacttcataaatgtttaataactatcctaatataatacaaatgtaaatatgttacaaaatatggatctacttgatatccgagaggaaattatttcctacgtgtcaaaagatgttaacttg

SEQ ID NO: 4781 - DNA, 1442 bp, Diabrotica virgifera
  SmartBlast Evalue=1E-106; Info="ADP-ribosylation factor GTPase- activating protein, putative n=1 Tax=Pediculus humanus corporis RepID=E0W1T7_PEDHC"
aattcatcatctccccacttatcattccacgtattttccacctttttttgtgtttctttttccttgggttttctttcttttttgttacttttactggatctatcttctgttggcgatgttatactatttgaggaataagtttttaaatcggattggtaactaccgtgatcttcattttgataaccactccaatctccttcccagttttgattgggagatttaggacttgatgctttcgaaccttgctgactattacaactccaatcctcctctctaacatatccgtttccttgactatacaatgatgatttttcactcggagaataattgtccccagctacttcaccatatcctccgccactgttgttctcattgcctaaattgctcacttctttccacccccttttgcccagttcggacatcttattggttaaactagtaacttgacaaccaacttcttctaatagtgttccttctctaaccttctgacttgctaatcctccatatttaacggcgttttcggacgctttgctcgctagttttgttgctgaagaggacaagaaggaccaaccattagctagagatgatatggctgaatctacaaattcttgagattggcttctaggtggaggttccattgtatatccaaatccgctgtatttccctccttggctcggtggaacgtcatttggtctacttgcattctccatttgtttctttgagaaaaatgcttccttttggtttttaaactctggtgagttcatattctgataaccaccctcatatgtatcataagacgatgattggtaagtactggcagaagaagtgtgattggtttttgagctagaatgttgtaatgagttgcctccaattaaattacttgtgtaattttgagcgggagatttcctttcatcccatggttttccttgagctaaagtggaaatcttatccctgtaaagagctgcagctttagaattgtatttttgttgtagggtcatatcatcgtgccagtctggttgtgcttcaaaaaatatccgagcatttctgttacctcctaatttcattttttctagttctatatccttccatttatccatagtaacagatcgtacaaatgataaatggactcctaacccacgatgtttcccagaacattctaaacaaatccatattccatatgtgactgacacccattgtggattaagtgttccacactcaaagcatttatcgttttcattactgggttttaattcttgtaaaacacgtcttgttcttggacttgccattatattgaaactatttgttggaatatttataaataaaacttcataaatgtttaataactatcctaatataatacaaatgtaaatatgttacaaaatatggatctacttgatatccgagaggaaattatttcctacgtgtcaaaagatgttaacttg

SEQ ID NO: 4782 - DNA, 1471 bp, Diabrotica virgifera
  SmartBlast Evalue=1E-132; Info=Acyl-CoA oxidase n=1 Tax=Aedes aegypti RepID=Q17PF0_AEDAE
aagcccaagtcattaatggttttgcgcttgacacgagagcatgcatttcagataccatttcacttaagttttctaattcgattgaggttgcagatttttccactacagttaaataagtctctgtaaagccgctgacaaatactcttaacacagctgctgctgccatgtatgggaatagtctccattgatgtaagggatattcaataataggtaactcgttcatattgttattgccttccccattcggagcaaactgtttcctaacggccgcataccttaatgctatcgtaatagcacaaatgagattattcgagctttcttgcatgattcccactcgtcccatggacaaattctctaaagctgctcccagaatttttccaggatcagtgaacgagctttcgtagtctccactaggcgtcacgtctgctgttctgttaagtaagttttctctgggtatcctgaagttgttgaacattataaatccattatcaataccgttcaatccaatcttttcacccatatctcctactgtaatacccggatacggactcattgttttaggatttctaattggaactataaatgcatgtagaccatggcattcccctttggtatacagttgggcaaaaagtagtgcgtgcgtgcattgtttacctaaatttcctacccagcactttgcagcttcaaaatctggcgtgtttattacgaattcttgattttgtgggtcgtatgtggcagttgttcgcatctgtttcgtattacttccatgtgagatttctgttagcgccagacatgacaacatcttattacctgcataagcatatttgaaatgtctttctgttcctaatgtgactattgtattagtaaatagaccttggcctagggctagtttgatagagacatctggaaacgttactgctattgcctgattgcacgccaattgtattcgagtcctttttttatacggtactttgtttatatctgggtttacaaaattataatctatatatttcttcaactgcaacgctgccatcctttgcttttcgtctgtacttatttcaacccgtggtctttggaatagtggatctgcttctagcgtcttccatacttgaatttgtacttttaacatttctgcatcttcaaagaataacttcaactttctccaatcgaatttggatagtcttctataaggggtaagtggtcctacgggcaaatctctgaataccaatttgttatcttcgacatccattgtttataaagttttctaagtacactaaattgcgtaagtgcgattccctaagttccagcgactttttcagttttagttttttagaaataagagcatttacgagaaataagacacctcaagttcttttggaatcactcacttagcgttttcacttacattacaactaatgcgaaaacttcattatgtacacttccgtgtaaaaatccatgttctaaagctaac

SEQ ID NO: 4783 - DNA, 1426 bp, Diabrotica virgifera
  SmartBlast Evalue=1E-132; Info=Acyl-CoA oxidase n=1 Tax=Aedes aegypti RepID=Q17PF0_AEDAE
aagcccaagtcattaatggttttgcgcttgacacgagagcatgcatttcagataccatttcacttaagttttctaattcgattgaggttgcagatttttccactacagttaaataagtctctgtaaagccgctgacaaatactcttaacacagctgctgctgccatgtatgggaatagtctccattgatgtaagggatattcaataataggtaactcgttcatattgttattgccttccccattcggagcaaactgtttcctaacggccgcataccttaatgctatcgtaatagcacaaatgagattattcgagctttcttgcatgattcccactcgtcccatggacaaattctctaaagctgctcccagaatttttccaggatcagtgaacgagctttcgtagtctccactaggcgtcacgtctgctgttctgttaagtaagttttctctgggtatcctgaagttgttgaacattataaatccattatcaataccgttcaatccaatcttttcacccatatctcctactgtaatacccggatacggactcattgttttaggatttctaattggaactataaatgcatgtagaccatggcattcccctttggtatacagttgggcaaaaagtagtgcgtgcgtgcattgtttacctaaatttcctacccagcactttgcagcttcaaaatctggcgtgtttattacgaattcttgattttgtgggtcgtatgtggcagttgttcgcatctgtttcgtattacttccatgtgagatttctgttagcgccagacatgacaacatcttattacctgcataagcatatttgaaatgtctttctgttcctaatgtgactattgtattagtaaatagaccttggcctagggctagtttgatagagacatctggaaacgttactgctattgcctgattgcacgccaattgtattcgagtcctttttttatacggtactttgtttatatctgggtttacaaaattataatctatatatttcttcaactgcaacgctgccatcctttgcttttcgtctgtacttatttcaacccgtggtctttggaatagtggatctgcttctagcgtcttccatacttgaatttgtacttttaacatttctgcatcttcaaagaataacttcaactttctccaatcgaatttggatagtcttctataaggggtaagtggtcctacgggcaaatctctgaataccaatttgttatcttcgacatccattgtttataaagttttctgattcttcctttgcatgaatcactaaataccacgtgttgaagcgagacgctagataatgtaacttgttgtcttttaaattcacaaaaaaatcacaggttacttgtctcgaaattattaaattgggcgtttagcgggtaggtaggacacactacacgacgc

SEQ ID NO: 4784 - DNA, 1488 bp, Diabrotica virgifera
gagttactactaaaacgttaaaacaaaattgggcaaaacaaataaaattttaaatgtcgtagataacgttatcttcaaatgagtgttttaccgaatgatatacttaacatttaacattacgaaatttatacatatataatttacaaacaatttattatataggcttaggttattatatttacaatggaatttttacatattttggtaatattgctgtttggaacagctacaaaagcttacaaagaaaatctagtggatcctcatgagatggttatggacacaggccgtcatagaaagtatgttgatgaagaaatggtcctaaaaaggtctttcagtgaaggtgatctacacgaaaaacaagaatgttataaaccttcgttaaaagaagaaacaatggcaattatgtatttaaaaagaactattactcttcttctttcaagcagtagcttagagccgaacagtgctgatgaatacactggttcgtaccattatcagtcgaacagtgaggaacacgaattcttaaagagttttgtcaatagtaaagtgataagtgaagaacacatgagaagactggacacagtcttgagcaccgtattttctaagccaaaccaagatagtatgtttaagtttaatacatgtatttccagagaagacttggccgaaatatttaatacgaagtttttgatgggtctattcatagttataggttcaattgtatcatttgttttcctcaaaaataactatggattttggttcattattggatattttgtgatgattatgttaattgtcgattatgggaagaggtactatgatctttatgaggctgctgaagagcataatcttgccttaaaatatgattcagtgtgtgataccaccaaaatgacttggtcggaatattttaaatttagcttaagccaaaagaattgtgagaggaaaattgtaacaccgttagaagttggtctccatcaactgaagcatatcataattgtaccattggaagccgctggtgctggtatgggaaagtttggtgcacaattgtgggataagctgccgtttccttggaacattttgatgttcccactgatgctgttgttcgtccttagcctggtttttctgtacgttttggccgttaaaaacacaagcttcaaactgaaactgctccacatgttcaatctggaaatgggaggcgatagaaatgaagagaaccggattggaggcccgacattggataggtttttgcagactttaaatcacagaccattgatagaagttcaagaagtagatgaagaagaagaagaattacaagcagaagatacaataagtactccaccaaaggaagaaccacccaagaaattgatagagaataggactccccaaaaggtagaggaaaaacgtgtcagtgataattcttattctcgcaccaaagatgagaaaatacagaacttaattaagtggttgcagacatcagagccgtatgcagtggta

SEQ ID NO: 4785 - DNA, 1401 bp, Diabrotica virgifera
gagttactactaaaacgttaaaacaaaattgggcaaaacaaataaaattttaaatgtcgtagataacgttatcttcaaatgagtgttttaccgaatgatatacttaacatttaacattacgaaatttatacatatataatttacaaacaatttattatataggcttaggttattatatttacaatggaatttttacatattttggtaatattgctgtttggaacagctacaaaagcttacaaagaaaatctagtggatcctcatgagatggttatggacacaggccgtcatagaaagtatgttgatgaagaaatggtcctaaaaaggtctttcagtgaaggtgatctacacgaaaaacaagaatgttataaaccttcgttaaaagaagaaacaatggcaattatgtatttaaaaagaactattactcttcttctttcaagcagtagcttagagccgaacagtgctgatgaatacactggttcgtaccattatcagtcgaacagtgaggaacacgaattcttaaagagttttgtcaatagtaaagtgataagtgaagaacacatgagaagactggacacagtcttgagcaccgtattttctaagccaaaccaagatagtatgtttaagtttaatacatgtatttccagagaagacttggccgaaatatttaatacgaagtttttgatgggtctattcatagttataggttcaattgtatcatttgttttcctcaaaaataactatggattttggttcattattggatattttgtgatgattatgttaattgtcgattatgggaagaggtactatgatctttatgaggctgctgaagagcataatcttgccttaaaatatgattcagtgtgtgataccaccaaaatgacttggtcggaatattttaaatttagcttaagccaaaagaattgtgagaggaaaattgtaacaccgttagaagttggtctccatcaactgaagcatatcataattgtaccattggaagccgctggtgctggtatgggaaagtttggtgcacaattgtgggataagctgccgtttccttggaacattttgatgttcccactgatgctgttgttcgtccttagcctggtttttctgtacgttttggccgttaaaaacacaagcttcaaactgaaactgctccacatgttcaatctggaaatgggaggcgatagaaatgaagagaaccggattggaggcccgacattggataggtttttgcagactttaaatcacagaccattgatagaagttcaagaagtactccgccgaaagaaaatcccaagaaaattaaagagaagaggactcccaaaaagaaagaggaaaaatgcgtcagtgataattctcccaccaaagatgtaaagcaacgcactaaacgtg

SEQ ID NO: 4786 - DNA, 2303 bp, Diabrotica virgifera
  SmartBlast Evalue=0; Info=Muscle LIM protein n=1 Tax=Bombyx mori RepID=Q2F677_BOMMO
agtaaatcaaatgcctttttattaaaactttattaattacaactagacaaaaattttggtatagtcaatatatcagcggaaaacttaactaacattaatatggcaaaagcgcgaagctatcgatagaccaacaacgtggccgatgtagatatataaaaaaaatcccaggattcgttccctggtcgttcgtccaaaaattcaaccgatttgtatattcgccgaccatcttgctccaatccaaagtcttatttttagtaggtatttattgatttatttacaaaatgttacttagtgcgtatataaaaatggtcgaaacgaatataaaaatcggactttcgctggcatttggaacagatccatctacgtcgtacatcctttcttcaaaaaatggaataaaaattatcttcttcaaaaaatatgtcaaaaatatgcgctccaaagcataaatataattgcaaatcaactcgactttgaatacagtcttaaccaatattttaaaataacagaaatcatatacgttggaatgtttcaagacttctgtcttttagcacaaaaaggaattcactcttgggacacgatgttgacgatttttttttattttttttatattattttctgtttctgtccctgtttacaaacacgacccaaaatatacgatttctgtggaggacgaattgctgctagattgtcactgatcccttaggtggcattgattaagaaagtttgctgataaagtgcgcagatcaagccatagtgagggttccagcgcccataccaaaacctacacccctaggaccaaagttcctaccatagcaacctctacaataaatttctccattgggtccatcattaaggatggtagaatctaaagaacggttgcagtcagcacagctgaaacacctcttgtgccactgtccgtgcttactaatcatttgttcagcagcataaacagcatatccacaacgtctgcaacctttcccaggtgcagctttaggtccactgttgggccttggatcgtgaactgcgggagcagttccatcggcgcataccaaagttggagcatggccaaaaccaaatcctttgggtccgaacagttttccgtaacaggcgcggcaatggatttccttgtcgggaccgtcacaggcgagcaccgaatcgagtggtcggtgacattcggcgcagttgaaacatttcttgtgccacatcgttcctttagccagctgttgctcggcggcgaaaaccattcctccacatcttgggcaaccttggccaggaggagccttaatcgaagtcgtatctgggttgtagaaaggtcggctttgagaaatttcttcttcggtaaggccatcagtttgtaagaaaccggatccgcaagcgaaaccgtaaccgtggggtccccatttcttgccgtaacaggtcttacaatacacatctttgtctggaccgtcgcaagcgttgatagagtccaaggtcttggtacaatctctgcacttaaagcatttgcgatgccatgggcgtcccttggcgaggacctcttcagcagcaaagactacaccaccgcaacgagggcagccttggccaggcttggccttgatgctggtggtatcgatgagagttgtcttgggggcttgatcgctgacggcaaaacagtcgctctgaagagtgccacctccttgaccatatccgtaacctttaggtccaaatcgttttccgtaacaaactttacagtaaatatccttgtcaggaccttcagctacattgacggagtccaaacctttgttacagtcagcacatttgaagcaagttttgtggaaggctcttccacgggcaagcatttgctcggcagcatagacatagcctccgcatcggggacatccttcgccgtcaggagctttagcgatagctctgggcagcaaaggagcacggcttttgacaaagtcttcatcgcccttgaattgggctccatcgtccatacttaagcacccagctccaccaccgaatccgtagcctttaggtccgtatttacgtccatggcaatttttgcagtacaattcagcttcgtgttcagttacgttggtggagtcgagcattttattgcacataccgcatttgaagcaggatttgtggtatttgtatcctccagctactttttcttcagcggcgtatacggatttgccgcattttgggcattttgggttgtctgctggtttgaaaggcattttgatttagttgatggtcgttcttttcggaatcgagtaagtgtggtggataagggcttagtgtcctcactacaaccactattc

SEQ ID NO: 4787 - DNA, 589 bp, Diabrotica virgifera
  SmartBlast Evalue=9E-33; Info=Muscle LIM protein n=1 Tax= Epiblema scudderiana RepID=Q9U412_EPISC
ttttggtcttaaataagatttatttaattcaattattacaaaataaccgaattcttatttataacgtgtcatacgaaaatttataaattaaaactaagtctgtaatttaagatctaaaaatattacattagtgtatagtgggggatggaaaagggtagaactgacgaccgctgacagttggtgtggttttggccgccatcttcacattgattccttcttaaaattattgtgttcccttgaattgggctccatcgtccatacttaagcacccagctccaccaccgaatccgtagcctttaggtccgtatttacgtccatggcaatttttgcagtacaattcagcttcgtgttcagttacgttggtggagtcgagcattttattgcacataccgcatttgaagcaggatttgtggtatttgtatcctccagctactttttcttcagcggcgtatacggatttgccgcattttgggcattttgggttgtctgctggtttgaaaggcattttgatttagttgatggtcgttcttttcggaatcgagtaagtgtggtggataagggcttagtgtcctcactacaaccactattc

SEQ ID NO: 4788 - DNA, 1513 bp, Diabrotica virgifera
  SmartBlast Evalue=7E-55; Info="UDP-GlcNAc:betaGal beta-1,3-N- acetylglucosaminyltransferase 5 n=2 Tax=Formicidae RepID=E2B9U7_ 9HYME"
ctttaaaatcttttattatcgttataaagtaaatacattcttgggagcttcatgtgtggaaacatatttccaaacagttttcatcttcgttttgttcattattttaaatagaaatggtttaattgtaaggttagtaaatgattaataatagcattcaaactttcgactggtaactttaaagattcgatatctgtgtgagtataatctagatttttaaagagaataccagttacgaatgcatcgtccacccataaaaaggaatttgatgtttgtgcttctttatatagagtaaatatgacttctggtgtataaacaataacgtatccaagacagtactgtggatagacttcttctggatactcaccaaatgataccacccatttggagtcgtttctttctactttgctgtgagttctagtaacacagtatatggttggttcatcactggaaggacacaaatcgtaagtgaggaaatttttcatacttggccagttgatgaagacgtcatcatcggtttttaataaatatttcgcttgcggacaatgataaacaaagtatttaagaaccattacgtgcttgtaagttaggttcctgtaattgtctataaaattaccttgtacaatatcaccaaataacgtattttcctcttctaactttttttgttgttctggagaactcggatctcctatcataaacactatttgtttagtttcttctacttgtccccatgtatctcttattgtctgcctcttcttgaaatttgaaggtgcagaatgaactactataagcactaacacaggagcactttcctggcacacttgatttatcatagaaaaattaaagctgatgttcaatagacgattatagtcaccagttgatagcaggaaggtctttccatttaacaataattttgtggttaacgagtaagtgttgcgttgtaacagtgagccttgaaaacgcagaaaaatcattgtaaaaatgattaatcctattatactgagctttaacgttgcactaatcttaatcataataattgttggttaccacttataccttgttctccctacagggtatctcaaacttaacatacgaaaaacatgtcttttcttccacttggtataagtacaaaaaataatttgagtaaacctttgcctaagtgtgtaaataccaaagaaaaatcttaccactataatttagaatcaataaaatttgtaattttcttatatttttgcactaataattgtctatttctctaaatgaacataaaccacattatctgttaaaagccatatttttgcttgtcttgtacactcgacagtgcttcaaatatagagagaatttgccattaattttctcaacacagcggactgttagttgaagtcaaagctttcatcccttaaccaaaatagtcacaaattcttgaaatgttttataacaagagaattatttaaaattccctgtaaacagttcccggtaaaagaaacgtacgcgtatacttcacaccatatctaaa

SEQ ID NO: 4789 - DNA, 1379 bp, Diabrotica virgifera
  SmartBlast Evalue=6E-55; Info="UDP-GlcNAc:betaGal beta-1,3-N- acetylglucosaminyltransferase 5 n=2 Tax=Formicidae RepID=E2B9U7_ 9HYME"
ctttaaaatcttttattatcgttataaagtaaatacattcttgggagcttcatgtgtggaaacatatttccaaacagttttcatcttcgttttgttcattattttaaatagaaatggtttaattgtaaggttagtaaatgattaataatagcattcaaactttcgactggtaactttaaagattcgatatctgtgtgagtataatctagatttttaaagagaataccagttacgaatgcatcgtccacccataaaaaggaatttgatgtttgtgcttctttatatagagtaaatatgacttctggtgtataaacaataacgtatccaagacagtactgtggatagacttcttctggatactcaccaaatgataccacccatttggagtcgtttctttctactttgctgtgagttctagtaacacagtatatggttggttcatcactggaaggacacaaatcgtaagtgaggaaatttttcatacttggccagttgatgaagacgtcatcatcggtttttaataaatatttcgcttgcggacaatgataaacaaagtatttaagaaccattacgtgcttgtaagttaggttcctgtaattgtctataaaattaccttgtacaatatcaccaaataacgtattttcctcttctaactttttttgttgttctggagaactcggatctcctatcataaacactatttgtttagtttcttctacttgtccccatgtatctcttattgtctgcctcttcttgaaatttgaaggtgcagaatgaactactataagcactaacacaggagcactttcctggcacacttgatttatcatagaaaaattaaagctgatgttcaatagacgattatagtcaccagttgatagcaggaaggtctttccatttaacaataattttgtggttaacgagtaagtgttgcgttgtaacagtgagccttgaaaacgcagaaaaatcattgtaaaaatgattaatcctattatactgagctttaacgttgcactaatcttaatcataataattgttggttacccttaccactataatttagaatcaataaaatttgtaattttcttatatttttgcactaataattgtctatttctctaaatgaacataaaccacattatctgttaaaagccatatttttgcttgtcttgtacactcgacagtgcttcaaatatagagagaatttgccattaattttctcaacacagcggactgttagttgaagtcaaagctttcatcccttaaccaaaatagtcacaaattcttgaaatgttttataacaagagaattatttaaaattccctgtaaacagttcccggtaaaagaaacgtacgcgtatacttcacaccatatctaaa

SEQ ID NO: 4790 - DNA, 1463 bp, Diabrotica virgifera
  SmartBlast Evalue=1E-158; Info="Inwardly rectifying k+ channel, putative n=1 Tax=Aedes aegypti RepID=Q16XB7_AEDAE"
ggacggcttaagctctttgtacggtttctccataaatgaatcctcaatttgaattttgcaatcgttttgattcagacttgtcttttgaccgttcgttgtactgggttccttcttaaacagtggttcaagtgagggcactctggagatcggcgcgctttgcacaaggaaactgttgcttggagagaggcggtagggagacaggaacctcatgtcgacatcagaaatttgctgaattctataaaattccgacagatcggctcctgaacacagtggcgtatcaatagctacggtgttatcgaattttgagtaattaacttcataaccttgtctgtctttattataagatacgacagattcgaacctatgcccccacagaacttcactagccacgtaactcgatctagcctgcgtggtttgaccggtactttctatagtcccctccaatatcactacgatttcgaatctttcgtttaacatatcactagcagttaaaaaataaaagggagagttttcatcaatacgatggacgattgtcatcggccagatgaagaagaggtttccatcgcagccatctgcgttcacgtccagttcggtctggaagttactgagaacctctccttctttcgtagttttcgatcgaatgagttgagctctgatacttgctccaataatgtgactctttcgcatgtctcctactcggaacataaggcagaggtggccttctcgctgacaaatgacagcgttctttgagaattgcagcgtttgtgttctcaatttaggacgcgtcattttggcaaatactatgcccaccataaacgcttggataatcattccggctatgctttgaagacacatgaggaatattgcttctggacattcttctgttgtcgttcgcacaccataacctatagtatgttgcgtttctatagaaaataagaaacacgaagtaaacccttgaatattaaaaacacatggtgtccaattggcttccgcctgttttgcaggtaggtgatcttcttcaagatcgccgtgtgtaaaaacaatcaaccaccatactagagcaaataagagccacgagcccaagaatcctatggcgaatatagtaagcgtccatcgccattgtgaatctactaaggtcgtgaagatatcttggagatatcgaagtctacgtttcgagattcttgattgtaggatattgcagtctccattcttgaaaactgctcgtctgcgcatttttcttatggcatttggtcgaaatgaacgtctgcttatgtcacctggagaattaggagtgcctgttatacctcctgtcgtaagatctccattcgtaatttgcaaaggtgatgggggtagtctaagcaataactttttttcgcttccagaaggcatttttttgataatagaaagggcactatccgtttgatggtaaacaaccaattatttaacacataataaaatcaacg

SEQ ID NO: 4791 - DNA, 1395 bp, Diabrotica virgifera
  SmartBlast Evalue=1E-157; Info="Inwardly rectifying k+ channel, putative n=1 Tax=Aedes aegypti RepID=Q16XB8_AEDAE"
ggacggcttaagctctttgtacggtttctccataaatgaatcctcaatttgaattttgcaatcgttttgattcagacttgtcttttgaccgttcgttgtactgggttccttcttaaacagtggttcaagtgagggcactctggagatcggcgcgctttgcacaaggaaactgttgcttggagagaggcggtagggagacaggaacctcatgtcgacatcagaaatttgctgaattctataaaattccgacagatcggctcctgaacacagtggcgtatcaatagctacggtgttatcgaattttgagtaattaacttcataaccttgtctgtctttattataagatacgacagattcgaacctatgcccccacagaacttcactagccacgtaactcgatctagcctgcgtggtttgaccggtactttctatagtcccctccaatatcactacgatttcgaatctttcgtttaacatatcactagcagttaaaaaataaaagggagagttttcatcaatacgatggacgattgtcatcggccagatgaagaagaggtttccatcgcagccatctgcgttcacgtccagttcggtctggaagttactgagaacctctccttctttcgtagttttcgatcgaatgagttgagctctgatacttgctccaataatgtgactctttcgcatgtctcctactcggaacataaggcagaggtggccttctcgctgacaaatgacagcgttctttgagaattgcagcgtttgtgttctcaatttaggacgcgtcattttggcaaatactatgcccaccataaacgcttggataatcattccggctatgctttgaagacacatgaggaatattgcttctggacattcttctgttgtcgttcgcacaccataacctatagtatgttgcgtttctatagaaaataagaaacacgaagtaaacccttgaatattaaaaacacatggtgtccaattggcttccgcctgttttgcaggtaggtgatcttcttcaagatcgccgtgtgtaaaaacaatcaaccaccatactagagcaaataagagccacgagcccaagaatcctatggcgaatatagtaagcgtccatcgccattgtgaatctactaaggtcgtgaagatatcttggagatatcgaagtctacgtttcgagattcttgattgtaggatattgcagtctccattcttgaaaactgctcgtctgcgcatttttcttatggcatttggtcgaaatgaacgtctgtggattggtaaatgcacattcttttacataatcgtagcaatcagttaataaatagagactgtttgttcatcatcttatttaaaactaaagacaatcacaatttgtttatttgagtagcttgatataat

SEQ ID NO: 4792 - DNA, 1580 bp, Diabrotica virgifera
  SmartBlast Evalue=5E-18; Info="Lysosome-associated membrane glycoprotein 1, putative n=1 Tax=Pediculus humanus corporis RepID=E0VVL9_PEDHC"
cgtttctcgaacgaacgttgtttgcttgctgttaataatttctgacagatcatcttgtacctttgttttgataggaataaatacgaacgttataataagaaaccatggcaaattttaagatattattagtgttatccgtcttattttgtttacaagtaacagatggcgcaagtggcataggaccggaaccaccacatgtatcaacaaaccaacctacttctccagcatcaagttctagttcaacttcacataagacaactactacaacaaccaccaataccactactcctaaacctgatacaactacccctgctaaaactactactcctaaacctgatacaactactaaaactactactcctatgactacaaaatctagtacaactaccattactactcctactacaactaagcaaactccacctaccagttctacttcgaagcctactacaactcctacagcgaaaactaccactcctattccacctacaccaacaccagttcctgacccatcaatgggcaagtggtccctcaactttaccaattcaaatgacagttgtttgttgatggatgcagccttacagattgaaattccccaagttaatcacacctccctgaaaatcaatgttccttttaatgcaacagctactggcaattgtggcaaagatttgaatgttctgacactatggatagagaaaaccagtttcatcaatatgaattttgtccaaaacgcaactaccaaaaagtttgaattggaatcaattaaggcttctgtcaatgtcaccctctctaatggtacctcaagcattttaaatgtaactcatgaaaagccagagttctctacttcgttggatcattcttacaagtgtgctaaggtccaaactttgaatttgactgtcgcaggtggtaatgatactattgctttattgcatattagtcatgtgcagttccaagccttttctaatgtgacagcacataagttttatgatgctatcgattgtgaagcttccgctataacttcagatgtcgtcccaatcgtagttggatgcgtattagcccttctagtagtcgtggtactggttgcctacctcgtaggaagacgctattgccaagccagaggatatacttcaatgtgagttgcaaaaacactccaaagctcgcagatagggagcgttttacataacatctcgagcttaactatctaaattaataacgagaacatactttatttgatgtgtattttattatcaagttaacattgccgttatctgtcaaatgtcactgtgatcggtttttcctatagcacagtttaatgttaaagaatcagttaattcactctcgaattttgacggttccaatttttgcaatccactcccgagacaaaattttgtatgcgcgacgataaagatcaatcacggcaaacgtcagctgtcatttgactgcgcgagggactaaaatgtttgatgcgcactaccaaaatggaacatagagaacaaaggcttttcggggagggactactgattcttcagtattatactgtggcaaaagtatgaactctttagtctcgattatttcgatat

SEQ ID NO: 4793 - DNA, 1274 bp, Diabrotica virgifera
  SmartBlast Evalue=4E-18; Info="Lysosome-associated membrane glycoprotein 1, putative n=1 Tax=Pediculus humanus corporis RepID=E0VVL9_PEDHC"
cgtttctcgaacgaacgttgtttgcttgctgttaataatttctgacagatcatcttgtacctttgttttgataggaataaatacgaacgttataataagaaaccatggcaaattttaagatattattagtgttatccgtcttattttgtttacaagtaacagatggcgcaagtggcataggaccggaaccaccacatgtatcaacaaaccaacctacttctccagcatcaagttctagttcaacttcacataagacaactactacaacaaccaccaataccactactcctaaacctgatacaactacccctgctaaaactactactcctaaacctgatacaactactaaaactactactcctatgactacaaaatctagtacaactaccattactactcctactacaactaagcaaactccacctaccagttctacttcgaagcctactacaactcctacagcgaaaactaccactcctattccacctacaccaacaccagttcctgacccatcaatgggcaagtggtccctcaactttaccaattcaaatgacagttgtttgttgatggatgcagccttacagattgaaattccccaagttaatcacacctccctgaaaatcaatgttccttttaatgcaacagctactggcaattgtggcaaagatttgaatgttctgacactatggatagagaaaaccagtttcatcaatatgaattttgtccaaaacgcaactaccaaaaagtttgaattggaatcaattaaggcttctgtcaatgtcaccctctctaatggtacctcaagcattttaaatgtaactcatgaaaagccagagttctctacttcgttggatcattcttacaagtgtgctaaggtccaaactttgaatttgactgtcgcaggtggtaatgatactattgctttattgcatattagtcatgtgcagttccaagccttttctaatgtgacagcacataagttttatgatgctatcgattgtgaagcttccgctataacttcagatgtcgtcccaatcgtagttggatgcgtattagcccttctagtagtcgtggtactggttgcctacctcgtaggaagacgctattgccaagccagaggatatacttcaatccccgaaccagacgaagccagtataatacattaaaagctgtttgagaagcacgctaacttgtatgtaaagttgtatatctatgtaaataaattattatttttgattgtttttccaatattctgttgaataaatgattgcctc

SEQ ID NO: 4794 - DNA, 2018 bp, Diabrotica virgifera
  SmartBlast Evalue=2E-52; Info=Endonuclease-reverse transcriptase n=1 Tax=Bombyx mori RepID=D7F175_BOMMO
aagaaattctacacaaaaatcagagaacagaacagaaaaatggacaaggcaatgatacaaaaggaacatatgagaacaagcaagattagcaaaaagaaagaaagaaagggtaatacaaaaaagaaaaaagagagggaggggttataagaatagcgtcatggaatataagaacattacttagagcaggaaaactggaagaaataacatcagttctgatacagtacaacatagaaatagcagcattacaggaaattcgatggaagggaaaggacaaatagatcaaaagaatggtacctttatatactcaggggaagaaaagcaaggacaacatggagtaggattcatagtaactggaaatatgaaagacaaaataatggaagtcagactaataaacaaaagaatagcttacctaaggattgaagctaaacaggcaaacatatccctactaaatgtttatgcaccgacagaaaatgcgaaagaggaggaaaaagatcatttctacgacactatggaagaagagctagaaaaaataccaaaagaagatgtgatattaatattgggcgattttaatgcacaaataggaaaggaggattatatacagcaaatagcgggcaaacatacaatacatgagaaaacgaatgacaacgggcacagaatatgcaacatggcgacaggaaacaatatgtctatcagcagtacaatgttcaagcatccaagaaaacacaaagtcacatgggtttctccagaccaaaaaacagagtcacaaatagaccacatattaatatcgaaaagaagacaatcaagtataatggatgtgagaagctacagaggtgcatgcggagattcagaccatttcctggtggtagcaaagctgagacaaaagatgaaagtaatgagaaggcagaaagagaggaataagaggtggaatatcgaaaaattgaatgaagcaaaagagatacaaaagtatggagatgaaataggtaaaagaattgccgcactgaataaggatagagatgatatcgaagaaatatggggggatattaaaaaagcaattaaccacacggcggagactacactagggacgaagcaaattacaaaaaagcaaggactggttcaatacagaatgtaaagaatcagttgaagaaaaagtaaaagcacgaaatcagtggatgcggacacataaaattgaacatagagacatgtacgaacaaaaaacgaaaggaaagcaacaaaataataagacaacataagagaaaattcatggaaagtcagttgaggaaattgaggcggaaagtaagactcagaacaccaagaaattctacacaaaaatcagagaacagaatagaggtttcaaaccaaaagtaaatggagttaaaaataaacaagggcaaatagtaacacaagatcaaccatatatggaagtctggatggaacacttcaaggagttactggcagaaaatcaaacagaagagattacagaaatggaggaagagtgggaaaataatggaacgaatgagccaacactcgaagaagtaatcgaaataattaaaaataacaaaaacggaagagcacccgggaaagataacataaacaagcgaactcataaaactaggagggaaaccgttacatagggaaatacacaaactgatagtaaacatctggaaagaagagaaaatgccaaaagaatggcaaacagggcaaataataacgatacataaaaaggaaaccaacaagaatgtcaaaattacaggggaataacattactgagtacagtatataaggtgttgtcaaccataatacaaagaagattacaggaagcaacagacaataagatagggcaatatcaatgtggattcaggaaaggaaaatccacaatagatgcgatatacatactaaaacaaataatggagaaggcgaacgaatctaacataaacttagaaatacttttcgtagattttagacaagcttttgattccatcaacgaaagcaactattggaaatactaaaaacgctacagg

SEQ ID NO: 4795 - DNA, 817 bp, Diabrotica virgifera
  SmartBlast Evalue=6E-19; Info=Endonuclease-reverse transcriptase n=1 Tax=Bombyx mori RepID=D7F178_BOMMO
gctccgtcgtgatttttgccttaagcaaaaactgcagtgagtcccctaatggaccattagggtcctcgtatcactttaaaatttgtgcgggttacaaaccccagcatataattaatagtttaattttatttaacagttcgcaataattataaaatagtaaggttcaaaattattcaatgatacttcagtaaaagtgacaggactattttgagaaattttagtgataatggaacacttcaaggagttactggcagaaaatcaaacagaagagattacagaaatggaggaagagtgggaaaataatggaacgaatgagccaacactcgaagaagtaatcgaaataattaaaaataacaaaaacggaagagcacccgggaaagataacataaacaagcgaactcataaaactaggagggaaaccgttacatagggaaatacacaaactgatagtaaacatctggaaagaagagaaaatgccaaaagaatggcaaacagggcaaataataacgatacataaaaaggaaaccaacaagaatgtcaaaattacaggggaataacattactgagtacagtatataaggtgttgtcaaccataatacaaagaagattacaggaagcaacagacaataagatagggcaatatcaatgtggattcaggaaaggaaaatccacaatagatgcgatatacatactaaaacaaataatggagaaggcgaacgaatctaacataaacttagaaatacttttcgtagattttagacaagcttttgattccatcaacgaaagcaactattggaaatactaaaaacgctacagg

SEQ ID NO: 4796 - DNA, 1464 bp, Diabrotica virgifera
  SmartBlast Evalue=1E-121; Info=Uncharacterized aarF domain- containing protein kinase 1 n=1 Tax=Camponotus floridanus RepID= E2APB4_9HYME
cgtcgacagcttgcacaccaagacttctgagaagaactatgggagtaaattctgtatgatacaatctatacattccttccagggccaccattgtagtcaaattttcccgttgccttttggtttcgtattctttcaggtagctaacatttcctaaagagctgccagagtaaactgcatcgcccagaaccttgttaagacaagatacatctccaaatcctagattaacaccttgacctgcaagtggatgtactctatgtgcagcatctcccacaagaactaccccttttcctatataacttgtagcgtggccaaaccctaacggaaaagcagctctgcttccttcttctatactggaaacttttggaggataggtacgatgaacatcggcaggacaatttacagctctgaggagagtgtcaaacgaccgtacagcttgatcaatggtgctactgcgtttaaaaactttccaaaaagattcgtttactgcatcaacaaactgttcgttagttaattttaataatcgcttggcgtcttcaggtgtagtggaccacacgatagagctttgggaactgttgagcgggagtagagctagaggtcctgtaggcaaccaacgttgccatgcgatggaattgtcgaattcctcacagaacttaagcgtagctacgacacctgtgctattgtaattccaatttaaatagtgtactcccattgtttgtctaactttagaatttacaccatcacagccaatcaataaatcacatgtgtactggttaccgttttcaaggaaaatattaacttgagaatcatcaacacctggtagctcgtaattttttactttggattcgtacaggatctcaacgttggtgttttttatttctttctttgcagaatgcagtattaagttgttttctacaatgtaggacacatcgtcagaagactttatttctccaaatgttattgaagcatcagacaaagcatccataacctgtagtctctttactgtagcaaacctggcttcttcaatatgtttccatgtgccaatattgtttaatagattctttgttcctggtgtcagagatacaactctattactatatttttcagacaaaacaaatggtatatccttggtagattctaatagtaaaatttttcttcccgaaaatcttgagtttttacctaaagcacatgcaagagtggtcccaatcattcctccaccagcaattacaatatcatagtatttctttgaacattctgttgaggagagatgtctcaagatgttgagtaaattgttgccaagatatggcttgcaaacatgcttaactgaatgcattggaaaaactgtaacagaccgtattaaactcactattagaaaattagaaatttactaactggagaaaattaaaaatttaaaaattatttttaaatctttaacaggttaggttatgtttaataacataacttgac

SEQ ID NO: 4797 - DNA, 1356 bp, Diabrotica virgifera
  SmartBlast Evalue=1E-104; Info=Uncharacterized aarF domain- containing protein kinase 1 n=1 Tax=Camponotus floridanus RepID= E2APB4_9HYME
cgtcgacagcttgcacaccaagacttctgagaagaactatgggagtaaattctgtatgatacaatctatacattccttccagggccaccattgtagtcaaattttcccgttgccttttggtttcgtattctttcaggtagctaacatttcctaaagagctgccagagtaaactgcatcgcccagaaccttgttaagacaagatacatctccaaatcctagattaacaccttgacctgcaagtggatgtactctatgtgcagcatctcccacaagaactaccccttttcctatataacttgtagcgtggccaaaccctaacggaaaagcagctctgcttccttcttctatactggaaacttttggaggataggtacgatgaacatcggcaggacaatttacagctctgaggagagtgtcaaacgaccgtacagcttgatcaatggtgctactgcgtttaaaaactttccacgggagtagagctagaggtcctgtaggcaaccaacgttgccatgcgatggaattgtcgaattcctcacagaacttaagcgtagctacgacacctgtgctattgtaattccaatttaaatagtgtactcccattgtttgtctaactttagaatttacaccatcacagccaatcaataaatcacatgtgtactggttaccgttttcaaggaaaatattaacttgagaatcatcaacacctggtagctcgtaattttttactttggattcgtacaggatctcaacgttggtgttttttatttctttctttgcagaatgcagtattaagttgttttctacaatgtaggacacatcgtcagaagactttatttctccaaatgttattgaagcatcagacaaagcatccataacctgtagtctctttactgtagcaaacctggcttcttcaatatgtttccatgtgccaatattgtttaatagattctttgttcctggtgtcagagatacaactctattactatatttttcagacaaaacaaatggtatatccttggtagattctaatagtaaaatttttcttcccgaaaatcttgagtttttacctaaagcacatgcaagagtggtcccaatcattcctccaccagcaattacaatatcatagtatttctttgaacattctgttgaggagagatgtctcaagatgttgagtaaattgttgccaagatatggcttgcaaacatgcttaactgaatgcattggaaaaactgtaacagaccgtattaaactcactattagaaaattagaaatttactaactggagaaaattaaaaatttaaaaattatttttaaatctttaacaggttaggttatgtttaataacataacttgac

SEQ ID NO: 4798 - DNA, 1480 bp, Diabrotica virgifera
  SmartBlast Evalue=2E-52; Info=Equilibrative nucleoside transporter 1 n=1 Tax=Harpegnathos saltator RepID=E2BT91_9HYME
ctccagttataccaatgactgtttgcataatcaaatatgcgttttcttcttcctccggggccaatttgattacgtttaaaaacgctacattaaaaaagtatccactggatatcataaaactacccaatattaacacgtactgccagtcatgagggaagagcacgtgcaaatgtttcctaggaagtgcgttgcaaaatataaataaaggaacaaaaatcaccatcctgactacagagagaagagctaaaacagagggacgaggtctcttgtttgtggcagtagcaagtcctcttccaatcaggcaacatatatcactaaacaaaaaggtaactacggcagcaaaatattttttggtgaagtcggtcttgtattcagacaccaccaaggctgcgacggaagggtgtgtaggaacataagccaaggcgcctgcagtgactataaccaaactggtccaaattttgctagagatctccttcacctcacttaacgtgatcaaatcttttttggtatcttctatggaagtccctgttactgatctatagaatccttgttgttgaatgaaatggtaaagcatcaatgtcgctgtcgtgaggattgttccacatagaaagtagatgagggctgctgcttctgatgatgtacctattactaatgcgagaacttgaagagctgaacaaaatattcctccgatgccttggccggtgaggaaagttttcatgtagattggaggaaatttcgccagtagtgctaacgaactgacttgaaacaaagcgaggataccgttcataactgctaaaatcgccatggttagtgcaaaaaatcctgtttgccatccatccgtgtccgatttaatgaaaacagtggataccacaaaacaggtagccaagacgtagagagaagtgagaatcctgatcttcaccttgattttgtaagcgaacaccacggctaagaccatacatatcacagtcggaactgattgcgctacattcgttcctgatgcaaagttggattgaaggatagacctgtaatttggatccgtgttgtctgacgtcgtgttccgaaatttgtacatccagtaatcatttgccgttacaaaaaaggacacaggtaataaatgcatgattccaaaaactagaaaaactatatgagccaagtagaatttgtctgtttccattgcatttttcttgtatgcaatggcgaactctgcgtgaccgttgagttttattttttcctccgcggacgcgatttcttgaaagtctcctggttttttcatcttgaaacgttgagttgagatgctcactacattggtccagaactgatcagattaattggcccgcgtctccccggctgttttttgatgtcctttgattgttaacacggttcctagacgctcgtgataatatcaattccattcaattcaacgtcgttaacattatcagagagagttcaagctgattgataatctatttaaagaaaatat

SEQ ID NO: 4799 - DNA, 1341 bp, Diabrotica virgifera
  SmartBlast Evalue=2E-52; Info=Equilibrative nucleoside transporter 1 n=1 Tax=Harpegnathos saltator RepID=E2BT91_9HYME
ctccagttataccaatgactgtttgcataatcaaatatgcgttttcttcttcctccggggccaatttgattacgtttaaaaacgctacattaaaaaagtatccactggatatcataaaactacccaatattaacacgtactgccagtcatgagggaagagcacgtgcaaatgtttcctaggaagtgcgttgcaaaatataaataaaggaacaaaaatcaccatcctgactacagagagaagagctaaaacagagggacgaggtctcttgtttgtggcagtagcaagtcctcttccaatcaggcaacatatatcactaaacaaaaaggtaactacggcagcaaaatattttttggtgaagtcggtcttgtattcagacaccaccaaggctgcgacggaagggtgtgtaggaacataagccaaggcgcctgcagtgactataaccaaactggtccaaattttgctagagatctccttcacctcacttaacgtgatcaaatcttttttggtatcttctatggaagtccctgttactgatctatagaatccttgttgttgaatgaaatggtaaagcatcaatgtcgctgtcgtgaggattgttccacatagaaagtagatgagggctgctgcttctgatgatgtacctattactaatgcgagaacttgaagagctgaacaaaatattcctccgatgccttggccggtgaggaaagttttcatgtagattggaggaaatttcgccagtagtgctaacgaactgacttgaaacaaagcgaggataccgttcataactgctaaaatcgccatggttagtgcaaaaaatcctgtttgccatccatccgtgtccgatttaatgaaaacagtggataccacaaaacaggtagccaagacgtagagagaagtgagaatcctgatcttcaccttgattttgtaagcgaacaccacggctaagaccatacatatcacagtcggaactgattgcgctacattcgttcctgatgcaaagttggattgaaggatagacctgtaatttggatccgtgttgtctgacgtcgtgttccgaaatttgtacatccagtaatcatttgccgttacaaaaaaggacacaggtaataaatgcatgattccaaaaactagaaaaactatatgagccaagtagaatttgtctgtttccattgcatttttcttgtatgcaatggcgaactctgcgtgaccaataaccattttgatcgttattcctatagacactactcactacttcacctgactaataaagcaaatgaaacaatagaacaatttttaacttttttgttaataatttaacaatctagataacactttat

SEQ ID NO: 4800 - DNA, 2516 bp, Diabrotica virgifera
  SmartBlast Evalue=1E-177; Info=RNA-binding protein 39 n=1 Tax= Camponotus floridanus RepID=E2ACV0_9HYME
ccgccatattgtaaaattactattgatcctgattagaaagtttatttccattttttttttggcgtggtctgttttgtctagctacaagataatataaatctacaattccttattgattcatcgatcagcaaaatggctgaagatcttgacgtcgaagctatgttggaagctccctacaagaaagatgatgaatacacatcatcaaagtcaagggaaacgcgagaagtcagcaagaagcggtcagagaagaagcgcaggagcaccagcagaagtcggagaagtaccagcagaggacgaagaagtaccagcagaagcaacaggagtaccagccgaggccgtagaagtacgagtcgaagtcgccgaagtactagccgtagtcgtagaagtaccagcaggtctaaaagaagtaggtcgaaagagagacgacgatcgaaagagcgcaggcgttcggtcgaaaaaagaagacgttccagagatagaaagcgtagatcctcgtctaaagacagaaaaagtcggtcgagggatcgcagggaccgtagtaaatctaaggacagaagaagtagatctagagatagacgtagcagatcgagagatagaaagaagcgcgagcgtcgtgaaagaagtcgcactcctaaagaaagaaaaccgagcccaaaaagacgtacaccttcacctacaccattcggcaaaccaccattcctgaagagacctcgttctcccctcggcatccgaggaacatcacctttagaagaactaagcgctgaagagagagatgccaggacagtattcattatgcagttatctcagaggatacgtgccagggacctggaggatttcttcagttcagtaggaaaagtacgagatgttagaatgatcgtttgcaataagacgcgaaggttcaaaggaattgcttatatagaatttaaggatccagaaagtgtagcattagctctgggcttgtctggtcagaaacttcttggtattcctataatagttcaacacacccaagcagaaaagaaccgaatgggcaattcgatgcccaatatgctgcccaaagggatgattggtccaatgagactgtatgtaggatctttacattttaacattaccgaagaaatgttgagaggaatcttcgaaccgtttggcaaaatcgacagtattcagctggtacaggatcccgaaactggaagatccaaaggatatgggttcattacgtatcacagctgcgacgacgccaaaaaggctctggaacaactaaacgggttcgaattggctggcagaccgatgaaagtgggcaacgtaaccgaacgcctagatctacaacaacaaggtccctcgattttggattcggacgaactggacagatctggtatcgatctgggagcgactggtcgactccagttgatgtttaagctggcagagggcgctggaatgcaagtacctcaagctgctgcgaatgcgttgagtatggctaccggtcagccggtgataccccaagtacagaccaactcgacacctccgatagccactcagtgctttatgttaagtaatatgttcgatccatcaacagaatcgaacccatcctgggacatagaagtccgagatgacgtgatcgaagaatgcaacaaacacggaggtgtactacatgtctacgtcgataaaggctccccacaaggcaacgtatacgtcaaatgtccatcaatagccactgcagtagcctctgtcaacactttacatggtcgatggttcgctggtcgtgtgatcacggctgcctatgttcctctgttgaattaccattcactgttcccagacgccatgactacgaccactttgttgttaccgtctagtagaaaataatgtgattatatcagatcgtttaagtggaggacattttgttagtaggtacgtgagacattctcgagcaatatcttaggaatattgcctttatatcacttgatacctagtcttttttgagtgtttttacgtttctgatccgtatttaaatacaatctgaagttattattaaaataaagatctataccgattccatatttttgattaacacattaaatgaatttgtctgtctggcattggctattaaaatccgagatctgaagaattaagatacaatttggcaacgtcgctagaatatttgcgtagattggaagggtattgactcattttgatgatttagatcaatttctgagtttagctgccagtttatattaattacactgtgttagtaaaagcatgaatcacaggaagaaacactaattgcaaaatttttctgtctgtcatttatccaagatctcaagaattaatataatatttggcaatgtcgctagcatattcacgtatttttaagggatattcactcatttttaatgatttagatacactcgggagtttagttaccagtgtgtattgtactctgttagcaaaagcatagaacgaaggaaaaacactaattgcaaaatttttctgtctgccatttatccaagatctcaagaattaat

SEQ ID NO: 4801 - DNA, 299 bp, Diabrotica virgifera
ccgccatattgtaaaattactattgatcctgattagaaagtttatttccattttttttttggcgtggtctgttttgtctagctacaagataatataaatctacaattccttattgattcatcgatcagcaaaatggctgaagatcttgacgtcgaagctatgttggaagctccctacaagaaagatagttgtgagattttttcggggtaacggctccttcaaaatacagggctgctgaaatggacatccccctaggcaaggtcactaccccagaccaatcaaccaattggtctctactc

SEQ ID NO: 4802 - DNA, 1673 bp, Diabrotica virgifera
  SmartBlast Evalue=4E-33; Info=RNA-binding protein cabeza n=1 Tax=Camponotus floridanus RepID=E2AUW7_9HYME
tattgaacttaacctattttattactttacatactgaaattataaataagtcttgtacatccactgtggaaaataaaatttgattttacactcacgtaatataaatattacatgtattcagaagaacaattttagacaggcagccaattttcaaacattcagtatcttttcttaattttaaataggtattcatctatatgaatcattagcgctgtctaatactgttaataaattgtccgaaaaatgtgcaattatcactgaataaaaaccattacactcggcaatgttacaacatacaaaaggaaggacattaatcttttaatatggccggggtctcctatcacctcctcggtcgccgccatcacgaccaccgccacctcttccaccaccgcgtccaccgccaaatcctcctcctcctcggccgccgccaccgcgacctccaccaaatccacctcctcggctacctctgtcgcggaaaccgcctccaccaccacctcgtctatctctgtcaccaccgtcgcggtctcttccgccgccaccgcctcttctgtcatcatcaccaccgcctccggcaccttctggtttgggttcgctacacctgttacattggcttcgccacgagaagtttgtgttgttgcagtctggattggggcacttccaatctccttcgcggccttcccggtcgcgaccgccaccaccgccgccgcctccacggcctccaccatcacgtccgcctcctcgtgatccaccgaaaccaccgccacctcctccatcacgaccaccgcctcggggtcctccgaagccaccaccgcctccacggccacctccgcgtccgccgccgccgccaccaccgcctccactccaggtatctttcttggtggccaattgcactttgatcatacatccttggaagtctttgccgtcgaaccagttgattgcagattgcgctgcgttggggtcatcataggttacggtggcttcgcctttgctcacgcccgtcgctttatctttgtacagccagattttgcgtttctgggttttcttgtccaacttaataataccaatagatccaaaatgttgctcaatatcatcctcagttaaatctgggttcattccagatacgaagactgtatccatttgaattactaaattatctttattataaccaccacccctgttgccgcctccataactgtctcgtctttctatatctcttccaccacctctttgatctctgccaccacctccgtatcctccacctccgcctccatagcctcctccaccaccaccacctcctccataactgctaccgttaccatatccacctccgcctccactggagccgccatatccaccaccttgttggccaccatagccacctccaccaccttgacctcctccataaccgcctccttggcctcccctactttggccccaggaaccgccaccaccaccgcctccagaggcaggagccgcggcttgatagcctccagcagatgcgccatagcctggataggtgcttgggggtggttgagaataatctccgtatccaccgccgcctccaccgtaaccatccgccatcttaactttcaataaattcaaccacaaacttacaaaattccaaacaacgcgtaattgccgaaagttcaacgagaaatgggaaaaattggaag

SEQ ID NO: 4803 - DNA, 1134 bp, Diabrotica virgifera
cacgaacatcaacgtgaaaggaactatataaaaaaaataaaggaatctaacacagaacagaatcttacacccaagtggtttggttataatgcaatgagttttatgcaaaaagaaataagtggaaaaccgccttaagaattaattaattaattaatcataaatggctcaacaattctttagagaacttggtcttctcatagagaagttgccacatacattgattcctaaaatttccctcatcttctgacccttagaattttaagttcttctccatatcatcaatccatgataatcctctacttcttcagtcccctgggtttgagaatgccaatatcttccggtatatacaaaaataccatttttttagttaacagcttttaatttacagataaaaatgtcgaatgacttgataattcgcttcttgcaaatctttggtagtaagtttaatttcttgaaatatatcaaatccggatcatattatcctgtcttcttctttggacagtacacgtagaatataatacaaattctgacgttacatatcacttttaactttccttcatttaaaaatacattatacaccacaaacttcatactcctttcttaaattgtaatttaataattgtgttacattaaaaaactaaacttacccataactgtctcgtctttctatatctcttccaccacctctttgatctctgccaccacctccgtatcctccacctccgcctccatagcctcctccaccaccaccacctcctccataactgctaccgttaccatatccacctccgcctccactggagccgccatatccaccaccttgttggccaccatagccacctccaccaccttgacctcctccataaccgcctccttggcctcccctactttggccccaggaaccgccaccaccaccgcctccagaggcaggagccgcggcttgatagcctccagcagatgcgccatagcctggataggtgcttgggggtggttgagaataatctccgtatccaccgccgcctccaccgtaaccatccgccatcttaactttcaataaattcaaccacaaacttacaaaattccaaacaacgcgtaattgccgaaagttcaacgagaaatgggaaaaattggaag

SEQ ID NO: 4804 - DNA, 1547 bp, Diabrotica virgifera
  SmartBlast Evalue=1E-124; Info=ATP-binding cassette sub-family B member 7 n=1 Tax=Culex quinquefasciatus RepID=B0WKA9_CULQU
agacatacgtgacgtttcctccgatttcacatcacgtgtttttatgtcaaacatgttttacttaaattgtaagagtttggattgacaactcttaaattatatatataccctactaaaagaaaataaatttctttcgtcatattgctgattttttctttctggttcagtgtgcgattgattttgcgtttcccacaatttccaatatagtccggaatgactttccagtagtgacttgtgtgttcctctgtcagcgacttgaccattttccagtactatgatttcgtctgcgtccatgatggtgctaaggcggtgagctatgcagatactggtacgtcccttagttgcatttctcagtgccattagtatattatgctcagttatggagtctaaagaactagtggcttcgtcaaacaccagaataggggagtttttcaaaattgctcttgctatagctactctctgcttctcgccgccacttaacttcaatcctctttcacctacttgcgtgttgtatccttggggccaggtcacaatggaactgtgaatttctgcgagttttgcagcgttcattatttcttcttctgtagcttgaagatcaccgtaatggaggttatgcctaattgtatcatggaataaaacgctatcttgaggcacaatggcgattgcacggcgcaaactgtccaggtctacatctcttatatcttgatttcctatgaggattcgccctttcgatggttcataaaatctatacagcagtctaacaagagtcgattttcctgatccggatccacctacaatagctactttcttgccaggttctattgttaaatttaaatctttgaaaattgtttttccgggtccatactcaaaagacacgttttcgaattttatcggtgaaaattttgaatcgacatgaaggtatggggcttcaggtttactctttacggcactatccattgtcatcagagtgaacatagtttgcatatctattagtgcctgtctcacttctctatatacacttcccagaaatcctaaaggaattgataattgaaacagcagtccatttaccatcactaaatctccaactgtcatgttccctgcaaacatcgcaccacatttaattccaagaatagatgaaaccaaggccaattcaaacattgttggaactacgttgaaaaccatagctgacaatacaaaatttattcctcttgaacctctatcgattgttttggaaagggcacctgtttgtctttgtaagtgaaatgttaggtctagattatgtaagtgaatgaacacatttttcgcaattttcctaatagaatgctgagcaactttagcaaaaacagcattccttaattcgttaaaacctgcagctccagctcttgcaataccatatcctaataataaactagttgctacagtggctaccgtttgtggagcagtttccatatttaaggcatttccaacatttaaataatccacagaatatttaaaataaatgggacacacacattcatgaccttggctccaaataagtaaagacactg

SEQ ID NO: 4805 - DNA, 1255 bp, Diabrotica virgifera
  SmartBlast Evalue=1E-136; Info=ATP-binding cassette sub-family B member 7 n=1 Tax=Culex quinquefasciatus RepID=B0WKA9_CULQU
agacatacgtgacgtttcctccgatttcacatcacgtgtttttatgtcaaacatgttttacttaaattgtaagagtttggattgacaactcttaaattatatatataccctactaaaagaaaataaatttctttcgtcatattgctgattttttctttctggttcagtgtgcgattgattttgcgtttcccacaatttccaatatagtccggaatgactttccagtagtgacttgtgtgttcctctgtcagcgacttgaccattttccagtactatgatttcgtctgcgtccatgatggtgctaaggcggtgagctatgcagatactggtacgtcccttagttgcatttctcagtgccattagtatattatgctcagttatggagtctaaagaactagtggcttcgtcaaacaccagaataggggagtttttcaaaattgctcttgctatagctactctctgcttctcgccgccacttaacttcaatcctctttcacctacttgcgtgttgtatccttggggccaggtcacaatggaactgtgaatttctgcgagttttgcagcgttcattatttcttcttctgtagcttgaagatcaccgtaatggaggttatgcctaattgtatcatggaataaaacgctatcttgaggcacaatggcgattgcacggcgcaaactgtccaggtctacatctcttatatcttgatttcctatgaggattcgccctttcgatggttcataaaatctatacagcagtctaacaagagtcgattttcctgatccggatccacctacaatagctactttcttgccaggttctattgttaaatttaaatctttgaaaattgtttttccgggtccatactcaaaagacacgttttcgaattttatcggtgaaaattttgaatcgacatgaaggtatggggcttcaggtttactctttacggcactatccattgtcatcagagtgaacatagtttgcatatctattagtgcctgtctcacttctctatatacacttcccagaaatcctaaaggaattgataattgaaacagcagtccatttaccatcactaaatctccaactgtcatgttccctttaacaatttcattagctgctaaaatcataatcccactaagagcggcgctgaagatggcattttgtccaaaatttaaacagtgctaaactagaagctgtcttcaaactggcagattcatatttttgtaatgcagaatcgtatcgttcagcttcata

SEQ ID NO: 4806 - DNA, 1409 bp, Diabrotica virgifera
tgacaagcgccctcgaaagtggaaaattttacttaactttttttgattttaggacctaataatcacaacccaattggtccccataacgctcgagtgactgcaaatttagcatactttactcccctactataacgactaagaacgaaattgacttttggtgctatatttggtacgacatttttggtactacacgagcccattttctgttccagttttgcataaaaaatatatttttatgttgactacatattttcgtatgacttaatccattttttcttattccggcaaacaagtatattgcctgtttttattttggcactggtacttctataaataacgtctatcggcattgtaatgtgtctctggtcaggagatcctaagattatctgaccgccagtatttgctagttcatttagcgttacccagggtgcacgtgtagtattccactacggacgagaactagctctacaccccaagcttgcaggaagaatactcaatattcagttcgaaaacatcacactcgcctacaataaaacaccagagtaccttgggtgacttgacagaaccctatcattcaaggaacatctgaccaaaacagcggaaaaacttaaatccagaaacagcatcatccagaagctgtgcggcacaacatggggagcatcggctttcaccttgcgatgatctgccctgggcctagtcttctcaactgcggaatactgctcttcagcatggcttaacagcccacatatacacaaagtagatgcccaattgaataatacaatgagaatgattgctggagttatcaaatccacctctacgcaatggctcccagtactgagccacattccaccacccaaactacgacgcatacacgcactcactagtgagtacagaaagatagtagataacgagaacctgccaatccatcaagatatagatgccgccaacggtaaccgtctacgctcagacgaccagccaataaaaacagcaaaggttgctgtggaaactgagttcaatttaacgacaacatggactcgagaatggatggaacaacaaaatagcaacttaccctgcatcacacaaaaaccaccaggctttgacttaccacgcaacacatggtctatgctgaaccgaatcagaacccaacacggcagatgtggttacatgatgcacaaatggggtaaacgaccatccccactctgtaactgtggacaaccacaaaccctatcacatcacagaacagtgtccacaagatcatatcatggcaggtcagaggatttcctgatggcgactccagagtcgatagactatgtaaataagttagatgtacgtttctgaacctatgtattgtcttatacaaaatatatgtaaatgtaaatgtgtcaggtgccatacgataaataagataa

SEQ ID NO: 4807 - DNA, 1373 bp, Diabrotica virgifera
ttgagagctatcgatttggtcataaaatcttcatacggacattttttatggtagcaatattgttggatagaacaaagtcaatttcgttcttagtaacgactaagaacgaaattgacttttggtgctatatttggtacgacatttttggtactacacgagcccattttctgttccagttttgcataaaaaatatatttttatgttgactacatattttcgtatgacttaatccattttttcttattccggcaaacaagtatattgcctgtttttattttggcactggtacttctataaataacgtctatcggcattgtaatgtgtctctggtcaggagatcctaagattatctgaccgccagtatttgctagttcatttagcgttacccagggtgcacgtgtagtattccactacggacgagaactagctctacaccccaagcttgcaggaagaatactcaatattcagttcgaaaacatcacactcgcctacaataaaacaccagagtaccttgggtgacttgacagaaccctatcattcaaggaacatctgaccaaaacagcggaaaaacttaaatccagaaacagcatcatccagaagctgtgcggcacaacatggggagcatcggctttcaccttgcgatgatctgccctgggcctagtcttctcaactgcggaatactgctcttcagcatggcttaacagcccacatatacacaaagtagatgcccaattgaataatacaatgagaatgattgctggagttatcaaatccacctctacgcaatggctcccagtactgagccacattccaccacccaaactacgacgcatacacgcactcactagtgagtacagaaagatagtagataacgagaacctgccaatccatcaagatatagatgccgccaacggtaaccgtctacgctcagacgaccagccaataaaaacagcaaaggttgctgtggaaactgagttcaatttaacgacaacatggactcgagaatggatggaacaacaaaatagcaacttaccctgcatcacacaaaaaccaccaggctttgacttaccacgcaacacatggtctatgctgaaccgaatcagaacccaacacggcagatgtggttacatgatgcacaaatggggtaaacgaccatccccactctgtaactgtggacaaccacaaaccctatcacatcacagaacagtgtccacaagatcatatcatggcaggtcagaggatttcctgatggcgactccagagtcgatagactatgtaaataagttagatgtacgtttctgaacctatgtattgtcttatacaaaatatatgtaaatgtaaatgtgtcaggtgccatacgataaataagataa

SEQ ID NO: 4808 - DNA, 2317 bp, Diabrotica virgifera
  SmartBlast Evalue=0; Info=Serine/threonine-protein phosphatase 2A 56 kDa regulatory subunit epsilon isoform (Fragment) n=2 Tax= Apocrita RepID=E2AI01_9HYME
aattgatgtgagtgtcgatattttaacgtttggaaccgaaaagtgtcaatttggaagtgcgcttgactattgcaaacctccccatctattttcagtcctaggtacctacggcatcgcaaatcattcagactaaaaaatattactcgttaattttacgaaatttagtaaaagtgaagtgtgacggataaattgttggactcgtttatcgtgagaaaaatgtgcaaacaaaaactgaatgtgtaaaaatcgttattttcgagtaattttgttcagcaataaccagctgatggcgggtgaaaatacgggaatggcttggcagttgagtgatcatacattggaagatttttagagtgatttttatcacgataattgtatatattagccactgagggagaatacaatcgatttaagattaacgaaataatttctttagaatcgaaccagttgataattgggcgtgctctgaagtataagtataagcacacaccttgtggcttgtcattgatatttagcaaccattcataaattctggactataaataccctcaaatgatgcgtttgaaattctgtacaatttgacgaaaattcgaagtagtgaaatgcagagtgatcttatactaacccctttgtaaatagtgtgtttgcttgtcttgttatttttgttactactgaaggtttctattagccacaatgtcggcgacgacattcgtcgatagaattgatccttttgccaaaagatcactcaaaaagaagaccaaaaagtcacaaggcagttccagatacaggaactcccaagatgttgaacttcaacccctacctcttcttaaagatgtaccagcatctgaacaagaagaactgttcatacgtaaacttagacagtgctgtgtagcatttgattttatggatccagtggcggatctaaagggcaaagaggtgaaaagatgtaccttgaatgaattggtggattatataactggaggacggggtgttcttactgagcctgtttatccagaaattattaaaatgatatctgcaaacctatttcgaacattacctccaagtgaaaatcctgactttgatccggaagaagatgatcctacattggaagcgagctggcctcatctccaattggtttatgaattttttctaagattcttagagagttcagactttcaaccgacaataggtaaacgtgtgattgaccagaaatttgttctgcagctgctagaattgtttgattcagaagatccgagggagcgagattttcttaagacagtattgcatcgtatatatgggaaatttttaggccttcgagccttcattcgaaaacaaattaataatatatttttgaggtttgtgtatgagactgaacattttaacggagttggtgaacttttagaaatcttaggttccataataaatgggtttgcgttaccgctaaaagttgaacacaagcagttcctggtaaaggtactaatacctttacataaggttaagtgcctgtcactctatcacgcgcagctagcctattgtgttgtacaattcttagaaaaagacccgagcttgacggaacctgtcgttagaggccttctcaaatattggcccaagacttgtagtcaaaaagaagtgatgtttttgggagagattgaggaagtcctagacgttattgaaccatcccagtttttgcgcattcaggaaccgctgtttaggcaaatatctaaatgtgtttccagtccacatttccaagtggcagagagagctttatacttctggaacaacgagtatattatgtctctgatggaagaaaataaccgtgttataatgccaattatgttcccagcattgtatcgtatatccaaagaacactggaaccagactatagtcgcacttgtatacaatgttcttaaaacatttatggaaatgaactctaaactttttgatgaacttacagtcagttacaaagctgaaaggcaaaaggaaaagaaacgagagaaagaacgagatgaactttggaagaaattagcagagcttgagatatcacataataaaaccacgcctgcacaacttaatagcccatccaacaaaaagtgataatataataacagcctaattaaccctgccccttgttaattgtttgctggtaagatatcatgtcccattgtcccatttgaaattatcatcatagaacctactaaatagcggcaaatattgaatggagatttgttgcagctgaaattttttgtcaacctgttgcatgcattgaaagaaaaagacattgatttcgtataatctaatagacagatttaaagtagaaatt

SEQ ID NO: 4809 - DNA, 473 bp, Diabrotica virgifera
aggcgttgttaacaattcttctctagccaacatatcagaaaataccatccgaataaaactacacaactgggcggtatcattaatatcggttgaatcgtcaaattgcaaagaaaggaaattatacacttcataggaaaagaaacgagagaaagaacgagatgaactttggaagaaattagcagagcttgagatatcacataataaaaccacgcctgcacaacttaatagcccatccaacaaaaagtgataatataataacagcctaattaaccctgccccttgttaattgtttgctggtaagatatcatgtcccattgtcccatttgaaattatcatcatagaacctactaaatagcggcaaatattgaatggagatttgttgcagctgaaattttttgtcaacctgttgcatgcattgaaagaaaaagacattgatttcgtataatctaatagacagatttaaagtagaaatt

SEQ ID NO: 4810 - DNA, 2003 bp, Diabrotica virgifera
aatatacaatctagctctactttttaatattgacaacattcgtaagtattttagtttgttagcggaaaatacaaaaaattatgtaaaaaagttagaaatcatatcattagtcatgtatgttgggttgtcatgaactgtagagtgtttgatcgatagatggcagtgagatcgtgaataagaactaaactcaaggcggtattagaatcataaattaaggttatttttgcaatgaaactgccatttaataaagattctattcgaattgtacctataatagtggagattagtgattggagtacctgaaaatggctaaaatagttaacctacacatttaaattctacaatacctcacgaatatgagtagtttactggtttgccacatttactcttaagctaggtacacctagggtatgtcatgattgacagtaatgacagatctgtgtaacaccctctagtaatcattgataaaaccttaaaagaccgcctaaatagtaaataaccgaaaaataatttttgcaaatttttagcgtcgaaactaatgagaatcattttgaattggctgtaaagtagttaaattttaatagaaatgaagaatggatagatatttaaaaagttatggtgtcgatcaaattccttttgttgaaaaaattctacagtataggatgacccacatctatattaataaactaaggtgtttagaattgattatgacttacataattatacgtggcataaaataaacggtatttttttaaatatttttaaaaaattataataagatgttataaaacaaaaaaaaaggactgataaaatttgaaaatgctagaaaattgtaaacctggcttcgctgtaaatgaaattaataattgtctatttatataggaataattgtcatggtgaaaatcggtggcttttcaagcaaaaaagcatgtgatattttcggggaaataacttttcctctgagacgagccctgattttttttttttaatacgaattgaagattttaaaactgcaaatataaccagtaaaacgttttgcaatatactgtctgtataggtttcatggaacgcatattatgccgatgaaaatgtatatacaaggtgagaatacatagttctcggtctgcggcatagatggcagtgttcatgatagaaggatcatgttcaatcattttttacatcgctttatactttatatatttgtagatggtcaaaactaatagcagtaacagaaagataaaactaaggattttaatacagagtgtaaacgtttattaagtactgaccacaaatggatgtaatttatacgcatttttgtgctattttaagaaaatcctaccaattttctgctttaagagttacgcccggtttcataatcaacttaaagtgaacattaactaaagttcactttaacgttgacatttgcccatatgaattgcattgacaagggtaccaacataaaacttaaagtccactttaactgattatgaaaccgggcgttagtatatgaacatcagcagcttgacagatgacaattggcatgaactgtcaacaggtcaaacaggaaatattaccgagttaaacaaaaaatgaccaggaaaatgttccaataaaaaaactgtaataaacgcaatattgaatagtttcactcatgaattactagaacttcctcctcagtatctagatttggaccatctaactatttatcgagaccaaattgtatacaagataccagcaattgtcagtgattaataaatacctgttgtatttttgaattctcgatattttgttgctgttaacgctgtgatatattcgcataacatattcccaattaattaagttttcatgacatattaaacagttttcatgaaatattttaaaccactaagaaagaatttaatagtggatataattatatatagtcatttattagagaatttatttacttttttgcttacattaacttaatttcagacgttaatacgtcttaattatttcagatt

SEQ ID NO: 4811 - DNA, 789 bp, Diabrotica virgifera
tgacaccaaaaaaacgaagttttgagataaatgcaatcttttcattcatatttacattgtgcttatgggatgatgctacaaattatgtaacgatatttatccaaatataaggtaggttgtgtaggcccttgttaatctgaagatttacgcccggtttcataatcaacttaaagtgaacattaactaaagttcactttaacgttgacatttgcccatatgaattgcattgacaagggtaccaacataaaacttaaagtccactttaactgattatgaaaccgggcgttagtatatgaacatcagcagcttgacagatgacaattggcatgaactgtcaacaggtcaaacaggaaatattaccgagttaaacaaaaaatgaccaggaaaatgttccaataaaaaaactgtaataaacgcaatattgaatagtttcactcatgaattactagaacttcctcctcagtatctagatttggaccatctaactatttatcgagaccaaattgtatacaagataccagcaattgtcagtgattaataaatacctgttgtatttttgaattctcgatattttgttgctgttaacgctgtgatatattcgcataacatattcccaattaattaagttttcatgacatattaaacagttttcatgaaatattttaaaccactaagaaagaatttaatagtggatataattatatatagtcatttattagagaatttatttacttttttgcttacattaacttaatttcagacgttaatacgtcttaattatttcagatt

SEQ ID NO: 4812 - DNA, 1469 bp, Diabrotica virgifera
  SmartBlast Evalue=0.000000002; Info=Endonuclease-reverse transcriptase HmRTE-e01 n=1 Tax=Heliconius melpomene RepID= C6Y4D5_9NEOP
caatacattaatcaaaataaccgtatcgtttcatttttaacttcaaagatatcgaaagctaatgactttatcgttacgaatgaagagtatattattttcatagaaagtgttggagaatccaaggattgaactaaaatagtaattccgccagtggcgtagagtttgaggggggtcaaccattcacttcccccgtcgtgcgcctctggtaacagccagaaacgtttgtttgacataatttagtggttggtacagtacctatacttactgccaagtatgagggggatgcgtcgaatggttttgaatgctgagcaggggtagtttttgaatttttagatgaaacaccctgtaactcagtaaggaaccacattttatttagtgtttcaggttaaatcttcgtattttgtgctaaggtttctccacttactatatggacaattattaatgaaacaccctgtatagtcttttgagtcccttttactttacagtgtccggactgacacatcttttcatatgtgtcgaccattgcttcttgttatgtgctaatctgcttgcttctgctattgtttttcccttcatttgaatgattttcgcgactgctgtatcccaatcttctctaggccttcctctagttcttttcttttgtatcctggcttcccatattttcttcatctgtatgttatctttcattcttttcatgtatcgccaccaacttattgtttttcttcaatatactcaagtactgatttcgtcttaagatctgtccgtatatctgtgtttcttattctgtttctcattgtcactcctctatctctccgtaaacatttcatctctagggtttgtatcttactctttagtttgcttgttaatatccatgattcgaagccgtatgtaagtactggtctataatatatgattttaaacacagttaatttgggttttcttgtaatttttttcttgtttaagaagttattttttattgcatggaatagttttgatgttttactaattcattcttcaatgttcttctttgtctgtcttccattattttcaattgtaacgcctaagtattggaaatggggcccttgttctatttcatctccattaatttgtatatttattgcgagttgttcttgcgacattaccatagtgcttgttttatttgttttgattttcataccatgtttacatgcttgattgttatttatgttaattttcaagattcaatacagaattcaaaaaaaaaattaagtttttaaggtaaaatgcatctacttctcaaggtaatctaaatggacaggtcgtcaattaaaaaatccgttttgaattcaagaagccatagcatgtttattctgtggaatagtctttcttttgttttcaagtttattcatgttgtgaaaaacatacattatccatttttaagaagttatgtataaaactttttgattaaaattcttatttctaaccagtgg

SEQ ID NO: 4813 - DNA, 1271 bp, Diabrotica virgifera
  SmartBlast Evalue=0.000000001; Info=Endonuclease-reverse transcriptase HmRTE-e01 n=1 Tax=Heliconius melpomene RepID= C6Y4D5_9NEOP
cctctagtagtagctagaaacgtttgtttatcataatttagtagggtgtctagtagtcacactttctgttaagtatgaaaaggatacttcgaatggttgtggaatgctgagcaggaatggtttttgaatttttggatggaacaccctgtaactcagtaaggaaccacattttatttagtgtttcaggttaaatcttcgtattttgtgctaaggtttctccacttactatatggacaattattaatgaaacaccctgtatagtcttttgagtcccttttactttacagtgtccggactgacacatcttttcatatgtgtcgaccattgcttcttgttatgtgctaatctgcttgcttctgctattgtttttcccttcatttgaatgattttcgcgactgctgtatcccaatcttctctaggccttcctctagttcttttcttttgtatcctggcttcccatattttcttcatctgtatgttatctttcattcttttcatgtatcgccaccaacttattgtttttcttcaatatactcaagtactgatttcgtcttaagatctgtccgtatatctgtgtttcttattctgtttctcattgtcactcctctatctctccgtaaacatttcatctctagggtttgtatcttactctttagtttgcttgttaatatccatgattcgaagccgtatgtaagtactggtctataatatatgattttaaacacagttaatttgggttttcttgtaatttttttcttgtttaagaagttattttttattgcatggaatagttttgatgttttactaattcattcttcaatgttcttctttgtctgtcttccattattttcaattgtaacgcctaagtattggaaatggggcccttgttctatttcatctccattaatttgtatatttattgcgagttgttcttgcgacattaccatagtgcttgttttatttgttttgattttcataccatgtttacatgcttgattgttatttatgttaattttcaagattcaatacagaattcaaaaaaaaaattaagtttttaaggtaaaatgcatctacttctcaaggtaatctaaatggacaggtcgtcaattaaaaaatccgttttgaattcaagaagccatagcatgtttattctgtggaatagtctttcttttgttttcaagtttattcatgttgtgaaaaacatacattatccatttttaagaagttatgtataaaactttttgattaaaattcttatttctaaccagtgg

SEQ ID NO: 4814 - DNA, 1807 bp, Diabrotica virgifera
gtgtattgttcagttttgttgtgattttttaatggaagtacatatacgaattttaattcatttttagtttgtggttctaatgagacgataatacaattggaagatgctggtaataaaaaagatgatgatacttctaacactttggctgtcagttaatttggccatgtgtagaaaaaatctaggtgatgaagaggaggagattttacatcccgttctaaggaagtttcagaaacgtcagatatgccaagagctgtgttcatcaggtttaggtggaaattcatgcggaaaagattgtgtagaaatttttcaacaaaaaatatatatgcagctgtctacatctacagatttaactggaaatcacgttactaaaaacgtgcctagaaacgacatgtgccctattctttgtaaatacaatttgggcaaaccattgtgcgtatgttcgcaagtgcaaaatgttgtttcatcgaaagccattaattttttggaaatttgcagtgaattttgcattaaacacaactacaggatctctggttgccaaaaatgcagcatttaccaacaagcaactttaccaagaaagtcggcttcaggtataccagatccaaatgaaatagattggaatgcgtggtgcactgtgaaatgtaatgaaaatgatggtggagcagcttgtgattgtgaccgctcacctatgtcggattagtatcttaagaatgctatatcaacataaaaacaattttaatgtaaattttacgcataaaaggcagatatagttatttattaaatattttacacagttatttattacatcttcagtgacattttgtaaaaaagtggactatcctcaagatattttttttatttctttagttgtaatattaacaagaatatgcaaaaataatagtgttaaatatatctaaaaagaagtggtcttaacccgggagcagtcgcgtcgttataaaaaaatttcacattttatccttttccgtgataacttgatgaaaaattttgcaacataactttccactagtaagtgcctcgaggatgatcgtagtaatgcgtggaatttttttttaatttttttttaattattttatttttttgtggatgttttggctttggtgagaaccaattagctttaaaattgttagaaatagatatttttaacataaaagtaaataaaaatattataaaataaaaaattgttttattgtgaggtttttctctacgcgcgactacttacgtgacagaagtaactgctcccgggctaaaaaattacgattacttacttttagtatctccaattgtttctgttctgccattctccgtctccaacgactggagacgttggctgaaagaaagaaaaaaatccttatacagggtgattgattggtggggtggaggtcaatacatccgctatagtggtagatagcagtaagggttgataacagggattttagccacctttgagcttcatattacaaattggttggaatgttgcagggtgttcgatacagagtggcagacctaacttgggttttttttaaatgtaacaccctatattttgttttatattcgaggtcctgttaacttctccatcgcagattataaaggtttgtaatgttatgcagggcatttgcagggttataaccgattttttatgaagtcgtacaagttcggctccctgtataaatgaaatgggcacaacagcagtggtttgttgatgccatgtttttttactttttgtcaaattttttaggaattgttcatattgctaactttctttatatcaaatacagggtgagtcgggacg

SEQ ID NO: 4815 - DNA, 946 bp, Diabrotica virgifera
gtgtattgttcagttttgttgtgattttttaatggaagtacatatacgaattttaattcatttttagtttgtggttctaatgagacgataatacaattggaagatgctggtaataaaaaagatgatgatacttctaacactttggctgtcagttaatttggccatgtgtagaaaaaatctaggtgatgaagaggaggagattttacatcccgttctaaggaagtttcagaaacgtcagatatgccaagagctgtgttcatcaggtttaggtggaaattcatgcggaaaagattgtgtagaaatttttcaacaaaaaatatatatgcagctgtctacatctacagatttaactggaaatcacgttactaaaaacgtgcctagaaacgacatgtgccctattctttgtaaatacaatttgggcaaaccattgtgcgtatgttcgcaagtgcaaaatgttgtttcatcgaaagccattaattttttggaaatttgcagtgaattttgcattaaacacaactacaggatctctggttgccaaaaatgcagcatttaccaacaagcaactttaccaagaaagtcggcttcaggtataccagatccaaatgaaatagattggaatgcgtggtgcactgtgaaatgtaatgaaaatgatggtggagcagcttgtgattgtgaccgctcacctatgtcggattagtatcttaagaatgcaatatcaatataaaaacaaatttaatgtaaattttacacataaggagcagatacagagcagttagtttattaagtattgaccaagtatttccccctcagatcatcttcagtgacatttcgtcaaaaaagaagactatcctcaaggtattttttttatttctttagttgtcatattaacaaaaatatgcaaaaatatgtgtgaaatatatctaaaaagaagtggccttaacccggg

SEQ ID NO: 4816 - DNA, 1390 bp, Diabrotica virgifera
  SmartBlast Evalue=1E-157; Info=ELAV-like protein 4 n=1 Tax= Camponotus floridanus RepID=E2AXJ5_9HYME
aacgaactcaagcgcgttgtagttgtattcgtttttaatttttttttctttttctttttagtttgtttttagtttgccttttctagtaatttcggttgatttatatttttagttactttgaaacggttgtgacatttccacatgtttatttttttggatttagattgtaaatagggtagcccttgcccgagaaatacgaaaaatatacaaaaggtagccatctatttataccaataaacaaacagaacaccaactaagttaagtgtacaggataagtttattatcgtagacgatttgttaaataaaacagaaaaataggtttatcaacgtttcatttgactgaattaaaaattaagaaaggaaaaaataatacaatcatgatgtccaatggtttagattccggtgtagttggacaacaaaatggcaacagtggcaacagtgtcggaggcggacaagaagaatcaaaaactaatctcattgtcaactatttacctcaaaccatgacacaagaagaaattagatctctgttttccagtattggtgaagtcgagagttgcaaactaataagggacaaagttacagttcccggggttatgactagtccattgcttacagggcaatccttgggctatggatttgtgaattaccaccgaccagaagatgcggagaaggccatcaacacactaaatgggcttcgattacaaaataagacgataaaggtctcttatgcccggccaagctcagaagcaatcaagggagcaaatttatacgtatcaggactaccaaaaaacatgactcaacaagatttggaatccctattcagtccttttggtagaattataacatcgcgcatcctttgcgataatatcacagtacgtcaatttgtctcgggggccggagaaaatttgcctggcctttctaaaggagtaggttttattcgatttgatcaacgcttagaagccgaaagagcaatccaagaattgaatggtaccattcccaagggatctaccgagcccataacagtgaagtttgctaacaacccaagcaacaacaataaagctattcctccgttggcagcctatcttactccacaagcaacccgtagattcgctggaccgattcatcaccctacaggtcgcttcaggtactctccgctggctggagacctgttggcaaattcgatgttgcctggaaacgcaatgaatggctctggttggtgcatctttgtttataatctagcacctgagacggaagaaaacgttctctggcaattgtttgggccattcggcgcagtacagagtgtcaaagtgatcagggatctccaaacaaacaaatgtaaaggttttggattcgtcacaatgaccaactacgacgaggcggtcgtcgccat

SEQ ID NO: 4817 - DNA, 1357 bp, Diabrotica virgifera
  SmartBlast Evalue=1E-160; Info=ELAV-like protein 4 n=1 Tax= Camponotus floridanus RepID=E2AXJ5_9HYME
aacgaactcaagcgcgttgtagttgtattcgtttttaatttttttttctttttctttttagtttgtttttagtttgccttttctagtaatttcggttgatttatatttttagttactttgaaacggttgtgacatttccacatgtttatttttttggatttagattgtaaatagggtagcccttgcccgagaaatacgaaaaatatacaaaaggtagccatctatttataccaataaacaaacagaacaccaactaagttaagtgtacaggataagtttattatcgtagacgatttgttaaataaaacagaaaaataggtttatcaacgtttcatttgactgaattaaaaattaagaaaggaaaaaataatacaatcatgatgtccaatggtttagattccggtgtagttggacaacaaaatggcaacagtggcaacagtgtcggaggcggacaagaagaatcaaaaactaatctcattgtcaactatttacctcaaaccatgacacaagaagaaattagatctctgttttccagtattggtgaagtcgagagttgcaaactaataagggacaaagttacagggcaatccttgggctatggatttgtgaattaccaccgaccagaagatgcggagaaggccatcaacacactaaatgggcttcgattacaaaataagacgataaaggtctcttatgcccggccaagctcagaagcaatcaagggagcaaatttatacgtatcaggactaccaaaaaacatgactcaacaagatttggaatccctattcagtccttttggtagaattataacatcgcgcatcctttgcgataatatcacagtacgtcaatttgtctcgggggccggagaaaatttgcctggcctttctaaaggagtaggttttattcgatttgatcaacgcttagaagccgaaagagcaatccaagaattgaatggtaccattcccaagggatctaccgagcccataacagtgaagtttgctaacaacccaagcaacaacaataaagctattcctccgttggcagcctatcttactccacaagcaacccgtagattcgctggaccgattcatcaccctacaggtcgcttcaggtactctccgctggctggagacctgttggcaaattcgatgttgcctggaaacgcaatgaatggctctggttggtgcatctttgtttataatctagcacctgagacggaagaaaacgttctctggcaattgtttgggccattcggcgcagtacagagtgtcaaagtgatcagggatctccaaacaaacaaatgtaaaggttttggattcgtcacaatgaccaactacgacgaggcggtcgtcgccat

SEQ ID NO: 4818 - DNA, 1406 bp, Diabrotica virgifera
  SmartBlast Evalue=1E-15; Info=Pol-like protein n=1 Tax= Biomphalaria glabrata RepID=A3FMR3_BIOGL
gcttaagattatgcctaggttatttaaaatccactccagtgtaaataatggaaaatgaagcagtggaacctccattgcatttacgccgccaatttctcagtgataaatttacaactcgaattctgtccaaaaaatgtaaatacctttaagatctacatgagctatcagttttagacctcactcataggtactggagaactaaaaaatctatacctttggtagaaagttatcaaagtacggtaaagcacagtgaagttatctataaaagccaaattccgccttactacagtgcaatgacaaaaacattattttctaacaaggttaaaacatgttatttaaactcacatttaccgccaaatatgtttgatatacttattagagaaaaatggttaaattttcagtacatatttaccgatgggtcaaaagacgcaaatggaacgggctgtgcagtattccacgaaaataaaaattaccatcatcaatatagcctacctattgaatgctcaatataaacagcagaaatgatagcagtaatgtttgctgttcagtatgtactactgaatccaactagcaattatgttatatttactgacagtaaaagcgtggtggacagattgagtaacattcaaacagtcaaacacataaaccacattgaattgaatattcttaaaactctgtttgaaattatacaattaggagtaaatgtaacaattgcttggattaagggtcattcgggaataaaaggcaatgaaatagttgacaattttgctaaatcagcttatgtgatcggagaaaaaataaacaaaaatttaattccagcttcagatattgatactttagcagacaaaaacttaaaaataattggcaattgcattacagagaatgtaatactggctcaaattttgctcattgtaaccctaggatattctcaaaaagatggttttacacagaatataacagacattttataaagaccattaatcgttgagagccaatcatgctcttacgccatcttacatgcatagaatcggcttggcagatactcccaattgtacttgtggcaaaatcggagatctaacacatgtcatattagaatgtcatttaaacataaataacataaacgacctttataaggaattaaaagatttaaaatgttttttcccaataaaccttaatactttaatatttacaaatgatatggaaattcttcatctcatttataaacatgttaaattatgtaaatacaagttgtaaacgtaatataataggcataatttgttaatgtggtttgaaaaaataaaaaaaaataatatataaaaaaacacataataaaataataacaaaaaaataataaataaaaaaagaaaaaaaaatagaaacaaaaataaaaaaaagaatagaaaaaa

SEQ ID NO: 4819 - DNA, 1324 bp, Diabrotica virgifera
  SmartBlast Evalue=1E-11; Info=Pol-like protein n=1 Tax= Biomphalaria glabrata RepID=A3FMR3_BIOGL
tttatttgtgtatgttattttacaccttagacactttttacctgtttctattgaccctacaaatgtacgaataggaacacaatagtttttaatacatgtgttcccacaataggaacaccaggttttgattttttgtgattaaagtacatattaactttttaacttattaacatgatttgacaaatattataataataatttgacttattaaatgacaaaaacattattttctaacaaggttaaaacatgttatttaaactcacatttaccgccaaatatgtttgatatacttattagagaaaaatggttaaattttcagtacatatttaccgatgggtcaaaagacgcaaatggaacgggctgtgcagtattccacgaaaataaaaattaccatcatcaatatagcctacctattgaatgctcaatataaacagcagaaatgatagcagtaatgtttgctgttcagtatgtactactgaatccaactagcaattatgttatatttactgacagtaaaagcgtggtggacagattgagtaacattcaaacagtcaaacacataaaccacattgaattgaatattcttaaaactctgtttgaaattatacaattaggagtaaatgtaacaattgcttggattaagggtcattcgggaataaaaggcaatgaaatagttgacaattttgctaaatcagcttatgtgatcggagaaaaaataaacaaaaatttaattccagcttcagatattgatactttagcagacaaaaacttaaaaataattggcaattgcattacagagaatgtaatactggctcaaattttgctcattgtaaccctaggatattctcaaaaagatggttttacacagaatataacagacattttataaagaccattaatcgttgagagccaatcatgctcttacgccatcttacatgcatagaatcggcttggcagatactcccaattgtacttgtggcaaaatcggagatctaacacatgtcatattagaatgtcatttaaacataaataacataaacgacctttataaggaattaaaagatttaaaatgttttttcccaataaaccttaatactttaatatttacaaatgatatggaaattcttcatctcatttataaacatgttaaattatgtaaatacaagttgtaaacgtaatataataggcataatttgttaatgtggtttgaaaaaataaaaaaaaataatatataaaaaaacacataataaaataataacaaaaaaataataaataaaaaaagaaaaaaaaatagaaacaaaaataaaaaaaagaatagaaaaaa

SEQ ID NO: 4820 - DNA, 1571 bp, Diabrotica virgifera
ggaaagatctgtatgaaattgaaaagtgggaggtcatcatcagtgttcgatactttgtttcgtttagttaatatttcaattttctccttcttaagaattctagaagccgcttatatattctgataatattagttgttcagttgaattgaaatgctttctataatataaggaaagttaaaataatcactaccttgatagaaacttcaatactttaggtaaaatcagcatatttattcgaataaattataaaaggttgcattgataactcgattaaaagaagtaatgtcagttgagtaatggaaactttaatataactttaaaatatgttatgaaactgttaattcgttttagatattcatctttaagtaaaaattatacatggtcagaataatttttaaatcagtaaataattaagaatttttaacagtaatttacatattaaatttggtgtaacaagaatatttaactgtcgtgtggagaaatatagttttttaaaacgaatttttcatattttcaattataattctagatcttcttcttcttgtgccactcctatcggagattggaaatcatcaaggctaccctgaccttgtttacagctgacctaaaaaattcattagtggtgcagccaaaccactctctcaaattccgcaaccatgacattcttctacggcctggattccgttttccttctatttttccttgcattatattttgaagtaatgcgtatttatgcctctcagcaggtgacccaaatattcgagttttcttcgttttatcgttaacaaaatttctgggtcttttcctatccttcgtattacttcaaggtttgtgattctttcaacccaaattatcttcagcattcgacggtagacacatctcgaaactttcaattctagatacatgttccttattctgctcaacgttgacatttattcttactatagcttttttgtaaatgcagattattttcaagagtgttgattgtttatgttattggttcatagttaaggttacatatagcagatatatacgcagttactgaaacattccttttatgcttgtttagagtcttttaaaagtgcaattgatatgataaataacttatttaatgtattttaataaaacactaggttactatcagtattggcgtaaaattccggccatggactctatgtacatggcaaaaataagatttagattttgatagaatgtttgtacagtatttgaaaattattctattatgtacaggttttcaaaaaaaggtagtgggtatataaaagggattacaacattatagagttgtagattttacaataattcgtcaaattagttcacataaacaaaaacttaactttatccgcccatttattacattccatttatctgcccttttactatttatatagatgtgtttcttcataattttctggctctattgtatattttcacttcaggtgattcttactgttttcatccttagcttcgatatttttccatgcttttgttggacttttgttttcccacaccatttttgcttccttatgtctatctgcattttaagtcccaac

SEQ ID NO: 4821 - DNA, 1163 bp, Diabrotica virgifera
  SmartBlast Evalue=0.000000009; Info=Endonuclease-reverse transcriptase n=1 Tax=Bombyx mori RepID=D5LB38_BOMMO
gagaagagcacttgaatgatggaaaaatggcatctcaataaagggtcataaaacaaacaacctacgtttcgcagatgacacagcccttcttgcaaatagtcaagcagagccgattgatcttatcttcttcttcttgtgccactcctatcggagattggaaatcatcaaggctaccctgaccttgtttacagctgacctaaaaagttcattagtggtgcagccaaaccactctctcaaattccgcaaccatgacattcttctacggcctggattccgttttccttctatttttccttgcattatattttgaagtaatgcgtatttatgcctctcagcaggtgacccaaatattcgagttttcttcgttttatcgttaacaaaatttctgggtcttttcctatccttcgtattacttcaaggtttgtgattctttcaacccaaattatcttcagcattcgacggtagacacatctcgaaactttcaattctagatacatgttccttattctgctcaacgttgacatttattcttactatagcttttttgtaaatgcagattattttcaagagtgttgattgtttatgttattggttcatagttaaggttacatatagcagatatatacgcagttactgaaacattccttttatgcttgtttagagtcttttaaaagtgcaattgatatgataaataacttatttaatgtattttaataaaacactaggttactatcagtattggcgtaaaattccggccatggactctatgtacatggcaaaaataagatttagattttgatagaatgtttgtacagtatttgaaaattattctattatgtacaggttttcaaaaaaaggtagtgggtatataaaagggattacaacattatagagttgtagattttacaataattcgtcaaattagttcacataaacaaaaacttaactttatccgcccatttattacattccatttatctgcccttttactatttatatagatgtgtttcttcataattttctggctctattgtatattttcacttcaggtgattcttactgttttcatccttagcttcgatatttttccatgcttttgttggacttttgttttcccacaccatttttgcttccttatgtctatctgcattttaagtcccaac

SEQ ID NO: 4822 - DNA, 1401 bp, Diabrotica virgifera
  SmartBlast Evalue=1E-161; Info=Serine/threonine-protein kinase PFTAIRE-1 n=3 Tax=Aculeata RepID=E2B884_9HYME
cggtaattatatgtcgagtttttgttcaaaatcgagagttttttaagtgttcatgtggtttttgtgatacaagtgtgactgtgcaatggcgcattcgtgctatcctctacctgacgtttggaataatatgctattattttttcatataagaaaaaagagcttaccaggtttaccaacatcaggcgtcaccatgcgagagaaaaagagcggagctctatctcgaatgcaaaagctcaagaagaggttatcacactcttttggacgattatcggtttcgaaggaagaggcggaagaacacaaccatcatggcaaactaccgtacaatgggtacagtgacgagttcctagaccgactagaacctaatggaaacatacctgccggtaaagttaatattagatacggcgaatattcaacttacggtagaagcggagaaatgggttctatgcggagcgcacaatcagctgagtggaatagcgttgccggacatgacagggtgaaaaggcaattgtctgtttctagcgatagtaaattgttagacgatgatattcgagaagaaacgaaagtgatactacggccgagaaaacccccgagacccaaatcggaagtgttgctcaatcagggtactgaccaccgacgaacgaagagatactccgcttttgggggtgattctccgttcggaaagtcagaagcttatattaaattagaacaattaggtgaaggttcatatgcaaccgtgtacaaaggatttagcaatttacaaaaccaagttgtggcattaaaagaaataattctgcaagaagaagagggtgctccatttactgctatccgcgaggcttccttattgaaagaactgaaacatgcaaatattgtcactttacatgacattgtacataccagacagacactaaccttcgttttcgaatatgtgcacaccgacctttcccagtatctagaacgacacagtggtggattggaccctcgcaatgtccgattattcctcttccaactactacgcggtctattatactgtcacaaaagacgagtgcttcaccgtgacgtcaaaccccaaaacctcctcatcagcgaaatcggcgaattgaaactagccgatttcggcttagctagagccaaatcagtacccagtcacacttattcacacgaagtggtgacgttatggtacagaccaccagacgtcctactgggaagtacggattattctacttcactggatatgtggggtgtaggttgtatatttgtggagatgattaccggtatggccatatttcccggagtcagggacactattgatcaactagataagatatttaaaatactaggtactccaacagaagaagactgggccggggttagtcaactgccgggattttataaaatccataa

SEQ ID NO: 4823 - DNA, 1338 bp, Diabrotica virgifera
  SmartBlast Evalue=1E-165; Info=Serine/threonine-protein kinase PFTAIRE-1 n=3 Tax=Aculeata RepID=E2B884_9HYME
cggtaattatatgtcgagtttttgttcaaaatcgagagttttttaagtgttcatgtggtttttgtgatacaagtgtgactgtgcaatggcgcattcgtgctatcctctacctgacgtttggaataatatgctattattttttcatataagaaaaaagagcttaccaggtttaccaacatcaggcgtcaccatgcgagagaaaaagagcggagctctatctcgaatgcaaaagctcaagaagaggttatcacactcttttggacgattatcggtttcgaaggaagaggcggaagaacacaaccatcatggcaaactaccgtacaatgggtacagtgacgagttcctagaccgactagaacctaatggaaacatacctgccggtaaagttaatattagatacgagtggaatagcgttgccggacatgacagggtgaaaaggcaattgtctgtttctagcgatagtaaattgttagacgatgatattcgagaagaaacgaaagtgatactacggccgagaaaacccccgagacccaaatcggaagtgttgctcaatcagggtactgaccaccgacgaacgaagagatactccgcttttgggggtgattctccgttcggaaagtcagaagcttatattaaattagaacaattaggtgaaggttcatatgcaaccgtgtacaaaggatttagcaatttacaaaaccaagttgtggcattaaaagaaataattctgcaagaagaagagggtgctccatttactgctatccgcgaggcttccttattgaaagaactgaaacatgcaaatattgtcactttacatgacattgtacataccagacagacactaaccttcgttttcgaatatgtgcacaccgacctttcccagtatctagaacgacacagtggtggattggaccctcgcaatgtccgattattcctcttccaactactacgcggtctattatactgtcacaaaagacgagtgcttcaccgtgacgtcaaaccccaaaacctcctcatcagcgaaatcggcgaattgaaactagccgatttcggcttagctagagccaaatcagtacccagtcacacttattcacacgaagtggtgacgttatggtacagaccaccagacgtcctactgggaagtacggattattctacttcactggatatgtggggtgtaggttgtatatttgtggagatgattaccggtatggccatatttcccggagtcagggacactattgatcaactagataagatatttaaaatactaggtactccaacagaagaagactgggccggggttagtcaactgccgggattttataaaatccataa

SEQ ID NO: 4824 - DNA, 1615 bp, Diabrotica virgifera
  SmartBlast Evalue=1E-48; Info=Serpin peptidase inhibitor 4 n=1 Tax=Tribolium castaneum RepID=D6W6R7_TRICA
aatatcatcaatcaatcccatttcatgcatttgcttcagctgtgcttgccattgtatacttaaagtttcataagattgctggtcatcttctctattgttagtattaggagtactagaagaaaaacccctgctagatcctcccaaaccaatagcctgctgtatggcattggaaatttcgtttgtgattatattcgaggaattagagttactggtaggtaccccagcactgttcgtattaaactgtgtatttgttgcatttgcaatagcagcagccaattgtgagttatagcattgaatgaagtattccttgttaaggggttctgtgaaaaactagtgtcggaacttgaatccatttcttcatcatcatctgaaagggcttctaaagaataagaatatcctgtgctggtaccggcttggtttggatttaagctggcttgttcctgttgaacctgggcaacaatataacttcctgcttcaagtagcactgggtgtttttctataatttcatttccttgctctggagttgataggtaaaacattaactcagggtcttgaattaaggctatagctgctggatcttccaagaggctggggcaagattctattattttttgaacaacttcagagcgagtgagcctctgtaaggctaacctatagtttgaaaacatgacgagagttctaaaggaagatattagttcatttggagacattttattgttgactactggaggaaccctagaatatttttcaaatacatgaattgtaacaccatcagcaatgccataggatgataatgtgttttcatcttccaaaattagcccacaatatgaaaattctaatgttttagttgaatccttcacttcttgcaaagcttgtgttttaaaaatatgtactttattttctatgtctacattactaatcttaattctttgaggcccatttgagctattccaaattcctaaatttatcgttgccattgctgagctcgtattaacaaattttactaataaagaagaagcgggacataccattaactcgtgggcagaacaacaaacaaatggaaggatacacaaactaatcgatccagctgatcttgcagacgctttaatggtaatatccaacgctgtgtattttaaagggacttggaaatatcaatttcccttccagactgtagataaattttacgttccagatggaaacaatttcttttccattcaagctcggtttatggctgtagaagataaattttattttcatgaatctcccctattggacgctaaaattttaagactgccttataagggagggcgctactccatgtttatattattaccgaactcgaagggaggtttaccaagtttaattaagcaaataaacataaataacttaaaaagtttgttgtatttgatggatcaacgtcttgttaatgtcacgatccccaagtttcgcttcgattttcaagcgaggtttagtagaactttacaagagtttggtacttcaaatgtttcaaaacacgcagtttcccgggaattcagaggagatagcaccattttgagaaaattagtcgtttcggacattgtacagaaatctggcattgaagttaatgagtatggaa

SEQ ID NO: 4825 - DNA, 1074 bp, Diabrotica virgifera
  SmartBlast Evalue=4E-87; Info=Serpin peptidase inhibitor 4 n=1 Tax=Tribolium castaneum RepID=D6W6R7_TRICA
gcaaaatgttgttgggattttttatattgggaacatgcctgttgcatgtaggacactgcaattcatccccaaccacaaatactgttgaagacatagatgtttattatccaaatataaattggtcaaatatttttgattggaggatattaaaagaatattctcctacatataaaaacttgttggtgtccccaattagtttaagaataattttggctctgctttatcaaggctccagcggcctaactaaaagagaatttgaatctgtgatgcattttacagaccaacaatctgcgagagaggaatttaggaatatccttaacaaattacaggttgccgaatctccagaatatactcttaatttaggaacacgagtttttctagatatcccagtcgcaccacagcagaaatttgcaagtattgccaaagacttctttaaaaccgagctcgtattaacaaattttactaataaagaagaagcgggacataccattaactcgtgggcagaacaacaaacaaatggaaggatacacaaactaatcgatccagctgatcttgcagacgctttaatggtaatatccaacgctgtgtattttaaagggacttggaaatatcaatttcccttccagactgtagataaattttacgttccagatggaaacaatttcttttccattcaagctcggtttatggctgtagaagataaattttattttcatgaatctcccctattggacgctaaaattttaagactgccttataagggagggcgctactccatgtttatattattaccgaactcgaagggaggtttaccaagtttaattaagcaaataaacataaataacttaaaaagtttgttgtatttgatggatcaacgtcttgttaatgtcacgatccccaagtttcgcttcgattttcaagcgaggtttagtagaactttacaagagtttggtacttcaaatgtttcaaaacacgcagtttcccgggaattcagaggagatagcaccattttgagaaaattagtcgtttcggacattgtacagaaatctggcattgaagttaatgagtatggaa

SEQ ID NO: 4826 - DNA, 1396 bp, Diabrotica virgifera
  SmartBlast Evalue=1E-180; Info=Ribose-phosphate pyrophosphokinase 1 n=3 Tax=Endopterygota RepID=E2B1Y4_9HYME
cattacaagacccgcttgaacttgaagtggaggctggcgcaatagtacagaaaaacgtagtccgggagttggttaaagagacaccactgttaaagaaaaaaatgccgaacattaaagtatttagtggaacgtcccatccagatttggcccaaagaattgtagaccgacttggtatcgatttgggaaaagtggtcacaaagaagttcagcaacttggaaacatgtgtggagattggagagtctgtgagaggtgaggatgtttacattgtccagtcaggttgtggtgaagtaaatgacaaccttatggagttgttaattatgatcaatgcctgtaaaattgcttctgcaagtcgagtaacggcagtcataccctgtttcccttatgcacgtcaagataaaaaggataagaacatctcgagtgagaaagaactccatgttgagaagtggaaatcaattgaatggaaatttaggagcagggcaccaatttccgccaaactcgtcgcaaacatgctgtctgttgcgggagccgaccatataatcaccatggatctccacgcatctcaaattcaaggcttctttgacattccagtagataatttgtatgccgagcccgctgtgttgaaatggatcaaagaaaacatagcagaatggcgaaacagtataatagtatctcctgatgcaggaggagctaagagagtgacttcgatcgctgataggcttaatgttgagttcgctcttatccacaaagagaggaagaaggctaatgaggttgcttctatggtattagttggagatgtcaaagacagagttgccattttggtagatgacatggctgatacttgtggaaccatatgtcatgcagctgaaaagttaatggaagctggagccaccaaagtgtatgccattctaacgcacggtattttctcaggtccggccatttccagaataaataatgcctgttttgaggctgtggtcgtaacgaacacaatacctcaagatggccatatgaaagactgttctaaagtacagtgcatcgatgtttcaatgatgtttgccgaagcagtgaggcgtacacacaacggcgaatcagtgtcatatttattttccaatgttccatattagtgcactagttccttatacaatataatatattgattttttacaaaaaaatagaatttaggtatgacgtgtagtaatttttttgactttttaatattatgatcatagtagtaaacgttgagaatgtgatacattgatttaaataaaaaaaattatgtccagttagtttagcagaaagttacctatcagtttgattttgtatgcagcctacatttaggtatatattttaaaatttggtaaagcatgtgaatattgttgaataaataatgtttgtttgt

SEQ ID NO: 4827 - DNA, 1333 bp, Diabrotica virgifera
  SmartBlast Evalue=1E-173; Info="CG6767, isoform A n=3 Tax= Neoptera RepID=Q9VT32_DROME"
cattacaagacccgcttgaacttgaagtggaggctggcgcaatagtacagaaaaacgtagtccgggagttggttaaagagacaccactgttaaagaaaaaaatgccgaacattaaagtatttagtggaacgtcccatccagatttggcccaaagaattgtagaccgacttggtatcgatttgggaaaagtggtcacaaagaagttcagcaacttggaaacatgtgtggagattggagagtctgtgagaggtgaggatgtttacattgtccagtcaggttgtggtgaagtaaatgacaaccttatggagttgttaattatgatcaatgcctgtaaaattgcttctgcaagtcgagtaacggcagtcataccctgtttcccttatgcacgtcaagataaaaaggataagagcagggcaccaatttccgccaaactcgtcgcaaacatgctgtctgttgcgggagccgaccatataatcaccatggatctccacgcatctcaaattcaaggcttctttgacattccagtagataatttgtatgccgagcccgctgtgttgaaatggatcaaagaaaacatagcagaatggcgaaacagtataatagtatctcctgatgcaggaggagctaagagagtgacttcgatcgctgataggcttaatgttgagttcgctcttatccacaaagagaggaagaaggctaatgaggttgcttctatggtattagttggagatgtcaaagacagagttgccattttggtagatgacatggctgatacttgtggaaccatatgtcatgcagctgaaaagttaatggaagctggagccaccaaagtgtatgccattctaacgcacggtattttctcaggtccggccatttccagaataaataatgcctgttttgaggctgtggtcgtaacgaacacaatacctcaagatggccatatgaaagactgttctaaagtacagtgcatcgatgtttcaatgatgtttgccgaagcagtgaggcgtacacacaacggcgaatcagtgtcatatttattttccaatgttccatattagtgcactagttccttatacaatataatatattgattttttacaaaaaaatagaatttaggtatgacgtgtagtaatttttttgactttttaatattatgatcatagtagtaaacgttgagaatgtgatacattgatttaaataaaaaaaattatgtccagttagtttagcagaaagttacctatcagtttgattttgtatgcagcctacatttaggtatatattttaaaatttggtaaagcatgtgaatattgttgaataaataatgtttgtttgt

SEQ ID NO: 4828 - DNA, 1416 bp, Diabrotica virgifera
caggataatcctaagggggttacaactactggaagggggggggggagttacaactactggaaggtctccgaggggtatggtgttaagcgtatagagctcaaagtacatcccaatggagggggttataacccccaaaccccccctggttacgcctatggacggattggtcgggtggtcttgctattccaacattcagacagaatttatagtgtcgacgtgtgtagcgttgttggtctgacctctgactctaatagcggcttctcacgatcggcaatatcgcggacgaacacggactagctcgcaccacgcaccgtgggaagtgtatcgtccgtggtagcacagacgcgtctgtgctggtccgtagtaacaacgtcttcccaagatcgacaatttcgcggacggacacagaccagctcgcaccacgcaccgtgagaaaacttcgtccgtggtagcacagacacgtctggggagatccgtcgaaaatcagtaaagatcaagggtgcgttatgggaccgtgcggacgctgtcatgatattttaacacgttaaacgccagttgcatcatttacatctagatacaaataactttgatcacttaggccacctgtatccaaacggatacaaaggaatactttcactttgggctagctgagcgtttgtatttaattgaatgggagacttatagcccgggaggtagtgccaaatttgaacggagcattttagcacggctgttttttgtttatttagtcaggtgttccaaagcttattaacaaatgatgtgtcagctgacccaaaaccggggcttttaggcaaaaaaagataaaatatgaaactagatggaaaaaccctacaactaatatgtcaaatatttatctccgtgacttacatccatcatggcctaaaatacctagctcctggttttcaccaggcgagtcgggttcgattccccgcgttggaagttttcttttgtttttaaaattgacattttgatttgaaaaataattatttttataataccacgttcttattatttatacgacacatttatatttagttcatatggagagattagcctcatatcagggaactgatccaccctgttggcttccaccagtccctgatagaccagttaatcgaggcgaataactataaaagaaggagcagtgttacgacagtttcgtgagattggtcctacatagaaaaagtttcttgacgggaaagagtaagttaacttctcgaatattcaagatgtcatcgaaaaattccgaaatgtgtacctatttaagtctggaacagttgtatttgaatttttgaagtttatagttgtcattgtattaaaaatattgtaaacaatatgttgttgtaaatcgattttaaagctgtgtaacaataccaaagaaaaaatccacaataacaa

SEQ ID NO: 4829 - DNA, 1311 bp, Diabrotica virgifera
ctcgctgtgtattttcgcgcaaggtcacgcgccaactctggcttgtcggattgtaaactgatacccatttgcttctataatcagtttggattgacgcttaatagttattcgtcgaccaggtgagcgatatgcacagtgcaacataatagcggcttctcacgatcggcaatatcgcggacgaacacggactagctcgcaccacgcaccgtgggaagtgtatcgtccgtggtagcacagacgcgtctgtgctggtccgtagtaacaacgtcttcccaagatcgacaatttcgcggacggacacagaccagctcgcaccacgcaccgtgagaaaacttcgtccgtggtagcacagacacgtctggggagatccgtcgaaaatcagtaaagatcaagggtgcgttatgggaccgtgcggacgctgtcatgatattttaacacgttaaacgccagttgcatcatttacatctagatacaaataactttgatcacttaggccacctgtatccaaacggatacaaaggaatactttcactttgggctagctgagcgtttgtatttaattgaatgggagacttatagcccgggaggtagtgccaaatttgaacggagcattttagcacggctgttttttgtttatttagtcaggtgttccaaagcttattaacaaatgatgtgtcagctgacccaaaaccggggcttttaggcaaaaaaagataaaatatgaaactagatggaaaaaccctacaactaatatgtcaaatatttatctccgtgacttacatccatcatggcctaaaatacctagctcctggttttcaccaggcgagtcgggttcgattccccgcgttggaagttttcttttgtttttaaaattgacattttgatttgaaaaataattatttttataataccacgttcttattatttatacgacacatttatatttagttcatatggagagattagcctcatatcagggaactgatccaccctgttggcttccaccagtccctgatagaccagttaatcgaggcgaataactataaaagaaggagcagtgttacgacagtttcgtgagattggtcctacatagaaaaagtttcttgacgggaaagagtaagttaacttctcgaatattcaagatgtcatcgaaaaattccgaaatgtgtacctatttaagtctggaacagttgtatttgaatttttgaagtttatagttgtcattgtattaaaaatattgtaaacaatatgttgttgtaaatcgattttaaagctgtgtaacaataccaaagaaaaaatccacaataacaa

SEQ ID NO: 4830 - DNA, 1421 bp, Diabrotica virgifera
cctgtaaatcttagtgtacattataatctacctttatatgtcatgtatttagtgggcagtatcgccctaagtatttaagcaaatgatgtgattaaactagcatataatcaacaaaaatacatatttatgaaagttgactatttttccatgcagtaacttccttattgtaaataataaaaaagcaatttaacgacaatatctgatagttatagaacaggttgttgaatctgttgatattatatgctagttatttagtaatatccaagcggagatttaatgaatagtataaaccagaggtggagaacctattaccgttaccattgcctgtttggcaatggtaaattttttttttgtttgttttctggccttgattttgaacctttagccacgtaattactatcactagctcaggggagtaatgtgtagtgtgtgttgaataaatgtcttgttactttgaaaagtcgactttattgtctttacaaagagacgcttattgaatcggaacgtctacggtccctcaggtgagtactgattccacaaggatagaaactatttttttattggtacaccatttggttacttaaagtacgcctcagcgtgtttaaactcgactttcgaaaacgctcgtgttttaaaattaccatgacaacatcaacagttttaaatattgatctgacctgacagaagtatgtaccttgtaacgtcaaataaatcaaatctgaataaaatattcgtaacaaatgtttcaaaagctttattcaaatatttgaaaatcttaatttttttaaatgaatgagaaaagtacagttggtattgtttaaaatatttatacttccgttttttaaatcggagcaaatgctgttcaaattatactactgacattctcggaagccaatgaagttgtacttccattaatggcactcccaataagtttgaaacattctttttattggtaatactctcttcaacgtaaccagtcgccacagctgccgatttccatcctacttttcgttttatttgatctattgtcatgccaatgttctccatagcggacgtacgtcgaaacgcatgtctcgtgtatttttcaggatcgcccaattttagataacgtgcaatttcaagagacatgatctaaatatgtattaataccaactacttgattagtgcacttccctttatcataccgtaagaaaattcgatatgtacttacatttttagggcgcaataataaatacttcttcaccaaacgcacataattaagtgtatcgctatcagcaactgtaaaatttcgagccatcacagtcttaggtggtcggatagtaataagcaatacacatctttctttctaatgccatgtaagtgtaaatcgcacaatccacatcttctgcaagaggcacagacatcgcaaatggctaccacca

SEQ ID NO: 4831 - DNA, 1289 bp, Diabrotica virgifera
cctgtaaatcttagtgtacattataatctacctttatatgtcatgtatttagtgggcagtatcgccctaagtatttaagcaaatgatgtgattaaactagcatataatcaacaaaaatacatatttatgaaagttgactatttttccatgcagtaacttccttattgtaaataataaaaaagcaatttaacgacaatatctgatagttatagaacaggttgttgaatctgttgatattatatgctagttatttagtaatatccaagcggagatttaatgaatagtataaaccagaggtggagaacctattaccgttaccattgcctgtttggcaatggtaaattttttttttgtttgttttctggccttgattttgaacctttagccacgtaattactatcactagctcaggggagtaatgtgtagtgtgtgttgaataaatgtcttgttactttgaaaagtcgactttattgtctttacaaagagacgcttattgaatcggaacgtctacggtccctcaggtgagtactgattccacaaggatagaaactatttttttattggtacaccatttggttacttaaagtacgcctcagcgtgtttaaactcgactttcgaaaacgctcgtgttttaaaattaccatgacaacatcaacagttttaaatattgatctgacctgacagaagtatgtaccttgtaacgtcaaataaatcaaatctgaataaaatattcgtaacaaatgtttcaaaagctttattcaaatatttgaaaatcttaatttttttaaatgaatgagaaaagtacagttggtattgtttaaaatatttatacttccgttttttaaatcggagcaaatgctgttcaaattatactactgacattctcggaagccaatgaagttgtacttccattaatggcactcccaataagtttgaaacattctttttattggtaatactctcttcaacgtaaccagtcgcttacttgtccttggatttcatctgttctattgtacgtcgaaacgaatgtctcgtgtatttctcaggatcgtccaattttggataacgtgcaatttgcaagcgacatgatccaaatgtattaataccaactacttgattagtgcacttgcctttatcataccgtaagaaaattcgatctgtacttacatttttggggcgcaataatacatacttcttcaccaaaagtacataattaattgcatcgctatcagcaactaataatacgctcccttcttctttgatatcatgtaagcgtaaatcgaccaatt

SEQ ID NO: 4832 - DNA, 1366 bp, Diabrotica virgifera
  SmartBlast Evalue=3E-28; Info=TOX high mobility group box family member 3 n=1 Tax=Camponotus floridanus RepID=E2A0U0_9HYME
ctatcaccaccttgattgggaactgtgagaatatggaggccacttactgcgttggtactgatgtagacgtttgccgaatgtttgatcagtacttgtataagagatcagaaaacgttgatttgtccttaagcataccgcaatcaaatttccaatcgaacggatacgacatgggcgatcagggcatgcaacagatgaatcaacaaataaaccagcagcaggatgctctaggcatgcacgatccgacaggagggtttcaacaacccctgtatttatcggggcccgatcacagcatggtcaataattcgtatcacagtcctcagccgaattatccatcgccccagcagcaacagcaacacaacaatcagttgctgatgattcaacagcagcagcagcagcagcaacatcatcagcaacagcagcagcaacaccatcagcaaatgatgatgagtcatggacaaccgcctccctcagctatggggcagtacggggcttccccgcaacatcctcaaggaagaggtaacagtcctccagctccaggacaggagccgactaccagcgatgatagcgatgatagcactccacatcctgccatcataacagcgatgaaaaggccgtctccagaaccggccgatcagacgttaacgaaggcacaaaagaaaccgaaagtacaaaaaaagaagaagaagagggaccctaatgaaccacaaaaaccagtttcagcgtacgcgctgttctttcgtgacactcaagcagctatcaaaggacagaatccaaacgctagctttggtgaagtttctaaaattgtggcttccatgtgggacgctctagattccgaacacaaaaatgtatacaagaagaaaaccgaggctgccaagaaggaatacttaaaagctctggccgcttacagagcgagcttagtatctaaaggtgctggagaaaacgagggaatgtacagtaattatccgaactaccaaggcggcgcaccacaacaatattcgtcataccaaccacagggtaccataccgtcaccgcccatgtctgccccgccgtctgctacccctcccgcccaatcgccaattggaaagaaacctcccatgatgggcggcatgccacagtcgccacaacagggacatcagggaatgatgcagccaggaatggggcctgtgccaaaccacatgaatatgcaacaacacatgcaacagtcccagcaacacaatagttatatgcaacagtttattcgttttctacccaggttcctcagcagcaacacgtaccaatgtcaccacagcaacagcaaccacacgtttcagtatcaccccatagtcatatgcaacagcaatccccccacatgcaacaacacatgagt

SEQ ID NO: 4833 - DNA, 1346 bp, Diabrotica virgifera
  SmartBlast Evalue=3E-28; Info=TOX high mobility group box family member 3 n=1 Tax=Camponotus floridanus RepID=E2A0U0_9HYME
ctatcaccaccttgattgggaactgtgagaatatggaggccacttactgcgttggtactgatgtagacgtttgccgaatgtttgatcagtacttgtataagagatcagaaaacgttgatttgtccttaagcataccgcaatcaaatttccaatcgaacggatacgacatgggcgatcagggcatgcaacagatgaatcaacaaataaaccagcagcaggatgctctaggcatgcacgatccgacaggagggtttcaacaacccctgtatttatcggggcccgatcacagcatggtcaataattcgtatcacagtcctcagccgaattatccatcgccccagcagcaacagcaacacaacaatcagttgctgatgattcaacagcagcagcagcagcagcaacatcatcagcaacagcagcagcaacaccatcagcaaatgatgatgagtcatggacaaccgcctccctcagctatggggcagtacggggcttccccgcaacatcctcaaggaagaggtaacagtcctccagctccaggacaggagccgactaccagcgatgatagcgatgatagcactccacatcctgccatcataacagcgatgaaaaggccgtctccagaaccggccgatcagacgttaacgaaggcacaaaagaaaccgaaagtacaaaaaaagaagaagaagagggaccctaatgaaccacaaaaaccagtttcagcgtacgcgctgttctttcgtgacactcaagcagctatcaaaggacagaatccaaacgctagctttggtgaagtttctaaaattgtggcttccatgtgggacgctctagattccgaacacaaaaatgtatacaagaagaaaaccgaggctgccaagaaggaatacttaaaagctctggccgcttacagagcgagcttagtatctaaaggtgctggagaaaacgagggaatgtacagtaattatccgaactaccaaggcggcgcaccacaacaatattcgtcataccaaccacagggtaccataccgtcaccgcccatgtctgccccgccgtctgctacccctcccgcccaatcgccaattggaaagaaacctcccatgatgggcggcatgccacagtcgccacaacagggacatcagggaatgatgcagccaggaatggggcctgtgccaaaccacatgaatatgcaacaacacatgcaacagtcccagcaacacaatagttatatgcaacaggttcctcagcagcaacacgtaccaatgtcaccacagcaacagcaaccacacgtttcagtatcaccccatagtcatatgcaacagcaatccccccacatgcaacaacacatgagt

SEQ ID NO: 4834 - DNA, 2003 bp, Diabrotica virgifera
ggctcattataagcttagtattatcacagtttatacttaagaacctacaacaacggaagcatttcttgtttctctattttattggttaaataacttttatctgggccatgaagatgggcttacatttttgagccccaaaccagtcatgcagattataataaacttaagtcttcttcttcttcttctttaccttttgaaaatgggttcacatttgcaaacaatttatcatttgctttataagaaatatctaactacagcttgctaagtcgtgttctccatagtagtaaaggtcgcaatataggtgggatctttgaataagagagaaaatagattaaatatttttagaatatcgaagttggtgattatttgcaacatacagcatccaccattttatttattattcagacatgtacagtgaaaattgtaaaactataacgttaaatacatattagttttaaaatcatcgaatacaatgtaacataaaagtttaacctgaaagtttaagacattgtttaaaaaaggaccggtataaagtatatgaaaacacatatttcgtacaaaagtcagctgtggaactaatcttcagtacgcgttcgcgtggtaagatcaatatgatgtagctccagaaaagaaggtggctaagtttgaatttttttaaccaaacagaaactgtcaaaagaattttgtccaaaaactgatattacttcgccttatgttacctgtcaccatttgactggtctcttggacttcacatttcatggttgataaattatctttgatttttaggtataaacaactttcattttaaacgccactgatactgctatcagctagcagcagcaaatctttgaatatggatagcattttaaatattctatacaaaactgagattattgtagttttcaagaaggctgcacaaagtgatgtgagattagatcaaaaacagatttagcaggttgaaaatttcaagtatttgggctcggttgtactacagagtaatgaatgcgaatagagtttgctacgcattaaaaaaaggcatttatttaggtatacgtgcttgggctactatacggctcagaaaatatactataatactttaagtggcagagacaaaattaaacaaacgtgtgaaatgcggtacttaagagagattttgggggtggcgataagcgatagattgagaaacgattttatacgggaacaatgtaatgtattggtctcagacaaagttgaacaaagtgtgatggtacaggacaaccctcacggaattttcctaatttatttgttataaaaataaggtcataatattataattgcgatttgtataatttattacgatagtagcaaatttcgaagtattgaactcatttgaaagactgtaaagaaagcacacgtcattcttaatatacgtatagtacctcaccatatatggtcatacatattggcactgtttttaactataacagatataaataggaaggtcgagtacttgagacatcgttattgtcgttgcgctctctagcgcgtagtcaggggatatagttaccgagaaatggattatccccgacctatctcaagtcgtacgtaagttcaattgtacatttaattatataaaaataaagttgatggaaaaagtttaagtttgttcggggtagcgtcttcgttgcaaccccccaacgtcacaggatctcgtcgtctgtacctcagttttctgttatggcacttctgtatattgtcgatagtaaatagcgtgttgttcgttgcatttattctcagagacttgattttactaatattcattttcaacctattttattggcttcagtggaaagtgtttccaattggtcagccacatcttggaggctttgtcctaattggcagatatcgtccggatattctagatcgcttaggcatgtggttaacgttcattgtatccctcttgtgtcggagtctagtttggagagaacgtagtctatagctatgttaaaaagaaactgagaaag

SEQ ID NO: 4835 - DNA, 687 bp, Diabrotica virgifera
aatttgtataatttattacgacagtagcaaagttcaaagtattgaactcatttgaaagactgcaaagaaagcaagcgtcattcttactacacttatttgtaataccttaccatatatggtaatttatggttgcactgtttttaactataacagatataaataggaaagtcgtgtacctgatatgttgttgttacactctcactcgcgtagtcagggatctagttacctccggggcaatggattatccccgacctatctcaagtcgtacgtaagttcaattgtacatttaattatataaaaataaagttgatggaaaaagtttaagtttgttcggggtagcgtcttcgttgcaaccccccaacgtcacaggatctcgtcgtctgtacctcagttttctgttatggcacttctgtatattgtcgatagtaaatagcgtgttgttcgttgcatttattctcagagacttgattttactaatattcattttcaacctattttattggcttcagtggaaagtgtttccaattggtcagccacatcttggaggctttgtcctaattggcagatatcgtccggatattctagatcgcttaggcatgtggttaacgttcattgtatccctcttgtgtcggagtctagtttggagagaacgtagtctatagctatgttaaaaagaaactgagaaag

SEQ ID NO: 4836 - DNA, 1388 bp, Diabrotica virgifera
  SmartBlast Evalue=1E-25; Info=Peritrophic matrix protein 14 n=2 Tax=Tribolium castaneum RepID=D1MAJ8_TRICA
agtatacaataaatactatacaataataaagaacgtgatgtggcacccccaagagtgaccgaggatgggaatcatagctttcttcacgtccacgcacggagcgatggtttttaatttaattgaattgaatttactttattttttttaatgtaatttaaattaattttaattaaaataaaaatgtattttcatttaatttaatttagtttgtttatactatattttatttcattttattaaattaaattcataatttaaattaattaaatttattttcatttaatttaatttatttttttatttaatagatatatttaatatatttaacttatttaatttgtctcatttatttaatttatttaatatattcaatttattttattaagaaacatcatgcgactgcatttaccttccacgtagtgtctgatcaccgaaatgtggggtgatgcgaaatatgtcgttacagtcgtttcagtcgttcatcttttattttatcatacatctgcgtgtccatcgctccgtccgtagcccgcgataagaaaactatgcttcaaataaatattggaggaacagttagtgacttctaatatttagtgctgataagtactaaatacaactttagaaacttttaggtgttactttgcaatcgactctactaggatagtcgcaaacttgttcatcttgatcccataaagtaccatctgggcatgtaaattcaatagcctgtcctcgtagacattcgtaatatttggcgcaatcatcttcatctggtaacaaggtcccgtctttttggccaacacaaacttgacttggggtagtcgaagatccaggtgtggttgttgctactggagcacgactgcagtcaacttcgtcagggaaatcacagtagtttttgatatgattccataatctattggctggacatttttcaagatatctgagtccatggtcacattcgtaatattctgagcaattaccaggaacgtaatcgtatgtgattatgtcagagggataaggacaattaggatctggcgtaaaatctgatggtcgagtagcctgtgtagctcttgtacgtggagcctctgttggagctgatggatcgattttgcagtcgacattcgatttataatcacaatattttttttcttgattccaccatagatctggtggacattccattatacttgcctttccagcaaagcactcaatatattcggagcaattaactggatctggccagaaggttgcctcatttccaggtttaggacattcaaaatcagctaatacagcagtactagcagctagtccaataatgcacagtgtgaggaaatggttcattttatgatagtaagcaaccaaatttttgcgttaacaattaagcaaccaag

SEQ ID NO: 4837 - DNA, 1319 bp, Diabrotica virgifera
  SmartBlast Evalue=1E-24; Info=Peritrophin-1 n=1 Tax=Culex quinquefasciatus RepID=B0WV47_CULQU
ggtaatatattttattatacaatacatactataatacaataataaataacgtgctgtggcactccgagagtgactgaggatgcgaaccatagctttcttatcgtctacgcacggagggagagtttttaatttaatttaattgaatttactttattttatttttttttatttaatgtaatttaaattaattttatttattttgttctattttattttattgaatttactttattttattgtaatttaatttaattcaattcatttaaattatttatttaatttttttaatttattttatataatatatttaatttatctaatttttttattttattaagaaacacgaatgcgactgcatttaccttagtctgatcacgcgaagtgtggggtggcgcgacatgtcgttacagtcgtttcaatcagtcgtcttttattttatcataccttcgcgcgtccatcgcttcgacggtatcctgcgataagaaagctatgcttcaaataaatattggaggaacagttagtgattgcttaaaagtactaaatacaactttagaaacttttaggtgttactttgcaatcgactctactaggatagtcacaagcttgttcatcttgatcccacaaagtaccatctgggcaagtaaattcaatagcctgtcctcgtagacattcgtaatatttggcgcaatcatctgcatctggtaacaaggttccgtctttttggccaacacaaacttgacttggggtagtcgaagatccaggtgtggttgttgctactggagcacgactgcagtcaacttcgtcagggaaatcacagtagtttttgatatgattccataatctattggctggacatttttcaagatatctgagtccatggtcacattcgtaatattctgagcaattaccaggaacgtaatcgtatgtgattatgtcagagggataaggacaattaggatctggcgtaaaatctgatggtcgagtagcctgtgtagctcttgtacgtggagcctctgttggagctgatggatcgattttgcagtcgacattcgatttataatcacaatattttttttcttgattccaccatagatctggtggacattccattatacttgcctttccagcaaagcactcaatatattcggagcaattaactggatctggccagaaggttgcctcatttccaggtttaggacattcaaaatcagctaatacagcagtactagcagctagtccaataatgcacagtgtgaggaaatggttcattttatgatagtaagcaaccaaatttttgcgttaacaattaagcaaccaag

SEQ ID NO: 4838 - DNA, 1708 bp, Diabrotica virgifera
gggcgtggtttacccatttttagatttgaataaggtaattcggacgaaacaaaaatacctgaaatatgataaagatggtggcaccgccttatggcaaacgaaaactcatgatgcacccgtgtgcatcaccgtactgagcagacagtcaagcataatgcacacgggtgcatcactgtaccgaaggggttaatgaaaggataacaaatcaattggaagttctgtctgacaaaatacatgggacgttttcgtaatctgacgttctaaatttttaaactgttcaacaattaaaacttcccctgttccagtgtttttgtacatcgaagtttgtctaactagacaccgttgagctattgacaagttttcagcttgctattgatcaacttttttttggtacgcgagatccaggcttatattgacgaattttggtagtacaaactcctttggttgtcttatcattgcgatacttcaagtcatactacttggatgcaacaattgcaaacatcttcaactgtgaactgaaatcgctgtgctgacattttgattttaagagtttgatctatttttcttatgataccgtgttcgatacactcctgaatcacctgttgtcaggatttttctagtcgtcgatgacctgatttttttacagtttcatagaagaaggatataacagtaacatttttcttgtctacaaattcatcctatttcacttgttttcagactataatttcatgaagacttttgattttatgaacgagggaatgtttttaacggaccttatcaaacgaaattataatttctctattctccgctataatattgtatttttgtcagtaataagtacaataaatgaacgaatgtttttgtaggaaataaatgggaatggtatgaagattatagttatttgatctacgtgttaactaactaactgccctagaataagaaaatatgttcagtttttggagagagttaaatgttttcttgaacatgccgaagaaccaaaaggggtttttgcaatcaaaatacagaattattgtagaataaattattcaacaaatacataaactttaccttgatcagattagtttttggttttttattatttttattttttttgtcatttcttctcaacactatcacaattacctattgtatagtacatgtcatatagtcaaatcagaaaagatgtgcaatgctcatgttcaaatgactttaatttcctctctccaaagaatggcacgaaggaaagaaaatttatatagcaaagccctacattaaccagaataatactgaagatagagcaaaaagccattttgctataattttattatatctagataatttattttagctgttatttcatttaagtttatgttgtacacagatattatttgatttacagtatttacagtcttggcaatattctaaaactttgaatgttttatttttaacatattatattatttgatgtacagtacatatttttttctgttggagtttatttccccagaacttatacattagacatcgaggcaacactgtagtgctgtaaattgtgtgtaaggatgtgatgttaagacagccggtttttggccaaataaggatcgactggtggttataattgagtgatatttggtatcttttgagtttcctatttaaatattacacaaaacgggtaaataatctctttactatttcgattttactacta

SEQ ID NO: 4839 - DNA, 982 bp, Diabrotica virgifera
aacccctgatccttggactcctgttgtaaatagtaaacggtacgtctacaaattcaccatggacgaagagcaacgagcctgcaaacccgtttttgtcctaacactatgtcgatggctgtaaaatatccattggtatagaggaaataaatgggaatggtatgaagattatagttatttgatctacgtgttaactaactaactgccctagaataagaaaatatgttcagtttttggagagagttaaatgttttcttgaacatgccgaagaaccaaaaggggtttttgcaatcaaaatacagaattattgtagaataaattattcaacaaatacataaactttaccttgatcagattagtttttggttttttattatttttattttttttgtcatttcttctcaacactatcacaattacctattgtatagtacatgtcatatagtcaaatcagaaaagatgtgcaatgctcatgttcaaatgactttaatttcctctctccaaagaatggcacgaaggaaagaaaatttatatagcaaagccctacattaaccagaataatactgaagatagagcaaaaagccattttgctataattttattatatctagataatttattttagctgttatttcatttaagtttatgttgtacacagatattatttgatttacagtatttacagtcttggcaatattctaaaactttgaatgttttatttttaacatattatattatttgatgtacagtacatatttttttctgttggagtttatttccccagaacttatacattagacatcgaggcaacactgtagtgctgtaaattgtgtgtaaggatgtgatgttaagacagccggtttttggccaaataaggatcgactggtggttataattgagtgatatttggtatcttttgagtttcctatttaaatattacacaaaacgggtaaataatctctttactatttcgattttactacta

SEQ ID NO: 4840 - DNA, 1349 bp, Diabrotica virgifera
  SmartBlast Evalue=4E-51; Info=10G08 n=1 Tax=Ips pini RepID= Q5FYF7_IPSPI
gttttctatttttttattttaaccatcctcttttcacacactctttaaccatataccatgctttttcttttactggttgagaaagacactcaagatatttatctactgacggcatcccgtcagaagactcgtgtcctccttttttcccatttacggctacgaggtgaaacagaagtgcgtggccaaactcataggcggaaacagattccatttcttctaaaaactggtcgtacgaaaattctaaatgacatttgtgttttttaagaaaactagttaagctttcatggtaaaaatgaagtagatcatctaaatgtggttctagtacttctaatggaatactagaaaaaataaagaaaaacacatcagctgctggagatccatactcataaatttgtaagtcgactagtttgtttcccacgggctgtccattttcgaacttctgcatagtgttattggtccacaaatcttcgtgtactacagtcgcaaacggttctctcggtgcagacttggggattttaccccaaccatgaattcttgataaatactgacgacactcttcattttctcccacaactgctactaaaacattattttcactattctccttgggtggatcatagacatggcagtactttttgaccctttcttcaaacatcttaggatctattaatttcagagctaaagcaacggcatgtaaatgggcaatgtcttttagaacaatttttgacgtatttaaatcgaatccttttaacctatcaatattgttataacctttagatattagattctcaaggactatcacagcatcatcatcaataacgtcactgttgtctagcaagttttttcttactgctaaacactcagcaaaagagtcgataacgttatcaatccctaaactgcgctggaattcctgaaaggtgggcagaactacctcataaaaagccatttcacttgtgtaagttacttgaatattaaatatttgcctccaaaattcagtctctggaagggtttttgccactgcgcgaagtatttcttcggtaccattatcgttattattcaggacaatatccaatttgtacattatactaccaaagttttcacctggagctgtaagcctgctaatattaacatttttaatagtttttttaactagttgtttgcttaataatgtttctaactgttttatttgtgtgcaagacatgcttatgcttaaccgtggatgtgatgacactgactctgaactctgactagtgtttaaaatattaaaatatttgttattactattgatgtcaatgatattcctactattattattgcttaaatgaattcaaggctgttcatgataccgg

SEQ ID NO: 4841 - DNA, 1349 bp, Diabrotica virgifera
  SmartBlast Evalue=7E-51; Info=10G08 n=1 Tax=Ips pini RepID= Q5FYF7_IPSPI
gttttctatttttttattttaaccatcctcttttcacacactctttaaccatataccatgctttttcttttactggttgagaaagacactcaagatatttatctactgacggcatcccgtcagaagactcgtgtcctccttttttcccatttacggctacgaggtgaaacagaagtgcgtggccaaactcataggcggaaacagattccatttcttctaaaaactggtcgtacgaaaattctaaatgacatttgtgttttttaagaaaactagttaagctttcatggtaaaaatgaagtagatcatctaaatgtggttctagtacttctaatggaatactagaaaaaataaagaaaaacacatcagctgctggagatccatactcataaatttgtaagtcgactagtttgtttcccacgggctgtccattttcgaacttctgcatagtgttattggtccacaaatcttcgtgtactacagtcgcaaacggttctctcggtgcagacttggggattttaccccaaccatgaattcttgataaatactgacgacactcttcattttctcccacaactgctactaaaacattattttcactattctccttgggtggatcatagacatggcagtactttttgaccctttcttcaaacatcttaggatcttttaatttcagagctaaagcaacggcatgtaaatgggcaatgtcttttagaacaatttttgacgtatttaaatcgaatcctttcaacctatcaatattgttataacctttagatattagattctcaaggactatcacagcatcatcatcaataacgtcactattttctagcaagttttttcttactgctaaacactcagcaaaacagtcgataacgttatcaatccctaaactgcgctggaattcctgaaaggtgggcagaactacctcataaaaagccatttcacttgtgtaagttacttgaatattaaatatttgcctccaaaattcagtctctggaagggtttttgccactgcgcgaagtatttcttcggtatcattatcgttattattcaggacaatatccaatttgtacattatactaccaaagttttcacctggagctgtaagcctgctaatattaacatttttaatagtttttttaactagttgtttgcttaataatgtttctaactgttttatttgtgtgcaagacatgcttaaccgtggatgtgatgacactgactctgaactttgactatattgtgtttaaaagtttaaaatagttgttattactattgatgtcaatgatattcctactactattattgcttaaatgaattcaaggctgttcatgataccggcg

SEQ ID NO: 4842 - DNA, 1470 bp, Diabrotica virgifera
  SmartBlast Evalue=5E-53; Info=Zinc finger protein n=1 Tax=Aedes aegypti RepID=Q16XZ2_AEDAE
ttctcatgtgaacggtgagattataagccctaccaatcctctccacatattgtacacaaatgagtcttctctccagtgtgatatctctcgtgcactgtacaaatctgtcgttcttaggtaaaaccttttccgcaatatttgcatttgaatggcttctctcctctatgccgcctcatatgaataaccaaatagtcatttctaataaagcgctgtccgcactcagaacaaaggaacttcttggaatgttcattgtggaatttcatatgttctgtcaggtgagatttagataagaatgtcttttcacatactctacatgagtattctttagtgccgttgtgacctgccacatgaacatctcggtatttctctgttgtgaagaatttgtgacatagaggacattcaaatttcttctcgcccattacacatattctctctcctatgccatgtttcgaagccttgtgtttagcgaggtgatcggcccttgaaaatggtttttgacatatttcacattcgtaatcattagttctctcatgcaacttttgatgttgattgagatgatcgcgtctgttaaagcttttggtacatactgtacaacggaaaggtttaatagtcgaatgtgatgtaatatgtctcttcaagtgatttacgcgtgagaaggctttgctgcacacattacatttgtgaatcttggctccttcatgtttgtatttagcgtgtctatccaatttactcatcgtattaaacatctcgttgcaaacaggacaaggataatctccataatcatcatccttttcttttttaatctctctatcaattttgtttttatttttagagcccggcttacggcctctcttgccggttcccggtttcttcggtggtttgggtggcgcatccgcatttttacgaggtctgcctcgaccacgtttcactggtggtgatttctttactggcatataatctgagtcgttactttctttatctgagtcatcgtcgtctgaaacttcaccttccacttcagcaataacatttttaagcatctgctcatctatatcaatttccggcttttcatcttcaagtttaactgatttctgatcttcgttttcttcatcatcgatacctgttaaatcttttggtccttttccatactagtgtcagcatcattatcttctttatcctcgtcgaagtcttcctcttcatcggactcattatcattatctatgtcaacgccaatatcaccaccaccaatagaaccatcactgtggatacttttatcatcctggttttcttcttcttgttgagttgaaatttcttcagcaaccttcagtttgtcatcatcttcaattgtttctgtcacttcaacttgaggttcaaagtaatcatcaacatcagaaagatgctcatggtcagaaaagtccatagatgggtcttgatcgatctggtaataatgatcttcaatattatccaagtttt

SEQ ID NO: 4843 - DNA, 1206 bp, Diabrotica virgifera
  SmartBlast Evalue=4E-34; Info=Zinc finger protein n=1 Tax=Aedes aegypti RepID=Q16XZ2_AEDAE
ttctcatgtgaacggtgagattataagccctaccaatcctctccacatattgtacacaaatgagtcttctctccagtgtgatatctctcgtgcactgtacaaatctgtcgttcttaggtaaaaccttttccgcaatatttgcatttgaatggcttctctcctctatgccgcctcatatgaataaccaaatagtcatttctaataaagcgctgtccgcactcagaacaaaggaacttcttggaatgttcattgtggaatttcatatgttctgtcaggtgagatttagataagaatgtcttttcacatactctacatgagtattctttagtgccgttgtgacctgccacatgaacatctcggtatttctctgttgtgaagaatttgtgacatagaggacattcaaatttcttctcgcccattaccttggctccttcatgtttgtatttagcgtgtctatccaatttactcatcgtattaaacatctcgttgcaaacaggacaaggataatctccataatcatcatccttttcttttttaatctctctatcaattttgtttttatttttagagcccggcttacggcctctcttgccggttcccggtttcttcggtggtttgggtggcgcatccgcatttttacgaggtctgcctcgaccacgtttcactggtggtgatttctttactggcatataatctgagtcgttactttctttatctgagtcatcgtcgtctgaaacttcaccttccacttcagcaataacatttttaagcatctgctcatctatatcaatttccggcttttcatcttcaagtttaactgatttctgatcttcgttttcttcatcatcgatacctgttaaatcttttggtccttttccatactagtgtcagcatcattatcttctttatcctcgtcgaagtcttcctcttcatcggactcattatcattatctatgtcaacgccaatatcaccaccaccaatagaaccatcactgtggatacttttatcatcctggttttcttcttcttgttgagttgaaatttcttcagcaaccttcagtttgtcatcatcttcaattgtttctgtcacttcaacttgaggttcaaagtaatcatcaacatcagaaagatgctcatggtcagaaaagtccatagatgggtcttgatcgatctggtaataatgatcttcaatattatccaagtttt

SEQ ID NO: 4844 - DNA, 1352 bp, Diabrotica virgifera
gtatttattaatgatacaataaataaaataacaattccctcactagacatatcacactatactatttaaacgtcgacttcgaagccactccaaccaatattctcgtcattattaacttctaggtcctgctgatcctcggcaaacactcgcctctttttaaggactgaagatggctcaggcaataattcaaaaacaggatttgttaagcccatattagattcaaacatcggttgagtcacatctaagaaaggaggtttttcttgataataatgttcattgagaggatctacatgcactgcatcttcttcagatagtgttacgttttgtccttcaatttttttttttgtttcttcctgcaattcgtgaatattttacactgcaatatctcataattagcaagattattaaaaaaattgcagttactgaaaaaaacaaaataattctgtatttgatccaattgttcatacttggtaaagtacaagtagttatcccgtcagtaaggtacttttctgagtatctctcccacattatctgaagatgatattgatttaattgataacctggccaggtttcagagtcgttcttcgtatgaataggtactgcaaatttggcttctacacaaggactgcaactgggccagccagtggtgcaagtatagattccgattatttcaacattgttcgttgttatattatccaccaactcaaactgctgatcttcacaataatcaatagccatattcgtaatcatctgtgcaaaatccaataatacagttggatttcggtattgatatgccgctagacctgtcaagactacgaccagttcataggtatcggtaatatttggggtaggcagaaactctgtggaagatgttggctcagtggtagtagttgtgataacatccccaattcttgcgaattcgaatgtaacattgctatttttagtaccggtaaattctaactttaacacgtctgtattgtaaagaaatttaggactagcagcaactgttccagtaacaataatagattcttcaggtttatctgtataaattttaacaaattccgtatctgcaatatcgatgacacaatattgtattccaacagaaatcttaaagccctcgtctgttgtgacaattaatttctcgtgatgatctggatgccaagtaatattcttttctccaatgtgaaattcagttgggggtggtgttgctgttgacgttgaagttgtaacagctcccgaagatatttcaatccatgcagcaaaaaatatagtaactaacacagaacaagtaaactccattataaaaaatctcagattcacattgtatacaaacgcaaacaattagaattacc

SEQ ID NO: 4845 - DNA, 1329 bp, Diabrotica virgifera
gtatttattaatgatacaataaataaaataacaattccctcactagacatatcacactatactatttaaacgtcgacttcgaagccactccaaccaatattctcgtcattattaacttctaggtcctgctgatcctcggcaaacactcgcctctttttaaggactgaagatggctcaggcaataattcaaaaacaggatttgttaagcccatattagattcaaacatcggttgagtcacatctaagaaaggaggtttttcttgataataatgttcattgagaggatctacatgcactgcatcttcttcagatagtgttacgttttgtccttcaatttttttttttgtttcttcctgcaattcgtgaatattttacactgcaatatctcataattagcaagattattaaaaaaattgcagttactgaaaaaaacaaaataattctgtatttgatccaattgttcatacttggtaaagtacaagtagttatcccgtcagtaaggtacttttctgagtatctctcccacattatctgaagatgatattgatttaattgataacctggccaggtttcagagtcgttcttcgtatgaataggtactgcaaatttggcttctacacaaggactgcaactgggccagccagtggtgcaagtatagattccgattatttcaacattgttcgttgttatattatccaccaactcaaactgctgatcttcacaataatcaatagccatattcgtaatcatctgtgcaaaatccaataatacagttggatttcggtattgatatgccgctagacctgtcaagactacgaccagttcataggtatcggtaatatttggggtaggcagaaactctgtggaagatgttggctcagtggtagtagttgtgataacatccccaattcttgcgaattcgaatgtaacattactatttttactaccggtaaattctaaatttaacacgtctttattgtaaagaaatttaggactagcagcaactgttccagtaacaataatagattcttcaggtttatctgtatatattttaacaaattccttatctgtaatatcgatgtcacaatattgtattccaacagaaatcttaaagccctcgtctgttgtgatgattaatttctcattataatctggatgccaagtaatattcttttctccaaggtgaaattcagttgggggtggtgttggtgttgacgttgttgtaacggctccagaagatatttcaatccatgcagcaataaatatagtaactaacacagaacaagtaaactccattataaaaaatctcagattcacattgtatacaaa

SEQ ID NO: 4846 - DNA, 1339 bp, Diabrotica virgifera
  SmartBlast Evalue=1E-86; Info="Growth hormone-inducible transmembrane protein, putative n=1 Tax=Pediculus humanus corporis RepID=E0VC33_PEDHC"
gataaatttcagtgtaagtcaacgtctattgaacactttacagtttcgattctacaatactcaaagttgaagatatcattggattttttattggaaaatggctttgatgttagcttctagagtgtgtagggcatctaccctatcgaagacgactgtttttgttaaacagcccaatacgatcaccgtttaccgagcttttagcgaaggcaaagatgcagctgcaagaacagctagaaggcaagttggaattaaagagaaactcatgcaacctgcaggagatacagctttcagaatgggcagaggagccttagcaggagcatctgcacttggcattggagctttggcattctatggtctgggattaagcagcgaagctagtgcacttgagaaacaacatttgtggccccagtatgtgaaagacagaataaagaccacctacatgtactttggaagctcgattgctattactgctgcaagcgctctagcagcagtccgctctcctgctatcatgcgactagttatggcaaatggattcatgggattcgccatcagcttagctgctatcatggggactggtattctttgccaaagtattccatattcagaaggctttggaagcaaacaactggcttggatgctccacgctggaaccatgggagctatgatagctcctctgtgtttcctaggaggacctcttttgatcagagctgcatggtatacagctggagtggtcggtggactcagtacaattgcagtttgcgctccaagtgaaaaattcctctacatgggtggtcctctagctatgggtttaggtgtggtgtttgtgtcatcaattggttctgtatttctccctccaactacagcactgggtgctggcttgtactcaatcagtttgtatggtggtttgatactgttttctggcttcttgctgtatgacactcagaggataattgcacaagctgagagatatcctgccaatcccgatgcacttggaatcaggccttatgatcctatcaatgcctctattggaatatatttggacactctgaacatcttcatcaggatagcgactatcttagctggaggtggccaaaaaagaaagtagaaattagtttttgttatttcatcaatgattcgactgtacttttttactatttaacaaataaatcattctggagctgtgactatgtccactgttgtacatacttgtagatttaagcgtatttatagggtacttctagaataaaactatatatttaatattacttttatttaagcttttgtattcacaattatcgaatttgtttttgtttataattacaatagataacatttgttc

SEQ ID NO: 4847 - DNA, 1328 bp, Diabrotica virgifera
  SmartBlast Evalue=2E-86; Info="Growth hormone-inducible transmembrane protein, putative n=1 Tax=Pediculus humanus corporis RepID=E0VC33_PEDHC"
tggaaatcgcaagaaaacttttttttaatagatctgtcatcacaagaatactcagttgaagatatcattggaatttttactcgaaaatggctttaatgttagcttcaagagtgtgtagggcatctaccctagcgaaaacgactgtttttgttaaacagcccaatacgatcaccgtgtaccgagcttttagtgaaggcaaagatgcagctgcaagaacagctagacaacaagttggaataaaagagaaactcatgcaacctgcaggagatacagctttcagaatgggcagaggagccttagcaggagcatctgcacttggcattggagctttggcattctatggtctgggattaagcagcgaagctagtgcacttgagaaacaacatttgtggccccagtatgtgaaagacagaataaagaccacctacatgtactttggaagctcgattgctattactgctgcaagcgctctagcagcagtccgctctcctgctatcatgcgactagttatggcaaatggattcatgggattcgccatcagcttagctgctatcatggggactggtattctttgccaaagtattccatattcagaaggctttggaagcaaacaactggcttggatgctccacgctggaaccatgggagctatgatagctcctctgtgtttcctaggaggacctcttttgatcagagctgcatggtatacagctggagtggtcggtggactcagtacaattgcagtttgcgctccaagtgaaaaattcctctacatgggtggtcctctagctatgggtttaggtgtggtgtttgtgtcatcaattggttctgtatttctccctccaactacagcactgggtgctggcttgtactcaatcagtttgtatggtggtttgatactgttttctggcttcttgctgtatgacactcagaggataattgcacaagctgagagatatcctgccaatcccgatgcacttggaatcaggccttatgatcctatcaatgcctctattggaatatatttggacactctgaacatcttcatcaggatagcgactatcttagctggaggtggccaaaaaagaaagtagaaattagtttttgttatttcatcaatgattcgactgtacttttttactatttaacaaataaatcattctggagctgtgactatgtccactgttgtacatacttgtagatttaagcgtatttatagggtacttctagaataaaactatatatttaatattacttttatttaagcttttgtattcacaattatcgaatttgtttttgtttataattacaatagataacatttgttc

SEQ ID NO: 4848 - DNA, 1521 bp, Diabrotica virgifera
tttgattaatggagattcaaacgttcgcctgtggttgtttgtcaaaaaagttaacgttattcaatgtttatatgtcaacgtcaacttttttgacaataccatgggtgagcgtttgaatctttattgatcaaatgcgaaactgtaattttggtatttatttaattaattcatcaaatcaacataaacccatacaaaactacactcaccggcacaaaattcctccactaaaaatgtttgattaagtttgacaatttataactttattatttgtactccgattttcaatattcttgaatcagtttgtaggtacatgtattgatgtcatttgttattgttccggtaacaattttttttttgcttagatggcattatatgggggtgaatggaagctaactttaaaaaattctgtggaaaaggtgaagggctgattttgtttcatactcctttcgtattatctcggaggcatcactgggattttgttttttaaatatccgaatatatcttttctagtaaaagctgcaaataaaaacactgatttgaaggtttattatatcataaggttataataaggatatataaggtttaaattatcaaacgcactaaaataaacaacacaaaacaaaattaacaacaaaacaaaacaattcaatagcgggtatgtccacctcttgcagcaatgactgctcgcaatctgtttagcatcgaataaatatgttttatccttgcctggggatggcttgatattcctctagcagggccataactgtaccaaattttctggaggcctaggatgacagcgaatagcttttttaattcatcccataaattctcaataggatggagatctgggctgcatgcgggccattctaatcttatccaagctctattttatgagtcatcagtgttttatttacaaaaaatggtacagctcttacaggagaagagatgttcggatggttcaggaaacaaaattttagtgatacctcatgcataatacgacaggactatgaaacaaaatcagctattccattttgccacagaatttcttaaatttatgagataatacagcgtttccatttacccctgtataatgccatgcaagcaaatttttttgttgctggagtaataccgaacgatatcaatacatgtacctgcggactggtgaaagaatcttgaaaatcggagcacaaatggtgaagttatagattgtcgaacttaatcaaaggattttggttggcggaattttgtgccggtgagtgtagttatttctactttatatgacatttagttttcaactcttgataacatatcaacatcaaattaattcaaaaaattgcgctgtgattatatgagagtgtagtctgtgtactcatttcatgataatattgatgatattaattcttgataatagtgatgatacagtgaattgtgtaatatattacttgtaagataaatagtttataagtttgtggttatgactgattaaagtaattgttgaatttgataaatatattacatttt

SEQ ID NO: 4849 - DNA, 1114 bp, Diabrotica virgifera
tttgattaatggagattcaaacgttcgcctgtggttgtttgtcaaaaaagttaacgttattcaatgtttatatgtcaacgtcaacttttttgacaataccatgggtgagcgtttgaatctttattgatcaaatgcgaaactgtaattttggtatttatttaattaattcatcaaatcaacataaacccatacaaaactacactcaccggcacaaaattcctccactaaaaatgtttgattaagtttgacaatttataactttattatttgtactccgattttcaatattcttgaatcagtttgtaggtacatgtattgatgtcatttgttattgttccggtaacaattttttttttgcttagatggcattatatgggggtgaatggaagctaactttaaaaaattctgtggaaaaggtgaagggctgattttgtttcatactcctttcgtattatctcggaggcatcactgggattttgttttttaaatatccgaatatatcttttctagtaaaagctgcaaataaaaacactgatttgaaggtttattatatcataaggttataataaggatatataaggtttaaattatcaaacgcactaaaataaacaacacaaaacaaaattaacaacaaaacaaaacaattcaatagcgggtatgtccacctcttgcagcaatgactgctcgcaatctgtttagcatcgaataaatatgttttatccttgcctggggatggcttgatattcctctagcagggccataactgtaccaaattttctggaggcctaggaggatggcaaatagcattttcaattaatcccgtaaatgctcgataggattgagatcgggctgcatgcgggccattctaatcttatcaatccaacctctatttaagatatttatgtttatgagtcaatcagtatttttatttacaaaaaattgcgcagctgttacaagaaaggagatatttggataattccagaataaaatcttagtgatgcctctggattatacgaagggactgagaaacaagatcggctcttcagtatttctacagaattttttgaagttggaagaaaatacaactcttccattcagccccgtgcgatgccat

SEQ ID NO: 4850 - DNA, 1347 bp, Diabrotica virgifera
  SmartBlast Evalue=8E-27; Info=Endonuclease-reverse transcriptase n=1 Tax=Bombyx mori RepID=D7F170_BOMMO
aatctcatttttgacatctgtcatccagcataaatgatgtctgttgaaatttcaagcataaacaaaaatttaagtttgattttaatcactttgtcaatgtacgaatgcaaaaaaataatttttatttagtctgtgtacttaaatttttaatacattataaaataaatatatcaatttttaagaaatcaaaaagtttatgtttctgatattccaaaagacacaaaaaaatattaaaatgtattggaaaaattcaaacgacgacgtgccaatattacgactacagcgtatttcaaacatgctatgcagtgtacaaggatagccccatgcgaactcaatgataattttctgacaacgttgccgctcgtcacgacagcggccgtgaaaggtagtattaggcaggtacttgtagaggattatcgctgttaactgctgtggaatactaaaggaagatttatttatgataattcacagaatggcaatatacaaccaataaaaatgacaacaccagtcaaaaaatacaaacacggattcttagcggtaataagagtttttatgcatacaaagactttatgaaaagtaagttactgaatcgtgagtctaagcttagaatctacaaaacagtaattagaccagtggtcacatatggatgtgaaacgtggaccctctcaaccactgatgaaaatcaactgagaatatttgagcgcaaaatactaagaaagatatttggaccaacacattgcagcgatatttcgtggagaattaaaatgaaccacgagctggatgaattaatgcagagcgcagatattgttggatttctagtcacaaatactaaactggcttggtcacttagaaagaatgtcagataatcgagctgtgaaagtaatccagagatggaagccaaaaggaaatagaacaagaggaagacccataaaatatggatagacgacttagaggggatcttaaaaccatgaacatcaggcagtggcaaaggaaagtatccgacagggcagaatggaagaacattgttaagaagaccaagactcacaaagggttgtagcgccattagaagaagaaattatgtaaaaatataaataatgaagtcagaacagcttgtatccactaaaatgcattaactatacatttttcaatttaaaacataataaaagacttcttctcgtggatgtctcccttactggaggttagcaactacactggcaaatctatctctatccaattgctctaaacaaatatgttgaatcaaggccggtccagtctctgatatttctaagccataaaatggggcgctacaggaccccgttttccttacaatcttaccctggatgatca

SEQ ID NO: 4851 - DNA, 1289 bp, Diabrotica virgifera
  SmartBlast Evalue=5E-21; Info=Putative uncharacterized transposon-derived protein F52C9.6 (Fragment) n=2 Tax= Camponotus floridanus RepID=E2ALS0_9HYME
aatctcatttttgacatctgtcatccagcataaatgatgtctgttgaaatttcaagcataaacaaaaatttaagtttgattttaatcactttgtcaatgtacgaatgcaaaaaaataatttttatttagtctgtgtacttaaatttttaatacattataaaataaatatatcaatttttaagaaatcaaaaagtttatgtttctgatattccaaaagacacaaaaaaatattaaaatgtattggaaaaattcaaacgacgacgtgccaatattacgactacagcgtatttcaaacatgctatgcagtgtacaaggatagccccatgcgaactcaatgataattttctgacaacgttgccgctcgtcacgacagcggccgtgaaaggtagtattaggcaggtacttgtagaggattatcgctgttaactgctgtggaatactaaaggaagatttatttatgataattcacagaatggcaatatacaaccaataaaaatgacaacaccagtcaaaaaatacaaacacggattcttagcggtaataagagtttttatgcatacaaagactttatgaaaagtaagttactgaatcgtgagtctaagcttagaatctacaaaacagtaattagaccagtggtcacatatggatgtgaaacgtggaccctctcaaccactgatgaaaatcaactgagaatatttgagcgcaaaatactaagaaagatatttggaccaacacattgcagcgatatttcgtggagaattaaaatgaaccacgagctggatgaattaatgcagagcgcagatattgttggatttctagtcacaaatactaaactggcttggtcacttagaaagaatgtcagataatcgagctgtgaaagtaatccagagatggaagccaaaaggaaatagaacaagaggaagacccataaaatatggatagacgacttagaggggatcttaaaaccatgaacatcaggcagtggcaaaggaaagtatccgacaaagcagaatggaagaacattgttaagcaggtcaagactcacaaagggttctagcgccattagaagaagaagaagaagattcactgtttgtaatgtattttcctctttgcttatacacaaaatctcgaactgtgatgtaccatacgcttaataaataaataaataaataaataaatacagattctgtagtttgaactagtcgtgacattactagtttcatgcatttgttagaaaaagttttcgtcttcacctgtcatttatacacggctgcatcaactcacagtag

SEQ ID NO: 4852 - DNA, 1698 bp, Diabrotica virgifera
ctgtgagaaatctacctttagtgggttcaaagagatttttcagcgctgcctcttggactattacattgcagtggataggcacttttttacatggctagtggctagtagaatgacgaatgactgaatgaatcggagtgacatcaggtgggacgcagtattgccatttataatgcgtatatctaattgaaaactaaatggtctgtatgtataagttcattataattaacgtttataagcgtttttctagcttatataaataatttgagaagtgttgtagccacaccaagtaacatacaccagtgtaacttttcccggtttttcatagcgtctcccgatcttaaggttagattttggctttggattataagagcggcatccgatatcgtggtacgtcgtcaagacggcgtctaaaagataactgccaaatttgtttcagtgcagaatgtaggagctcttgttagggaacaagactcggtacaacacgatctggtatgccgcatgctctttgcttatacatatttattatatagaaaaagtttgtgaaaggcttccacagggaagccctaaggctttgttatgttgtgcatatttatagataaaacagattcaagcgagaatacttttaggtatagggaggccgttccgttttcgacgttttatttttgttttttgttatttttgatggaccgcctcccttctactgcagattaaaatgtaggtggataacgaagattttttgttaaaaagtatggtctatacttttaatttgttaagtgaatatttgtcctttcccttatcccattccccattcctacagtcccttgatagtacaagatgtcggtctggaaaagaagatgcaacgaatcggacttggcaatgctggttttcacagtcataggcttgtcaggatgacacatttgttacggtccacaattgaagcttcccctgttccagtgttcccatgcattgtcagattcgacaccgtttagctatgaacaaatgttcagcttgctattaataaacttttttttgttacggatccagaattattataccttatcataggattataaatttatgctgagtcctacagattttactaaatgtatatttttccagatactttagatttgaaacatacacagtgtttaaaagagccttaacaattttaacaaatttgctaaagtaaaagatgtaatattgcattgaaatgttgtagaaaaaaatatctcgataatgtttctgtgatgttacagaacgattcctggacgtgttcttttccagaccgacctccaaacatcaaataggtattttatttaggcattcaaattattttttggtgttaaattgtttcaaaatttttctcagtttttttaaaatcacaccggctgttttggttttctttttctgttgtatatatagtttattgttaaattttttgttcacattttttagcgaaatcagatttcacggtgtgatacattgattgtttttgagatgattatttaatcaatcatcatgtaactttttagatctgccgataattattaatgagaaaaaaacgcactgtaaatgcactaaaacgacttctttagaggcaggtctaccatcttacgtattttacagttgacgtgtttttttcgctattaaacggaaagttttttttgtatttaggtgttttacattatagcatagatc

SEQ ID NO: 4853 - DNA, 962 bp, Diabrotica virgifera
accctttctttaaactcatgcaagggtcagagtgctagttgtgacccgcataactcctgtcatttgacatgttctatgtgtattacaaacattttttcatatattatataacgtggctgttgaatgaccttagaaacaacctgctagttttcacagtcataggcttgtcaggatgacacatttgttacggtccacaattgaagcttcccctgttccagtgttcccatgcattgtcagattcgacaccgtttagctatgaacaaatgttcagcttgctattaataaacttttttttgttacggatccagaattattataccttatcataggattataaatttatgctgagtcctacagattttactaaatgtatatttttccagatactttagatttgaaacatacacagtgtttaaaagagccttaacaattttaacaaatttgctaaagtaaaagatgtaatattgcattgaaatgttgtagaaaaaaatatctcgataatgtttctgtgatgttacagaacgattcctggacgtgttcttttccagaccgacctccaaacatcaaataggtattttatttaggcattcaaattattttttggtgttaaattgtttcaaaatttttctcagtttttttaaaatcacaccggctgttttggttttctttttctgttgtatatatagtttattgttaaattttttgttcacattttttagcgaaatcagatttcacggtgtgatacattgattgtttttgagatgattatttaatcaatcatcatgtaactttttagatctgccgataattattaatgagaaaaaaacgcactgtaaatgcactaaaacgacttctttagaggcaggtctaccatcttacgtattttacagttgacgtgtttttttcgctattaaacggaaagttttttttgtatttaggtgttttacattatagcatagatc

SEQ ID NO: 4854 - DNA, 1377 bp, Diabrotica virgifera
  SmartBlast Evalue=1E-114; Info=Aldose-1-epimerase n=1 Tax=Aedes aegypti RepID=Q16SI6_AEDAE
cgacgacgtatctgtgaccttgtcaacgaaaacaaaaccgctaaaaccaggttagttttattgatgtatttttttgtggtcatcccgcgaaaataaacaactactgatatagtgaaaagggtaataaaacaaatttgtttttaaaatagttagttcacaggtttttgttaagcaggttgttcaataaagtagtgttaaaaactgtcactccgaccgcgaaaatgagcccagccgatagagaatccgatgtgcaatttgaggaagatggatttggcatgttcaccgacagaacgactggggaaagtgcctcagtgagaagatttacttggaaaaatgccaataatgttactgttcaggttattacttatggagccacgatcacgtcgataagattgccggggaagaacggggtagttgaggatattgttatggggtttgataacatggaaggttatttgaatcacctaaatccgtatttcggtgccactgtcggtcgagttgcaaacagaaccggttacgccaaaataaccatcggagaaaatacctacaacgtttcggccaatttgggaaaacaccagctccatggaggattcataggattcgacaaagtcaactggaaccatcacgtccatggaaaaaaagtgatactcagttatttgtcggttgacaaagaagagggctttcctggagatgtgctgaccagtatttccttcgaattaaacaacgataatgaatttttggtggactttaaggctactagtagtaagcctactgttattaacttaaccaaccattcatactttaacttggctggacatgataagggtgctgaggagctatacaaacatgttgtgtcgataaatgcagatcatactacagatgtggataaggactctattcctacaggcaaacttcttccggcggtcgacacggtattcgatttgagaattcccaaagttcttggtgacgtcatccataaaatacccggctacgatggatacgatcacaatttctgcatcaacaaagcttctaagcaacaaagtactttcgcagcgagagcgttccatcctcctagcggaagagccttggaagtttacaccaaccaacctggagttcaattctactgttcaaacagcatacctgaggatcccaaaaaggcaaaaggtgacacaaaaccagctacattggttgggaaacatggacgccattattacaaacacggtgccctctgttttgaaactcaaaattggccagacgcaagcaatcataaaaactttccctcggcgattctaaatccaggtgacacgtatcatcatagtgttgtttataaattttttgttaattaagatgctcgaagactgatctattaatcaatgt

SEQ ID NO: 4855 - DNA, 1286 bp, Diabrotica virgifera
  SmartBlast Evalue=1E-114; Info=Aldose-1-epimerase n=1 Tax=Aedes aegypti RepID=Q16SI6_AEDAE
gtagtgttgttatacgctataaacccataatcagcagtacatcgacattgtcaacactgtcgacgacgtatctgtgaccttgtcaacgaaaacaaaaccgctaaaaccagctgtcactccgaccgcgaaaatgagcccagccgatagagaatccgatgtgcaatttgaggaagatggatttggcatgttcaccgacagaacgactggggaaagtgcctcagtgagaagatttacttggaaaaatgccaataatgttactgttcaggttattacttatggagccacgatcacgtcgataagattgccggggaagaacggggtagttgaggatattgttatggggtttgataacatggaaggttatttgaatcacctaaatccgtatttcggtgccactgtcggtcgagttgcaaacagaaccggttacgccaaaataaccatcggagaaaatacctacaacgtttcggccaatttgggaaaacaccagctccatggaggattcataggattcgacaaagtcaactggaaccatcacgtccatggaaaaaaagtgatactcagttatttgtcggttgacaaagaagagggctttcctggagatgtgctgaccagtatttccttcgaattaaacaacgataatgaatttttggtggactttaaggctactagtagtaagcctactgttattaacttaaccaaccattcatactttaacttggctggacatgataagggtgctgaggagctatacaaacatgttgtgtcgataaatgcagatcatactacagatgtggataaggactctattcctacaggcaaacttcttccggcggtcgacacggtattcgatttgagaattcccaaagttcttggtgacgtcatccataaaatacccggctacgatggatacgatcacaatttctgcatcaacaaagcttctaagcaacaaagtactttcgcagcgagagcgttccatcctcctagcggaagagccttggaagtttacaccaaccaacctggagttcaattctactgttcaaacagcatacctgaggatcccaaaaaggcaaaaggtgacacaaaaccagctacattggttgggaaacatggacgccattattacaaacacggtgccctctgttttgaaactcaaaattggccagacgcaagcaatcataaaaactttccctcggcgattctaaatccaggtgacacgtatcatcatagtgttgtttataaattttttgttaattaagatgctcgaagactgatctattaatcaatgt

SEQ ID NO: 4856 - DNA, 1322 bp, Diabrotica virgifera
  SmartBlast Evalue=2E-54; Info=10G08 n=1 Tax=Ips pini RepID= Q5FYF7_IPSPI
gtaactaagattcaaccaaaactttatcatttttcttgtcatttatatccagttacatctatggcactgacgtaaaatgaaaaagagtctttctaaggcttctggcattaatccatccctcactttttgcctatacttaggatcatgaaaatctggattgggatcgtccatgaaactttcattctttttaccaaataccactattgtaacaaaaccaatagtccatcccaaaatgatttctgattccatttttaactctctcagaaaatttggataattgaacggttcagtatcacatttaaaccgctttagattgttcacaaattctgtatggtagtgctctatcaaatcatcaaaatgtagtctagaaacctccgtcttgacactggtgaatataaagttaagaacgtcagaagctggggaaccgtagtcgtagagttggaagtcaataaacttgttctttgctggtttacctttttcgtattttatcattacgttgttgacccataggtcacgatggacgatcgttgcaaatggttctcttacttcagttttcatttcctgtttttcccatgctacgttcacctttggaatgaactgtctaaattcgtcagagtcttcaaggatttcgtcgataactaatatcatatttctaaatggatcatcttcaggagttgccaaattattgttacaaaaaggtttaatttctttgttaaaaatatcgggctgcttaatttttaatgcaacgactgttgattggaagagagcaagatctcgaagaaggattttggcatcttccaagttatatccaatataccgatctaaattgtcatatccttctatttttaaattctccagtaatagcacaccatctctatcaactttgttacttccatctaagttaattctgcttccataaaatttgggaaaaatatcaaagatttcttcgattttatgctttctttggaagttttgaagtgccggcacaattttttcatagaatcctatttctgacttaaaggtgttttgaacgttaaatacttcttgtgaattatcatctgctggaataattttacctacaatatgtaaaacttcttctttctggctatcggaatcttctaacataacatctattttaaataattctcctccatagttttctccaggattgactaagttggttgttcgagtctcttttatttttttgccctcaccaatgtgtggttctagaagtgtttctatatttttcacactcatctttacacaattaggtgaggtttaaaattaaatgattgattttaggtctaagtgtcttatatctt

SEQ ID NO: 4857 - DNA, 1329 bp, Diabrotica virgifera
  SmartBlast Evalue=6E-54; Info=10G08 n=1 Tax=Ips pini RepID= Q5FYF7_IPSPI
gtaactaagattcaaccaaaactttatcatttttcttgtcatttatatccagttacatctatggcactgacgtaaaatgaaaaagagtctttctaaggcttctggcattaatccatccctcactttttgcctatacttaggatcatgaaaatctggattgggatcgtccatgaaactttcattctttttaccaaataccactattgtaacaaaaccaatagtccatcccaaaatgatttctgattccatttttaactctctcagaaaatttggataattgaacggttcagtatcacatttaaaccgctttagattgttcacaaattctgtatggtagtgctctatcaaatcatcaaaatgtagtctagaaacctccgtcttgacactggtgaatataaagttaagaacgtcagaagctggggaaccgtagtcgtagagttggaagtcaataaacttgttctttgctggtttacctttttcgtattttatcattacgttgttgacccataggtcacgatggacgatcgttgcaaatggttctcttacttcagttttcatttcctgtttgtcccatgctacattcacctttggaatgaacggtctaaattcttcggagtcttcaagaatttcatcgataactaatatcatatttctaaatggatcatcctcaggagttgccaaattattgttacaaaaaggtttaatttctttgttgaatacatcgggctgcttaatttttaatgcaacgactgttgattggaatacagcaagatctcgaagaaggattttggcatcttccaagttatatccaatataccgatctaaattgtcatatccttctatttttaaattctctagcaataacacaccgtctctatcaactttgtcacttccatctaagttaattcggcttccataaaatttgggaaaaatatcaagtatttcttcgattttatgctttctttggaagttttgaagtgccggtacaattttttcatagaatcctatttctgatttaaaggtattttgaacgttaaatatttcctgtgaattatcatctgctggaatgattttgcctacaatatgtaaaacttcttctttctgggtatcggaatcttctaacgtaacatctattttaaataattctcctccatagttttctccaggattgactaagttggttgtttgagtttcttttatttttttaccctcaccaatgtgtagttctagaagtgtttctatatttttcacactcatctttacacaattgatgtgaggtttaaaattaaattacacataagtgaggtttaaaattaaatgattgatttt

SEQ ID NO: 4858 - DNA, 1332 bp, Diabrotica virgifera
  SmartBlast Evalue=4E-29; Info=Endonuclease-reverse transcriptase n=1 Tax=Bombyx mori RepID=D7F158_BOMMO
acattatccattatacaattttattttttaagctgaataattacttttactatgttacctaaagcctaatccaattatcgttttccttaatgtttcctttgaccctgtaatttgttctttagtttttgatagataccttaaataaatagaaatcgttaaaatatttggaaagtaaatcttcttttatactttaagtaaataaaattgtaaaagaattgtatctatatcaatgtgtttacgaaaaaacttttatttcgttctaaacgggtacaaacaattgttttataattttacttactctattttatttaccataaaaaatataggtatcaatttcccactaactaataattttttaacttttaaactatttaccattaattgtaggggatcttttctcgatggtgtagaagtcgtatataatatttttgatggttttcacttgtccactgctcaattcaatttttttggaacgacaacgttttctttttggacttttaaaatataaactagtcgctccatttttatttacgtctctaccttcttttcttattttggttaaggtgtttttgcttatacccgtcgctgctagaatcctatccctacaattaccaatggtaaatgttactaaacgaaaatattgcgaaaaaaattgcaaaagattggcgtgaaagaagaaagagtgcctaaaaacttgtgtatttgatcagagcatccttcctattaggacgtatggctcataaacatggacattaacaaaggccaacaacacaaaacaaatagaaaggactcacagaaaatatctattgtattaattcatgttttattccatgttgggattaacacttcaagacagaaaaccaaacaaatggataagagagaacaaacgtaaaaatgtagttgaacatataacagggttaaaatggagatttgcgggccacaatgcgagacaggaagataaaagatggaatgctgaaatacaaaactggagaccgtggacaggaagaagaggaagaggaagacctcagatgcgatggaaggacgatattgtaaaagctgcaggaactaactggaaaagcgcagccaaggacagacggaaatggaaagatttggggaaggcctatgtccaaagttggatagaaatgggctaaaaggagaaagaagaagtgaaggaatatatttcattaaggaaaacatcaaaccatattttgatctttgacaaggattaattttttttagttccttagccatgtttcataaggatgctcctataatatattgcaataagtatagccatcattcaaaaaatgaaacagaaaagaacaccaggcc

SEQ ID NO: 4859 - DNA, 1305 bp, Diabrotica virgifera
  SmartBlast Evalue=2E-30; Info=Endonuclease-reverse transcriptase n=1 Tax=Bombyx mori RepID=D7F158_BOMMO
ctgagacacttcaagcgatctgcaaatggacctcacgaatatattttatttgtttcatatacgtaccaaaagggtgtactagtttaaatattttctctggtccagttgagtttgcttaatatacagggtgtcccattgtaattttatcattaaaaaaaggttcaaaatggttttattagtatttattgtaatttatttgattataacataatttttgacataatttgttccttaaatgtttctgtatgtttaaatacaagtatattatttattattggttacttttaggaatcatcacgtcctgatttgtcacatgatctaccaatgagatccgcagggagtttccacatttcaaacgattctatgccatttatttatttaaatttgagggaccatcgtttagtatcatattatcggccatatataacattttactatgccagaatctactttactattaaagaaatcttcctcagacttcatgtatttatttatgaaatacttcaaatgtatttgtggaattttgaatggggatacatgggggaatagagaatgcaaacgtggaagagggaccgcagaaaaaatgaacaggtggcatcagagaacatgtagaattggcgtgggcaacatttggaaagttaagatggatactaaaaagacacaaagatataacagtacctaaaaacccgtgtatttgaccagtgcatccttcctgttctgacgtatggctcagaaacatggacattaacaaaggccaacataaacaaaattgaaataactcagagaaaatggaaagatccatgttgggaataaaactacaagacagaaaatcaaacaaatggataagagagaaaacaaaagtaaaaaatgtaactgaacatataacagggttaaaatggagatttgcgggccacaatgcgagacaggaagataaaagatggaatgctgaaatacaaaactggagaccgtggacaggaagaagaggaagaggaagacctcagatgcgatggaaggacgatattgtaaaagctgcaggaactaactggaaaagcgcagccaaggacagacggaaatggaaagatttggggaaggcctatgtccaaagttggatagaaatgggctaaaaggagaaagaagaagtgaaggaatatatttcattaaggaaaacatcaaaccatattttgatctttgacaaggattaattttttttagttccttagccatgtttcataaggatgctcctataatatattgcaataagtatagccatcattcaaaaaatgaaacagaaaagaacaccaggcc

SEQ ID NO: 4860 - DNA, 1407 bp, Diabrotica virgifera
  SmartBlast Evalue=1E-114; Info=Prophenoloxidase activating factor n=1 Tax=Holotrichia diomphalia RepID=Q9GRW0_HOLDI
tttatattcaaaatatataagtacaaaattacacggtataaggggccatactaattgaaagtcttcgtaatttttggtcgatccaatttctaaattgagcaacgtcagcatatactcctggaacattcaatgtaccacaaccaataccccatgcaactgttccaacttgaacatacctctccggatgtgaaggatcggggcacaccaaaggactacctccatcacctgtgcacgcatcttttccttcttctccaccagcacacataaaggagctatgtagaccaaactttggtcccagtcgggtagttcttaaggcatcctgacaaatgcgtttatcaattgtaggtagttctatttttttcaatatagcttggaattttccttttctaccgaaatccttttgaccccatccagtaacgaaacagtttttcgaatttattttgaggttttggggcggtaaacaaatggtaccaatatgatctgctttgtttactgcttcgtcgagaattaaaagggcgacgtcgttatgcaaaattccaggaacgaattcctcatggaagataatttggttgacgtttctttcttgatatggtagcctttctttcgttgtttgggtgtcccattctccagcgcggacagtcaggtcaaaggttttgttcctgtaaacacaatgggcgccagttaaaacaacattaggtgtgatcaaggaacctccacaagcaagaggtttatcaagtccttgtaatagatagtttttgttcaaaattgcaaccatccaaggaaactctccgtattcggcttcattgtcatgatttccagtgatggtaaagtcgattcccttggggtttctaatgccacagaagctgggttttacgatcggaggagtggtgactggttctggggttactggagtgggagacacaggatcgggggtgggtgtatttggattaattttacaacacacgtccaaggtatcttcgcacggcttttttccaaacctgatatcgatctgtccaaacccataagtaacatcttcttctactatagtattagtcttcggatcacatttagaatagactacacatctttttaaccccctagtagacccctcaccgcattgctcgatggcagtataacttccgttagtcgattctgtaacctcttccaagtctgtaggaaagttattgttgctcataggaaatatctcatctattttcttcctagtgtcttcatcaataatttcttcattttgaccgaacacaccgataattagtgatatacacaatattgaaagtcgcatcttggacgctgttgtagtatttgttgtttgtatatgtacaaggtcaatataaagttgaattaagtacactaatcatatgggaaataaattgtcttgttgtagaatag

SEQ ID NO: 4861 - DNA, 1230 bp, Diabrotica virgifera
  SmartBlast Evalue=1E-111; Info=Serine protease H3 n=1 Tax= Tribolium castaneum RepID=D6WBS9_TRICA
tttatattcaaaatatataagtacaaaattacacggtataaggggccatactaattgaaagtcttcgtaatttttggtcgatccaatttctaaattgagcaacgtcagcatatactcctggaacattcaatgtaccacaaccaataccccatgcaactgttccaacttgaacatacctctccggatgtgaaggatcggggcacaccaaaggactacctccatcacctgtgcacgcatcttttccttcttctccaccagcacacataaaggagctatgtagaccaaactttggtcccagtcgggtagttcttaaggcatcctgacaaatgcgtttatcaattgtaggtagttctatttttttcaatatagcttggaattttccttttctaccgaaatccttttgaccccatccagtaacgaaacagtttttcgaatttattttgaggttttggggcggtaaacaaatggtaccaatatgatctgctttgtttactgcttcgtcgagaattaaaagggcgacgtcgttatgcaaaattccaggaacgaattcctcatggaagataatttggttgacgtttctttcttgatatggtagcctttctttcgttgtttgggtgtcccattctccagcgcggacagtcaggtcaaaggttttgttcctgtaaacacaatgggcgccagttaaaacaacattaggtgtgatcaaggaacctccacaagcaagaggtttatcaagtccttgtaatagatagtttttgttcaaaattgcaaccatccaaggaaactctccgtattcggcttcattgtcatgatttccagtgatggtaaagtcgattcccttggggtttctaatgccacagaagctgggttttacgatcggaggagtggtgactggttctggggttactggagtgggagacacaggatcgggggtgggtgtatttggattaattttacaacacacgtccaaggtatcttcgcacggcttttttccaaacctgatatcaatgatcccgtaattgccaaatttattgctaattgtattatccactatcatattagtcttcggatcgcacaagaaatactgcacacatttcttttttcccatggtagacccttccccacattgctcagtagcaccgtaaccattattaatagtgttttcggtgacttcttctaattcctcagattcagttattttttctactttttggtatagatctcatttac

SEQ ID NO: 4862 - DNA, 669 bp, Diabrotica virgifera
ctttaatattttttaataaaataataaatgttaaaagccaatctctgggcatttctgaagaatattctcatgatttaaatttttgtatttttggcaaggtgattcatagaaagttatgtttctcgtttactctaatttgtccacttcctcaggtagcctgtaaaaactaaaatgatattttatcaatacttacttccaccctcaaacgtttacgttcaggggatcttctttcacgtaccatgatactggtgctatattcagctctgtaaggcttatattcttctctatatctctctgaagtcgaatacttgggctcgtagggattcctcgattccattgcgggtggataggatctgctcgagggataccctcctgaccgcgaggagccattccaggacgaaagtcctcggctggaacctctggaactgcccctgtagcctcctctaggagacgatgggaatctacctctaggcatatttgctgatacctattacgactacaataaaactcaaaaagtctggtaaaatacagattctccgtattacttagatgtgtatcacgtaaatattttaaaaatacaacgaatgctattattaaaattaaaatttactaccaaattgatttttttaagtgtgctctcacctacaacctttcacttcgaccgacgac

SEQ ID NO: 4863 - DNA, 1620 bp, Diabrotica virgifera
aagtacgcaaatggtctactcgtagtatattgtcatagattacaataagttttaagtttcaaaacgtgacatccctttattgtttaataaatactgataatgtagtgtttatgtcagcccatacaaaaagtacaaaatgcaggatcggaggatatatacaagatatatcacgggagtaaattcaacatgccgtcaaagatatgaaaaataatacagaaccgagggaagaaggtttagtcattgagacaattaaactaggaggtccacttttgatgtcacgaatccaaacacttgataattatatatctgtataatgaaaatattccaaataaaatttggttacaattcttcttcataaaaagtagatacgcaggcgaaatatctggaggaggcgtatgttcaacaatggacaactcggtgctgattaatgatgatgatgagtgttcatagaaagtacactgagagagaaatattacaaatagtggttaatttaagaagtcttaaatggattaaggattagtgtataaaagtattttagatgtaggtatagattagatacgggtaacaagattaaaaacataaaaacgtagagtacctagtgtgatatgtgataaaacacaataaaactgaagtactttggaaatttcggtacttttgaatttatatgttgctactactgtttatactggcaatacagtgatgaaaatgttaatttaaacatgcttatacagtttttattatcttaagttattgcctggaaaatacactcaccggcacaaaatccgccacccaaaatttttgccggtgagtgtatatacatacataatagtaagaaattgataccaaattagggtcaaattaatcgttaaccaattcttaagggcattacataaaaaaaaggagagcaaaattaaaaggaagcacatatattatcagatattcagatatttgtggtcaaaatgaagctcatctataagttactttcaacagcgtcagatgctttggctttataataaacagttgtatccatatataaccaaaattctaggtttctgatgcctggttgcaccagcaaaacttaagctagagctttaagtcccacttacgttgcaccataattttcaattctttaagatgcaatacacgtggcaatcagttgtggcaagctgaaaattgatctgagacttaatatttcaacacgtatgtttcgtaagctaaaaaaaggcacgtcttaagcttaagatctgttggtgcaaccagaataaattttaggtgatttatgtgatcaatataggtatgtggtagaatgattaagctacagtgtgaggccatactggcagactagatcaccaatttatgtcatataaactacgcataatattcagcatatttttttaatcaaggctgttctttgaaattgaaaatatgtcatttatttttgaagttatatttctttaggcgcgattgagagtaaaatttcataatactgcgcggatgcgcacatagacagtatggcgtttagttgctgaatctttcaagttatgtataaatacaatatatcagtgaaagaaaaggtgtgaaaagaatatacagtaaaacctgccatatccggatcaatgt

SEQ ID NO: 4864 - DNA, 984 bp, Diabrotica virgifera
gtataatgccatctaagcaaaaaaatttttgttaccggaataataacaaacgacatcaatacatgtacctacaaactgatgcaagaatctcgaaaatcggagtacaaataacaaagttataaattgtcaaactcaatcaaaaaccctgggtggcggaatttttcgccggtgagtgtatatacatacataatagtaagaaattgataccaaattagggtcaaattaatcgttaaccaattcttaagggcattacataaaaaaaaggagagcaaaattaaaaggaagcacatatattatcagatattcagatatttgtggtcaaaatgaagctcatctataagttactttcaacagcgtcagatgctttggctttataataaacagttgtatccatatataaccaaaattctaggtttctgatgcctggttgcaccagcaaaacttaagctagagctttaagtcccacttacgttgcaccataattttcaattctttaagatgcaatacacgtggcaatcagttgtggcaagctgaaaattgatctgagacttaatatttcaacacgtatgtttcgtaagctaaaaaaaggcacgtcttaagcttaagatctgttggtgcaaccagaataaattttaggtgatttatgtgatcaatataggtatgtggtagaatgattaagctacagtgtgaggccatactggcagactagatcaccaatttatgtcatataaactacgcataatattcagcatatttttttaatcaaggctgttctttgaaattgaaaatatgtcatttatttttgaagttatatttctttaggcgcgattgagagtaaaatttcataatactgcgcggatgcgcacatagacagtatggcgtttagttgctgaatctttcaagttatgtataaatacaatatatcagtgaaagaaaaggtgtgaaaagaatatacagtaaaacctgccatatccggatcaatgt

SEQ ID NO: 4865 - DNA, 1936 bp, Diabrotica virgifera
gcgttttacttttccgcatgcgtgttaatttagatatgttaatatggccttaaagtaattataatacatgcaataaactaatatttagatattatttaccaatttatttcaaatatatcttattgtgttcatgttttaatgaaattaacgcgagaattcgatgaaataaaataagtttgatataatattcgaaagttaaatcagtagacaataacagtggttttgaatcatcgtcatggaaaccaagatcgtcgtcatgctaaccaattatgctgaaagtttaattttgacaaccttgtcaaagaattaatttgtgtatgtattttcatattaattaaattaattgattaagatttggtcattttttaaagactcgtagaaaaaatattgttcctaactcttgcagaaagtctcttttccgcactcgactgcttgccgaactcccgcttcgcgtcgttcggcaaactgcagtcgcgtgcggaaaagtatgactttctgcacttgttaggaaaataactattacaactttaacacatgacaacaataacaatgtcacctgtcaactctatatgtgtttatatattttttctggctttctgaacgtcactagacatttttaggttattcaatgacgtctcgaataccctttaacttaatacttcttcttttgcgccaagggagttgttctatgtaggatcaaactgttaacttcttggcataaaagtaaatagtgcaacaagtgaaggatccagaacggtattaactcagtgtgcccgtgtgtctactaacgtggcggttactctatattcacttctttgacttccgaacgtttttacgggtacaagtggaaacttgtaggccttacacatcgatggcattgctacaaataatattactgatttgttacgttgcttgatacagttttttttcagaattcgaaaaggattttttaaattgatcactttgtttttctttttaaaagtattacacacactttataggtagctgaaagatataaattaaattttgtgtgggtttagctgtatgcagtactgtataggtaaaatctaaaaggtttataaataaggtactgggaaacttcggaaaaattaaaatgtctacaaatatatcaactaggttgctagagcgtatttatttgattatttctattcagtttggctatgttacctttttataaaccttgcatggaatccaaagatacaggatgtcccaaaaacgataaggaagtagtactaatcgattgtactgattgtaaatattaggtaatagatgaaatgaaaacaaacagttatatagaatatatatttaggaaaaaccaattttgagatatattcttttagattttccggtaagtgtattagaatgttacagtgaatggtgtttttaatagaattttttatgtaatgtagatgaaaggatatctaacaggatatgaataagagtttgaaggattttagacgaataaacagtatacagtaatatcaaaacaattattgacgaacgtcagtttaatgacgtcataaataagtgcacatggtgtttatttgtatttacgaactcgagaagaagataatttttgattttattaaattcaattcttatgatttacacaaattattgagagtacttttatcattatatgtattatgtattaaaaattcggaactatcggatgaaataaatataaaaagagtagtgagacaaggctgtatactctcacctttactctttaacttgtttcataggaaatatttaaggattatttaatatttaatggaggcaaaagaaaaaaaaataacatttattcgcagaaggtttaagttgtaaaataatgatcaaacaacagaaataaaggccagaatagaaataccaagagatgtgtttataaaaatgaaaacaattatctgcaataaag

SEQ ID NO: 4866 - DNA, 674 bp, Diabrotica virgifera
gcgttttacttttccgcatgcgtgttaatttagatatgttaatatggccttaaagtaattataatacatgcaataaactaatatttagatattatttaccaatttatttcaaatatatcttattgtgttcatgttttaatgaaattaacgcgagaattcgatgaaataaaataagtttgatataatattcgaaagttaaatcagtagacaataacagtggttttgaatcatcgtcatggaaaccaagatcgtcgtcatgctaaccaattatgctgaaagtttaattttgacaaccttgtcaaagaattaatttgtgtatgtattttcatattaattaaattaattgattaagatttggtcattttttaaagactcgtagaaaaaatattgttcctaactcttgcagaaagtctcttttccgcactcgactgcttgccgaactcccgcttcgcgtcgttcggcaaactgcagtcgcgtgcggaaaagtatgactttctgcacttgttaagaaaataactattataatattctttctatttattattatctatgggacctatattaatgatagatagtttagtgtttttttactttataaatttgcatttactatggagaacaatttaaatttacaaatggagaattttgattaaaatctaaatgtgattttgaga

SEQ ID NO: 4867 - DNA, 1370 bp, Diabrotica virgifera
  SmartBlast Evalue=7E-25; Info=AP-like endonuclease/reverse transcriptase n=8 Tax=Adineta vaga RepID=D2K2T4_ADIVA
ctttagtaaatcaatcagaaaatcatggtccttacttagaaaacttggtagtagcagacactcaactagagacaaagtaccaatagttcccaacagagtggcctcccacattgtagcaaccccaagagcacctagaaatcgtgaccacaccaacaaagtaaaacactaaaaatactacagtctgcatgaccgcctacatctgaatactctgacgagtttactccagaagaaattacttcagcaatatcagaaattaagtctggaaaggcacccggctccgataaaatacatccagaatttttactccactgtggaaccacaccaaaaccaggaaaggcaaatgatcagtcccaaaactaccaccgattgccctgctgagctgtgtctataaactgttggaacgcttaatctacaacagaattagtaacaccatatttgggttgatacctattgagcaagcagggttcagacctaaccgcagctgcagcagatcagatcctatcccctaacacatatcgaagcaggttttcaaagaaaggaaaaacatccgttgctttcattgacctatcagctgcatacgacaccgtctggagacaaggactaatctgcaaactgatccgtgccatcccgtgccaaaaggtaaccaaactcattgatagcatgctcaccgacagaccttttcacgtcacaatgggcaacttaagaagtgtccaaatgaagctcagcaatggactgccacagggatctgttttggcacccttactctttaatttatacatcgcggacctacctaggacaacttcgcagaaatttggtacgctgacgattgggccattgcagcaagacataataacatgaatgttacagagacaatactgacggatgaccttgctgttatgggtgaatattttcgcaaatggaggctacggcccaatgcaacgaaaactgaagtgtgctgtttccatcttaataatgcccaagccaacaaaaaactctccgttcactttgaaaacagactactcgctcataactcaacaccaaaatatcttggagtgactcttgacagaaccttaagttttaaggaacacctacaaagaacggcagaaaaactgaagacgcgaaataatataatccaaaagctatgtggcaccacatgggggtcctcagcctccgtactcagatcatccgctctcggactcgtatactcggcggctgaatatgcttcgccggtatggctcaatagcaaacacacgaagatcattgacacccaattaaaccagacaatgcgaatgatctcaggtacaattcgaccaacaccgaactattggcttcccattctgagtcacattccaccgcctaaactaagaaga

SEQ ID NO: 4868 - DNA, 1224 bp, Diabrotica virgifera
  SmartBlast Evalue=8E-25; Info=Pol-like protein n=1 Tax= Biomphalaria glabrata RepID=A3FMR3_BIOGL
ctcagcaatatcagaaattaaatctggaaaggcacccggctccgataaaatacatccagaatttttactccattgtggcaaatatgctaggaaatggctggctgatttctacacagatatattaaaatcaggagaaatcccccatttccttaaaaaggcctccattatagccatattgaaaccaggaaaggcaaatgatcagtcccaaaactaccaccgattgccctgctgagctgtgtctataaactgttggaacgcttaatctacaacagaattagtaacaccatatttgggttgatacctattgagcaagcagggttcagacctaaccgcagctgcagcagatcagatcctatcccctaacacatatcgaagcaggttttcaaagaaaggaaaaacatccgttgctttcattgacctatcagctgcatacgacaccgtctggagacaaggactaatctgcaaactgatccgtgccatcccgtgccaaaaggtaaccaaactcattgatagcatgctcaccgacagaccttttcacgtcacaatgggcaacttaagaagtgtccaaatgaagctcagcaatggactgccacagggatctgttttggcacccttactctttaatttatacatcgcggacctacctaggacaacttcgcagaaatttggtacgctgacgattgggccattgcagcaagacataataacatgaatgttacagagacaatactgacggatgaccttgctgttatgggtgaatattttcgcaaatggaggctacggcccaatgcaacgaaaactgaagtgtgctgtttccatcttaataatgcccaagccaacaaaaaactctccgttcactttgaaaacagactactcgctcataactcaacaccaaaatatcttggagtgactcttgacagaaccttaagttttaaggaacacctacaaagaacggcagaaaaactgaagacgcgaaataatataatccaaaagctatgtggcaccacatgggggtcctcagcctccgtactcagatcatccgctctcggactcgtatactcggcggctgaatatgcttcgccggtatggctcaatagcaaacacacgaagatcattgacacccaattaaaccagacaatgcgaatgatctcaggtacaattcgaccaacaccgaactattggcttcccattctgagtcacattccaccgcctaaactaagaaga

SEQ ID NO: 4869 - DNA, 1437 bp, Diabrotica virgifera
cagcagagagatatgtatacaagtatatttacaggcatgcagagagataaaaaattgtgataaatatatcaaaattggttagactttgaaatatttatcaaagatggtatcagtaaactggagatacatttatcccattacgactatatatctgaatttaacagtgcaagtgttatcagatttaatatttgaaaatcgttatcggattgctattggtagagttaccattctaatacaagatttggagggcgaacaagagcattgtaattacaactataatcttacgtatataggggacgaatcttgtccatttaaaatgctacaaagtacaatgtcatttaatgacatagcacaaaaaacaataattaaaaatgtaacctgtattacattgcgagacgatacgagatactatactttaataaagcattcaaatagttgtaacgtactaacattagaaataatacaaactgaaaacataaacgtatgcctagaaaaattaagtcagcaaattaataatgaatatgagaaaaaaaataacgtcaaatatttaggtaaacaactcaaaaatattaaaattgttggaagtggtgcaaatacgtcacctacttcttatattttatctgttagtaaacagacatctacagaatctgatctaactcacaccacaatcacaacttggcattggaataaatcagaactacatgcattagcacttttattgtccggcactcttatacttatcataataattttaataagcttaatatacatgatttggaaaatgtgtaaaccttttaaagccgatcaaagaaaacaatatggctatataaatatatatagagaagacagtacaactagtgacggatatctaactccaaagcttgttcagccgccccaatacgaggaacttatctacagttctccaaatctacaagccaatattgatattagagcaatgcgtgacggatacttaaagtcaagaatagttgagccccaccaatatgaagaaattatctatcatcctcagcattcacagtattacaatctcccagtggtatcttcttgaacagaccaaatcggaccaatttagatacgatctcaaaggaataagaatctcattaccagaaacatagtgtaaatagtacccaaatatggaagtataaaatatattgcctgaggaaagaaatagtatattgtacaacaagagaggaaaaagacatatttctcacgagcgcagacgtttgttagcacgagccgaggtacgaggcgagtgccgcaaatcaagcgagggagaaatatgtcgttttctcacgtgttggatactgtactttttctatggatgcgtttttgtcaagagttcaatcttcaaaatgaaataatttaggtgctattatgtagattatataccaaaattgaaataaaatacatattatacac

SEQ ID NO: 4870 - DNA, 1166 bp, Diabrotica virgifera
cagcagagagatatgtatacaagtatatttacaggcatgcagagagataaaaaattgtgataaatatatcaaaattggttagactttgaaatatttgtatagttccacaatggttggagagagtctcattatttatttaacctacatatttctaatactacagtcgccgttagttaattgcaaaatttttacaaagttatggtagaagaagatattattcgcatacactcaaaatcatgcacagatgaaactgctgtcttgccgactgtgtgcaaaaaagatctgacgtacataggagatgcctcatgtacatttaaagaactaaatggtactgggagatttattctgaaggatgctgttgtaaacttaacaacctaaatcaaattttacttatttctattggtacatacataaaaaatggcattttttgaaaataagtttatttaatggcagttgtaatgtctgggttatagaacagcaacttaaaacttctgaagcaaaagtatgtcttgacaaattaagtcagaacgtagtaaatgagcagtttcctcaaaaaaatatttcaaagtgaaaaagaaagacatagagatcgttatagaattatggtagacaatgaaaatattctcacacacttaattacatgtaaagataaaacttccgtgataccgtctatgtgcaaaaaagatctcacgtacatagcagatgattcttgtccatttaaagaactaaacgatatctcgaaatttactctaaaagacggttttgtaaacttaataaccaaattaaattttacgtatttatattggtatatgtttaaaaaatggtatttttttaaaaccaacttatttaattcaagttgtaatgtatgggtcatagatcagccactgaaaacctcctatgcaaagatgtgtctcgataaattaagtgagaaccaaagagatgagcagttacctcgaaaaaatattccaaataaaaaagaaatacatagagaccgttataaaattatgatagacaaggaaaatatactcatacattcactatcgtgtaaatataaatctacgataccgtctgtgtgcaaaaaagatcttaagtatttaggagatgcttcatgcccatttaatgaactaaacggtattcaaaactttactctaaaagacgatattgta

SEQ ID NO: 4871 - DNA, 1722 bp, Diabrotica virgifera
cccaatacaacatcagacgattccaatacaacagcaaatggttctaacacaactgaagatgattccaatacaacagcagacgatactaatacaacagcagataatgccaatacaacagcagatgattcgaaatacaacaacagatatttccaatacaacagcagatgtttccaatgcaactgaagatgattccactacaactcaagatgatcccaatacaacagcagacgatactaacacaacagaagctgattctaatacaaaacagacatttccaatacaactgaatatgatcccaatacaacagcagacgattttaatacaacagcagatgattcaaatacaacaacggacctttccaatacaacaacggacctttccaatacaacaacagatgattccaatacaactgaagatgaatccaataccacagttgacgatactaacacaacatcagatgattctaatacaacagacatttccaatacaactgaagatgactccgatacaacaatagacgatactaatacaacagaagaagattctgacacaacaacagacatttccaatacaactgaagacgatcctaatacaacagcaaacgattccaatacaacagcagatgattctaatagaactgaagatgattccaatacaacaacagacgatactaatacaacagcagatgattctaatacaacaacagacatttctaataccactgaagatgattccaatacaacagaagacgatactaatacaacagcagataattccaatacaacagcagatgattcaaatacaataacagatatttcgaatacaacagtagatggttccaatacaacggaagatgattccaatacaacagcagactatactaacacaacagaagatggttctaatacaacaacagacatttccaatacaactgaaggtgatcccaatacaacagcagacgatacttatacaacagcagatgattccaatacaaacgcagacgattataatacaacagcagacgatactaattcaacagcagatgattccaatacaacagaagatgattataataccacagcagacgatgccaatacaacagcaggtaacactaatacaacatcacatgactctaataaaacagacagttccaatacaacagcagatgatttcaacacaactgaacatgattccaatacaacagcagacgatactaatacaacagcagacggtaccaatacaaaagcagatgattttaatacaactgaagatgattccaataccacagcagacgataccaatacaacatcagatgattctaatacaacagacatttccaatacaactgaagatgactccgatacaacagcagacgatactaatacaacagacgatgattctaatacaacaacagacatttccaatacaactgaagacgttcccaatacagcatcagacgattccaatgcagcagaagatgattctaatacaactgaagatgattccaatacaacagcagacgatactaatacaacagcagataattccaatacaacagcagatgattcaaatacaacaacagatagttccaatacaacagcagatggttccaatacaactgaagatgattccaatacaactgaagatgattccaatacaacagcagacaatactaacacaacagatgatgattctaatacaacaacagacatttccaatata

SEQ ID NO: 4872 - DNA, 878 bp, Diabrotica virgifera
cccaatacaacatcagacgattccaatacaacagcaaatggttctaacacaactgaagatgattccaatacaacagcagacgatactaatacaacagcagataatgccaatacaacagcagatgattcgaaatacaacaacagatatttccaatacaacagcagatgtttccaatgcaactgaagatgattccactacaactcaagatgatcccaatacaacagcagacgatactaacacaacagaagctgattctaatacaaaacagacatttccaatacaactgaatatgatcccaatacaacagcagacgattttaatacaacagcagatgattcaaatacaacaacggacctttccaatacaacaacggacctttccaatacaacaacagatgattccaatacaactgaagatgaatccaataccacagttgacgatactaacacaacatcagatgattctaatacaacagacatttccaatacaactgaagatgactccgatacaacagcagacgatactaatacaacagaagaagtttcttatacaacaagagacatttccaatacaattgaagacgatcctaatacaacagcaaacgattccaatacaacagcaggtgattctaatagaactgaagatgattccaatacaacagacgataccaatacaacagcagattattctaatacgacaacagacatttctaataccacagaagacgattccaatacaacagcagacgattccaacacaacagcagatgattccaatacaacagcagacgattccaatacaacagcaggcgattccaatgcaacagcagacgattccaatacaacagtagatgaatttcaatacaactgaagatggtt

SEQ ID NO: 4873 - DNA, 1322 bp, Diabrotica virgifera
  SmartBlast Evalue=1E-36; Info=Uncharacterized conserved protein n=1 Tax=Glossina morsitans morsitans RepID=D3TN34_GLOMM
ctcagggattgggtgtttctttaatctctcgctgcaaggttgttttcactgaccaacgtacgagtttttgttatatttgttcgcgcagtttaaataatttaaaggacccaatgttgagtgaaaatcagaatctagccatgaacggttacctagaaagtatatccaccaacttagaaaatagcaggaactgccttcgtcgcatagcaagacacgacgacacagaattctctaaccaaagtatccttaacgtcatggagaaattcgtaaagaccgtcaacaaaatggatgaaaccattttagtgccttgtcgtttgatggacctgaaagtcggagatgagcaagacccagcttgtcaaaattcaaaaaccaaatcatcccactctgtacaccaaattctaagttctacagacctgtttgagatctacaatatgttgaatggggtaaaggactcgctgttatggggaggagctcaagagcctccaaagaatcctccaccacctactaccgcaattgtaacatcagtaactactccaatcgtcaagggccacatccggcgaccctcttcagtgagtgtgacttccacaaattcgtcatctactctcagcgatactgattctgagtctggcagcaatgaaatcgattctggaatcgatgaaacgtcccaagaggaaggaaaagccgaaagaatcgctcaagattttaaaagacacttacatggactcaccagtacgttacgtcacatgacagaagctgctcagtacctgacctggcgttaccagtacgacattggtggccctgtttaacaaatctttattttaggtcaatggactgatgttttatattaattatagttaatttttggatacagggcgactcagcagtttgtgggcaaccagttcatatttgacacaaattaataaaaatacatactattcgcacgatgttataagtcgtgactgtgtgaaaatgaatgaataagtgaaaatagtttttaggtatttgtcatatacttttttaaatctttgatatttattagtttgtttacgattattaatgaaagaagtaaattaaattatctgtactatatgttgtcttttaaaacataaatttagaaagacatttattgcaaacttataaaatgttacattgaattaaagatgatatcttttgaggtagcaataaacaagtttaataacaatctagattgtttaaaaagagacagagctaccacaagaacatacattttcacaaaatgatactgtgtatcagtttattccaataggtttagattaatttctattatgaaatagtgtactcaattc

SEQ ID NO: 4874 - DNA, 1274 bp, Diabrotica virgifera
  SmartBlast Evalue=3E-33; Info=Uncharacterized conserved protein n=1 Tax=Glossina morsitans morsitans RepID=D3TN34_GLOMM
ctcgcttagtgaggttcgatccttagtgtttctggtacttagagattttcgaatacgttcttctgctttcaatttagcaaacaaaagttatattgatatagatgaaaacaaaacatacagaatctatggatgctgagaactgccttcgtcgcatagcaagacacgacgacacagaattctctaaccaaagtatccttaacgtcatggagaaattcgtaaagaccgtcaacaaaatggatgaaaccattttagtgccttgtcgtttgatggacctgaaagtcggagatgagcaagacccagcttgtcaaaattcaaaaaccaaatcatcccactctgtacaccaaattctaagttctacagacctgtttgagatctacaatatgttgaatggggtaaaggactcgctgttatggggaggagctcaagagcctccaaagaatcctccaccacctactaccgcaattgtaacatcagtaactactccaatcgtcaagggccacatccggcgaccctcttcagtgagtgtgacttccacaaattcgtcatctactctcagcgatactgattctgagtctggcagcaatgaaatcgattctggaatcgatgaaacgtcccaagaggaaggaaaagccgaaagaatcgctcaagattttaaaagacacttacatggactcaccagtacgttacgtcacatgacagaagctgctcagtacctgacctggcgttaccagtacgacattggtggccctgtttaacaaatctttattttaggtcaatggactgatgttttatattaattatagttaatttttggatacagggcgactcagcagtttgtgggcaaccagttcatatttgacacaaattaataaaaatacatactattcgcacgatgttataagtcgtgactgtgtgaaaatgaatgaataagtgaaaatagtttttaggtatttgtcatatacttttttaaatctttgatatttattagtttgtttacgattattaatgaaagaagtaaattaaattatctgtactatatgttgtcttttaaaacataaatttagaaagacatttattgcaaacttataaaatgttacattgaattaaagatgatatcttttgaggtagcaataaacaagtttaataacaatctagattgtttaaaaagagacagagctaccacaagaacatacattttcacaaaatgatactgtgtatcagtttattccaataggtttagattaatttctattatgaaatagtgtactcaattc

SEQ ID NO: 4875 - DNA, 1306 bp, Diabrotica virgifera
  SmartBlast Evalue=1E-120; Info=Sid-1-related C n=2 Tax= Tribolium castaneum RepID=A7YFW2_TRICA
gccggtcgaaatcatcgtctttgtgcgaaagttctcttaagtaggtaattattaggaatagaactcccaataggacatatcctatgttcgaaaacacgtggttgaaatctcccagtacacctaatggatgtgcacataagaaattgtaataacacaagtcttgttggcccgtctcattcaaaaccctttgataagtgatgaccaactgtatcactggtaaagcgtagaaaatggcaacggtgacaacattgtacagatacaaatacgatttcctcgtcaactctttgggatgcttcctcgccaaatccaccaaataaggctctcccctacccaacctcaggtccctatcggtgtccacctcggccaaggtatcgaagtcggccatgtccactgaagggccactaacggccgaaacggtgcgctgtacggaggtcatttctgcgtataaaagagaaattgcactgggagttgttgggaagttaccatcaacatacgccatttccctaggcagagattttttcaccgagtatatgaagtacggaagtccgaatattatgtaaaatgctcctacagatcccaaagtaaaaagcacagctttgacataatcagagtaggtaatacttggcttaattactaacttaatgcttttcagtcgatctggatttgtaacggcgtctaaatttccggaacccttatcacaggcataatcatcaggcttagctacaaagacgacataaaatccatgagggaatttatatttcggtatattcatccctccttttctattaacagtttcgtaaaagcctctaaaagtaacatcttggtttgtatcaaacactggacaactgatgttttgtatactgacagtcatgcaaatgtcatcctctgaggtcacttccagaattacggtttcataattggagtctcctttgctcaacaacgtatcattgctagtgaaattgtagaaaaagtatcttggtccgcttggagtaatgtcaaactctatttctttatttaattccagagtaaaatccttttgattgtctacccttatagtgaagcttacattggttactgatgaggtagtaacagaaacaatgacattctcttgttttaatttctgtttacttcctgcaaatctatattgtttaataatatcatggcacatagttctagatgtataattttcatttgtttcgccatttgtgccttctatttctaggggcagctgccaagaaatcatttcttttttctgtcttgctacaatcatcaaggggggcggtaacatctgcatcactttgaatcc

SEQ ID NO: 4876 - DNA, 1288 bp, Diabrotica virgifera
  SmartBlast Evalue=1E-120; Info=Sid-1-related C n=2 Tax= Tribolium castaneum RepID=A7YFW2_TRICA
gccggtcgaaatcatcgtctttgtgcgaaagttctcttaagtaggtaattattaggaatagaactcccaataggacatatcctatgttcgaaaacacgtggttgaaatctcccagtacacctaatggatgtgcacataagaaattgtaataacacaagtcttgttggcccgtctcattcaaaaccctttgataagtgatgaccaactgtatcactggtaaagcgtagaaaatggcaacggtgacaacattgtacagatacaaatacgatttcctcgtcaactctttgggatgcttcctcgccaaatccaccaaataaggctctcccctacccaacctcaggtccctatcggtgtccacctcggccaaggtatcgaagtcggccatgtccactgaagggccactaacggccgaaacggtgcgctgtacggaggtcatttttgcactgggagttgttgggaagttaccatcaacatacgccatttccctaggcagagattttttcaccgagtatatgaagtacggaagtccgaatattatgtaaaatgctcctacagatcccaaagtaaaaagcacagctttgacataatcagagtaggtaatacttggcttaattactaacttaatgcttttcagtcgatctggatttgtaacggcgtctaaatttccggaacccttatcacaggcataatcatcaggcttagctacaaagacgacataaaatccatgagggaatttatatttcggtatattcatccctccttttctattaacagtttcgtaaaagcctctaaaagtaacatcttggtttgtatcaaacactggacaactgatgttttgtatactgacagtcatgcaaatgtcatcctctgaggtcacttccagaattacggtttcataattggagtctcctttgctcaacaacgtatcattgctagtgaaattgtagaaaaagtatcttggtccgcttggagtaatgtcaaactctatttctttatttaattccagagtaaaatccttttgattgtctacccttatagtgaagcttacattggttactgatgaggtagtaacagaaacaatgacattctcttgttttaatttctgtttacttcctgcaaatctatattgtttaataatatcatggcacatagttctagatgtataattttcatttgtttcgccatttgtgccttctatttctaggggcagctgccaagaaatcatttcttttttctgtcttgctacaatcatcaaggggggcggtaacatctgcatcactttgaatcc

SEQ ID NO: 4877 - DNA, 1509 bp, Diabrotica virgifera
  SmartBlast Evalue=5E-75; Info=Placental protein 11 n=1 Tax= Camponotus floridanus RepID=E2APY1_9HYME
cagatacaattttattctttattaataaaaaatatttaaaaatgcaacaagaaattaaatctctgggaacgcacttccaatcaaattctttcctcggtatctgaatgtgtaagtccttatgataaaacgattgccattcaactttagagggcacactctatcaggtctcagaagaaaacaggtagaatataacgccatttccagttcagggctggtaccaataaacatggagtttactggtttgtctacaccattgagagtaaagtggaatttaactatataccctttaccacccaaatcgattttcttcatataacccaaataattagcatgattcttgttctcttcttcgttgaagtacacccagttatgtaatccagacacttggttgttttttatctctgccaaaaagacatgttcaaacgcgcttgagccaagctttcctccttgccttgaatacatattaaaccagataagattcaagaggtctttaaattcttgaacatctcttcctatttttcctttactcatgagaaaattccttgtatattgcatcacaggagtttgaactatggcgttcaaaagatctccctcttcgtttttctcttgctgtgaagtaacttcatttttgtttgcttccaaaatgtagttatcatataacggtaagagttttgagattgtagtcaaggaatacgctgcgggacttacagacaaaaggggtaaaggagcttcatctctagtagatcttgaagtagtaagtccttgccaattaatagtaacatactgagcagcattattaacagtatctttattcaacaaatcttctgagaattgacgcaattcattatcatcaacttctacgttagaattagcactagatccttggttagatcctctagcatcatctgaaccagttagaaaagaccctgaagaaacaacagtatttactccagcaggtcttgcataactacctccccgattatacgtattttggtttgccctatttgcactactatcaaaccttggataattcacatttggttccctcacataatatctttcttggttatacgaattagaattttgtgaagctggtctaaaattttgaactggtacattattgttttggttacttccctgagagttagttggcgaagtatttctcacccaattcggtccattatttggacgaacccactgaggagccctagtactttgcaaattgttctgttggtttctccgaccacccagtgctggccatggcgtgacaaaatttttgtcctgagtgttataattataactggaattgttcacattctgccaaggattttgcttgaatgagttatcagcacatatagcatttgttgcaaatattgtaaaaacaaatattacgattgcccttgcagacatcttaggttgccacaaaggttattctgattaaaattaaaaaacttatcaagatcatgatatccgttaattaattaatttatcaatatcaaaacaaagaac

SEQ ID NO: 4878 - DNA, 1083 bp, Diabrotica virgifera
  SmartBlast Evalue=3E-74; Info=Placental protein 11 n=1 Tax= Camponotus floridanus RepID=E2APY1_9HYME
cagatacaattttattctttattaataaaaaatatttaaaaatgcaacaagaaattaaatctctgggaacgcacttccaatcaaattctttcctcggtatctgaatgtgtaagtccttatgataaaacgattgccattcaactttagagggcacactctatcaggtctcagaagaaaacaggtagaatataacgccatttccagttcagggctggtaccaataaacatggagtttactggtttgtctacaccattgagagtaaagtggaatttaactatataccctttaccacccaaatcgattttcttcatataacccaaataattagcatgattcttgttctcttcttcgttgaagtacacccagttatgtaatccagacacttggttgttttttatctctgccaaaaagacatgttcaaacgcgcttgagccaagctttcctccttgccttgaatacatattaaaccagataagattcaagaggtctttaaattcttgaacatctcttcctatttttcctttactcatgagaaaattccttgtatattgcatcacaggagtttgaactatggcgttcaaaagatctccctcttcgtttttctcttgctgtgaagtaacttcatttttgtttgcttccaaaatgtagttatcatataacggtaagagttttgagattgtagtcaaggaatacgctgcgggacttacagacaaaaggggtaaaggagcttcatctctagtagatcttgaagtagtaagtccttgccaattaatagtaacatactgagcagcattattaacagtatctttattcaacaaatcttctgagaattgacgcaattcattatcatcaacttctacgttagaattagcactagatccttggttagatcctctagcatcatctgaaccagttagaaaagaccatatagcatttgttgcaaatattgtaaaaacaaatattacgattgcccttgcagacatcttaggttgccacaaaggttattctgattaaaattaaaaaacttatcaagatcatgatatccgttaattaattaatttatcaatatcaaaacaaagaac

SEQ ID NO: 4879 - DNA, 1304 bp, Diabrotica virgifera
  SmartBlast Evalue=1E-108; Info=Alcohol dehydrogenase n=1 Tax= Aedes aegypti RepID=Q16M07_AEDAE
tttatctcaaaggtcaaacacttcattctccaacaaaatacgtagtcatcataccaactacttaaataaatataaaaggttcggcggaaatctcactttaaaatttgttaaaaagtaaattattttttaaaaatggtgaaaggcaagcgattcgttttgcagaaggtcttcgatggatttcccaaggagagtgactttaaagttgaggaatatgagttaccaccagttaaaaatggagagttcttggcagaagccctttacctcagcgtcgacccttacatgagggcatatgtatctgactcatctgtgattgggacaacaatgataggatcccaggttgctaaaatagtggaaagcaaaaatccaaagtatcctccaggtaaatacgttgtgggctattttggttggcaaactcacacagttgcagctggcgaacgggctggtatcacatttcctccatttttgatcccagatcttggagagctgccaatatcacttgctcttggagttcttggaatgccaggaaacacatcctattttggtttacttgaattgtgtcaaccaaaagagggtgaaaccctcgtcgtttccggtgctgcgggagctgttggcagccatgtcggacaaattgcaaaaattaaaggatgcacagttataggaattgcagggtcagatgaaaaaggaaaatggttgacagaagaacttggattcgaccatttcatcaattataaaacggccaacataccggaggaattgaagaaagctgctccaaagggcattgactgttattttgacaatgttggtggagaaattagttcagcagtaatacatcaaatgaatttgtatggtagaatctcagtatgtgggtcaattgctaactacaacgatactacaagatcacttgctccggttgtccaaccttcaattgtatctaaacaacttaaaatggaaggattcgtcgtaaggcgatgggaaaaccgatggatggaaggtattaaacaaaatatggaatggatcaaacagggtaaagtcaaataccaagagactgtcactgaaggtttcgataatatgttcaaagctttcactggaatgttgaaaggagaaaacaccggaaaagccattgtaaaagtgtaataaaattagttagtttatttatgttttcatttatttgagatatttaagtattactaactatttaaaaagcaaattcaatataattgtggtattacatttgaaatgtgaattgtatttttaaatcttttgagaaatagtaattccaataaataaagttatctacctcgttt

SEQ ID NO: 4880 - DNA, 1275 bp, Diabrotica virgifera
  SmartBlast Evalue=1E-108; Info=Alcohol dehydrogenase n=1 Tax= Aedes aegypti RepID=Q16M07_AEDAE
cacttcattctccgacaaaaacacgtagtcatcataacaactaaataaatataaaaggttcggcggaaacatcacttgaaaatttgttaaaaataaattaaaaatggtaaaaggcaagcgattcgttttgcagaaagtcttcgaaggatttcccaaggaaagtgactttaaagttgtggaatatgagttaccaccagttaaaaatggagagttcttggcagaagctctttacctcagcgtcgacccctacatgagggcgtatgtatctgactcatctatgattgggacaacaatgataggagctcaagttgccaaaatcgtggaaagcaaaaatccaaagtttcctccaggtaaatacgttgtgggctattttggttggcaaactcacacagttgcaactggtgaacgggctggtaacacatttccttcatttttgatcccagatcttggagagctgccattatcacttgctcttggagttcttggaatgccaggaaacacatcctattttggtttacttgaattgtgtcaaccaaaagagggtgaaaccgttgtcgtttccggtgctgcgggagctgttggcagccatgtcggacaaattgcaaaaattaaagggtgcacagttataggaattgcagggtcagatgaaaaaggaaaatggttgacagaagaacttggattcgaccattttatcaattataaaaccgccaacataccggaggaattaaagaaagctgctccaaagggcattgactgctattttgacaatgttgctggagaaattagttcagcagtaatacatcaaatgaatttgtatggtagaatttcagtatgtgggtcaattgctagctacaacgatactacaagatcacttgctccggttgtccaaccttcaattgtatctaaacaacttaaaatggaaggattcatcgtaaggcgatgggaaaaccgatggatggaaggtattaaacaaaatatggaatggatcaaacagggtaaagtcaaataccaagagactgtcactgaaggtttcgataatatgttcaaagctttcactggaatgttgaaaggagaaaacaccggaaaagccattgtaaaagtgtaataaaattagttagtttatttatgttttcatttatttgagatatttaagtattactaactatttaaaaagcaaattcaatataattgtggtattacatttgaaatgtgaattgtatttttaaatcttttgagaaatagtaattccaataaataaagttatctacctcgttt

SEQ ID NO: 4881 - DNA, 1298 bp, Diabrotica virgifera
  SmartBlast Evalue=9E-38; Info=Endonuclease-reverse transcriptase n=1 Tax=Bombyx mori RepID=D5LB38_BOMMO
tacttaggccaacctgatgtagggacaaagtaataattcctacaaatataatgcaaggaaaaatccaaggacgaagaaatctaaggccgtagaagaatgtcctggatgagaaatttgagagagttggtttaggctgtaccactaacgaattgttcaaaacagcagtaaataaaatcagaatcgccctaatgatatccaatctccgataggagaggcactcaaagaagaagattcttctcctaggtcctttctttccaaatatcttactctgaaaaatgagttgtaacaagccgtatctctgttcattcctcataacatgaccaagctattctagtttacgatctttgattgtgctgatattctcacattccttacctactctacgtaggacctcaacattagacacacgatccattcatgaaattcttaaaattcgtctgtagcaccacacctcgaaggcctcgacttttcttaaacaagcttcagaaagtgtccagtcttctactccgtcaaataacgtagaaaatatatagcatctgatgatcataccctcaaaatatttctaaaggtgattcatggaagattatacagaaagctagaagatgatatggatgatacccaatttgggttccgcaaaggacttggaacaagagaggcattgttgcgtttaatgtcctctctcaaagatgcttagatatgaacctggatatttattctgtttcatcgactttcgaaaaagcgttcgacagagtccgacatgaaaaactaatagaattattgaaaaacagagatatagacagacgagacttacgaattatcataaatctgtattggaatcaaaaggccaatataaagatagacgaacaagagtccgagaatattgatataaagagaggggtaagacagggttgtgttctgtcgccgctactgtttaacgtatacagtgaagccatatttcaggaagcgatagcggaactaagtgatggaatctctataaacggaagaatagtaaataacataagagttcgctgatgacaccgttataatggcagacaccctggaatcgctacaagcattgttaagtagaattaacgattattgcattcgatatggactcaaaataaagaagaaaaaaaactaaatttatgattgtctcaaaagcacaactgaaatgaaaggttaatactagagcaaacccaaatagaaaaagtaaagacaaacaaatatctgggaacctgggttgatgacaaaaatgaccaaagcaaagaaattaaagtccgaattgaaactgccaggcc

SEQ ID NO: 4882 - DNA, 1229 bp, Diabrotica virgifera
  SmartBlast Evalue=2E-38; Info=Endonuclease-reverse transcriptase n=1 Tax=Bombyx mori RepID=D5LB38_BOMMO
tacttaggccaacctgatgtagggacaaagtaataattcctacaaatataatgcaaggaaaaatccaaggacgaagaaatctaaggccgtagaagaatgtcctggatgagaaatttgagagagttggtttaggctgtaccactaacgaattgttcaaaacagcagtaaataaaatcagaatcgccctaatgatatccaatctccgataggagaggcactcaaagaagaagattcttctcctaggtcctttctttccaaatatcttactctgaaaaatgagttgtaacaagccgtatctctgttcattcctcataacatgaccaagctattctagtttacgatctttgattgtgctgatattctcacattccttacctactctacgtaggacctcaacattagacacacgatccattcatgaaattcttaaaattcgtctgtagcaccacacctcgaaggcctcgacttttcttaaacaagcttcagaaagtgtccagtcttctactccgtcaaataacgtagaaaatatatagcatctgatgatcataccctcaaaatatttctaaaggtgattcatggaagattatacagaaagctagaagatgatatggatgatacccaatttgggttccgcaaaggacttggaacaagagaggcattgttgcgtttaatgtcctctctcaaagatgcttagatatgaacctggatatttattctgtttcatcgactttcgaaaaagcgttcgacagagtccgacatgaaaaactaatagaattattgaaaaacagagatatagacagacgagacttacgaattatcataaatctgtattggaatcaaaaggccaatataaagatagacgaacaagagtccgagaatattgatataaagagaggggtaagacagggttgtgttctgtcgccgctactgtttaacgtatacagtgaagccatatttcaggaagcgatagcggaactaagtgatggaatctctataaacggaagaatagtaaataacataagagttcgctgatgacaccgttataatggcagacaccctggaatcgctacaagaattgctaaatagaattaacgattattgcattcgatacggactaaaataaacaagaaaaaactaaatttatgattgtctcaaaaacagaacatggaaatgaaaggttaatgatagagcaaacccaaatagaaaaagttaagacatacaaatatctg

SEQ ID NO: 4883 - DNA, 1318 bp, Diabrotica virgifera
atcaaatacattcatatgtccatttttttgttatttttctgtatttcatacataaacaaagaacacgtaccaaaggtaattttgtataaagataagtattaatcgcacattttatgtatccagtgaatcattcattatacttgaacgcagatacgatatacttggttcaatattttttcacagactcatttcactgtccataaatttaaaagcgtatttatcaaacgttttttgacatagcgatgagattgtagatataagcaaatttaaacaaatattaaattaaggaactgaaagtaacatttaatttatcaatggcagtttaattttattaatatttattattatgaatcaaatattatagatcaagaaagtagaactacaaaaaaggagtattgaatgtaaattacaatgattgatcaacatgtttttcttatgttttgcacactttagatcggtatggagatgctgtctatcaatctcgctttgattttaaagcgtagattttgccaattattttctgaactagttttgtttgggtggaccactatttgcaattttatagttaccttcaccttagaaagttataattgagtcctatctcagtattctccaagcgcaaacataattatgtcattgaacgtctatagttaaccaattacatattatgaagcatttcaggacattctgtcaaataggggtaataatatgaaaagtttgcaatactcttttggattttgaaaagctagaatttgtttcaatgacaatgtaagacaatcggcgaaataaccaagatgtctttatattatgagtccttgctatccctacttcttcctcctatatactatctctattgagtttggcaaccagtatgacaaagcattgtctattgtatacttgtatgagaacgtttatttcagttcttctttcttcctatcccacgttttccttcacgtattccttgtggcgcattacatgtcgaagatgtgagattttcctaactctaaggccgtccgcacatgggtcgatcgaagacacgtctcgaagttcgcacgtcttgctcgtcttgtacgaaccctgcggcaaaagcgattgctcttcgcacactagtcgattcagttttctcatatcttccaaccaggaagtacgcattctttatattatcaaccaaaacgactatttcgatctgcgagaagaagtatggtattgttacatttttagtataatttgtatacagtgagcattatacaattgatggtagatattttttcaaattatatattacacgcctagaaacagcagttcaatgttttcagaa

SEQ ID NO: 4884 - DNA, 1210 bp, Diabrotica virgifera
atcaaatacattcatatgtccatttttttgttatttttctgtatttcatacataaacaaagaacacgtaccaaaggtaattttgtataaagataagtattaatcgcacattttatgtatccagtgaatcattcattatacttgaacgcagatacgatatacttggttcaatattttttcacagactcatttcactgtccataaatttaaaagcgtatttatcaaacgttttttgacatagcgatgagattgtagatataagcaaatttaaacaaatattaaattaaggaactgaaagtaacatttaatttatcaatggcagtttaattttattaatatttattattatgaatcaaatattatagatcaagaaagtagaactacaaaaaaggagtattgaatgtaaattacaatgattgatcaacatgtttttcttatgttttgcacactttagatcggtatggagatgctgtctatcaatctcgctttgattttaaagcgtagattttgccaattattttctgaactagttttgtttgggtggaccactatttgcaattttatagttaccttcaccttagaaagttataattgagtcctatctcagtattctccaagcgcaaacataattatgtcattgaacgtctatagttaaccaattacatattatgaagcatttcaggacattctgtcaaataggggtaataatatgaaaagtttgcaatactcttttggattttgaaaagctagaatttgtttcaatgacaatgtaagacaatcggcgaaataaccaagatgtctttatattatgagtccttgctatccctacttcttcctcctatatactatctctattgagtttggcaaccagtatgacaaagcattgtctattgtatacttgtatgagaacgtttatttcagttcttctttcttcctatcccacgttttccttcacgtattccttgtggcgcattacatgtcgaagatgtgagattttcctaactctaaggccgtccgcacatgggtcgatcgaagacacgtctcgaagttcgcacgtcttgctcgtcttgtacgaaccctgcggcacaagcgattgctctccgcatactagtcgattcatgtttgctcacatcttccaatcaggaacaacgcattttttatatatcaaccaaacgactatttcgatctatgaaaactacgatattgttaca

SEQ ID NO: 4885 - DNA, 1295 bp, Diabrotica virgifera
  SmartBlast Evalue=2E-95; Info=Leucine-rich repeat-containing protein 58 n=1 Tax=Harpegnathos saltator RepID=E2C156_9HYME
agggtctatcgatactttcgtccttccattctcttacggaggcagtattggcacatttggaagaacacaaatattggagcaatggaattctgtacttcccacaaaagtctacaaacttgatatgttcaacacggttgtcaaagtatacacctttgcaatggggattaacacaatgatgaccagagtttatatagctgaatagtgtggcaggtatatctccgggtccatatccaatattatataatttgatagttcttgccgacagttctaacaaacttgaaggactgtgactcatctcactgacgaatcttataattagtgggttatcacgcaaacttaactcagaaagattttttaacgctacgatttctggaggcagggtccttaatttgtttttgtgcagaagtaacgtcttcagtttgtgtaaattggctatatttgctggcagacattcgatatggttatcacataatactaaggcttgcaagtgttgcaaaaggccaatggctgcaggaacttcagtgagcttatttcctccaaaggataccatctgcaaattttgtaacttccaaatatttttggatatctctaccattccatttcctcctagatataaaaattttaatccaacgaaatccaggatttgctctggaaaatggcatagcttgtttccactcagattaagctcgattaaagaaaggcacttttcaaaactctttggtatagaactacaggttagcaaattatttttggcagtaaaactggtcaacggaaggtacttgaatacatctggcaaggtagtaataccattattgcttatatccaatactcttgtattagaaaactgatatacagagtcaggcagtgtaataagttgattgtgatgtagtattaacttctcgactaattcaaacgatttcttttcatcaaaatatttctctagtttgtcttctgtctcgtctgggttgagcagtagataggcataatctattactttaacactattttcactatcactactgtcagatgtataattttccattgtttgatctaactaacacagctgctggacatcaaaacactgctgcatccactagaggtgttcagctaacaaaactaaaaagataaatgtttaaattgtgtacatatctgaggtcacaatgttatcttcaatgttataccatgtcatcctaaattgctgtcagctttgttattattaattaagatacataaatggagtatcacatgttccatttaaaaaccattgccatgaaaatgtgaaatactataccttc

SEQ ID NO: 4886 - DNA, 1241 bp, Diabrotica virgifera
  SmartBlast Evalue=2E-95; Info=Leucine-rich repeat-containing protein 58 n=1 Tax=Harpegnathos saltator RepID=E2C156_9HYME
agggtctatcgatactttcgtccttccattctcttacggaggcagtattggcacatttggaagaacacaaatattggagcaatggaattctgtacttcccacaaaagtctacaaacttgatatgttcaacacggttgtcaaagtatacacctttgcaatggggattaacacaatgatgaccagagtttatatagctgaatagtgtggcaggtatatctccgggtccatatccaatattatataatttgatagttcttgccgacagttctaacaaacttgaaggactgtgactcatctcactgacgaatcttataattagtgggttatcacgcaaacttaactcagaaagattttttaacgctacgatttctggaggcagggtccttaatttgtttttgtgcagaagtaacgtcttcagtttgtgtaaattggctatatttgctggcagacattcgatatggttatcacataatactaaggcttgcaagtgttgcaaaaggccaatggctgcaggaacttcagtgagcttatttcctccaaaggataccatctgcaaattttgtaacttccaaatatttttggatatctctaccattccatttcctcctagatataaaaattttaatccaacgaaatccaggatttgctctggaaaatggcatagcttgtttccactcagattaagctcgattaaagaaaggcacttttcaaaactctttggtatagaactacaggttagcaaattatttttggcagtaaaactggtcaacggaaggtacttgaatacatctggcaaggtagtaataccattattgcttatatccaatactcttgtattagaaaactgatatacagagtcaggcagtgtaataagttgattgtgatgtagtattaacttctcgactaattcaaacgatttcttttcatcaaaatatttctctagtttgtcttctgtctcgtctgggttgagcagtagataggcataatctattactttaacactattttcactatcactactgtcagatgtataattttccattgtttgatctaactaacacagctgctggacatcaaaacactgctgcatccactagaggtgttcagctaacaaaacttcagagctttcaaataacagtgtcagagaactgagaacttgtacttgtatgtttatataattgcttttaaaaaacagatggtgctaatttgttaaagtcgcaatatcttttattccaaattta

SEQ ID NO: 4887 - DNA, 1803 bp, Diabrotica virgifera
  SmartBlast Evalue=1E-54; Info=Female neotenic-specific protein 1 n=1 Tax=Cryptotermes secundus RepID=A6Y7R8_9NEOP
ttttaattaaacaaacatttattaattgttaacaatatattacacattatgttaaccaaaagaaacgtaaggcggttccatatatttctcgataatcggcttaacgtatctgtagactctcggattttctctcacctcaaaggtagaatttatatttaaataggtcaatgaatctggattcgacattggccacgttacgttcaggagaagtggatccgctttaggggttggattatagtatttgataaagttggtccaaagtgttaaaagtcggcgcatcatcagtcgatcttcttcgggaaattgattcatatcactattatttagaaattcccaccaataatggagatcttccatgtgtccaactctttcagctccgggaacaatgtagatgtcatccatcatcccacctaaatctcccttataggcgaactggtacacaaaatagggtgcatgagcacatccgagctctatctgttttccagtaggcgttgaaaaagattgatcgctgctccatcttatatatgcagcaaaatcttccataaaagttctgttagtatacacttgtttcatcagaactccagcacgagttcgattctccggagacatatagagattggcatgtatgaggagactgggatcattatcaagtccttgcaataaagttgcgttgttcctgttggtagcgtattttatccactcttcggaattaaagccaatcatcatgggaactttcttaaagttgccatccataaaactttgtaagggaagaagtgaatagtaaccagtttttctatcatgttgccataagtacgaccagccttaataatatcttctgcagaagcctttttgagaacttttagaatatcttctgactcttcagagtcaaatgtaggatcaagatatttcgctaaaccgataatattttcttttgcatttttctgtagagttccaccaatcattgatccactttcttgtattgcagcatggaataattctttttctccgttccaattccccataaccaacaaacctactgctgctgaaccagaactttcaccagcaattgttacatgatctggatcaccaccaaaaagatttatatgttggttgacccattctagagcaaatcgttgatctttaagtccaaggttgccaggtattacatcgtcatcagtagaagcaaatccaaatgcgttgagcctgtagttaatagcaacaacaacaattccataatccatgatatattttggaccgtaatcatcataagtgccagatccccaattgagtcctccaccatgtatccaaaagagtactggtagcttatcgttacctcctggtttcacaggtgaatatacatttaaatatagacagtcctcagtcttttctaatttatacttgttagcctgttgacacaccttagtattcttagtggtattaaggattccattccagggttcaggaggtttgggaagctgaaacctattttctccaacagctggtgcagcatatggaatttcttggaaagcgtagtaaatatttccttcataggtttttaatatatgtccccgtatatttccagcagataaattcacgatcaaatcgtcatttccaaaacttagtgttaaaaccaaaataaacataaaagccgttgaccacatattcaccaaaattttttgaaaaaagatcaaatcgttgctgttgtttaagcggattgtcaatattagaattcgtttctatatcttaaaaattgaatatttctgaaatattatttttaagtatttgcgtagatagatttcaaga

SEQ ID NO: 4888 - DNA, 727 bp, Diabrotica virgifera
ttttaattaaacaaacatttattaattgttaacaatatattacacattatgttaaccaaaagaaacgtaaggcggttccatatatttctcgataatcggcttaacgtatctgtagactctcggattttctctcacctcaaaggtagaatttatatttaaataggtcaatgaatctggattcgacattggccacgttacgttcaggagaagtggatccgctttaggggttggattatagtatttgataaagttggtccaaagtgttaaaagtcggcgcatcatcagtcgatcttcttcgggaaattgattcatatcactattatttagaaattcccaccaataatggagatcttccatgtgtccaactctttcagctccgggaacaatgtagatgtcatccatcatcccacctaaatctcccttataggcgaactggtacacaaaatagggtgcatgagcacatccgagctctatctgttttccagtaggcgttgaaaaagattgatcgctgctccatcttatataagctccaaaatcgttgacaaaagtcgttgatgtataaactttcttcattaaccttcctgccatatgtcgattttctggcgacatatttaaatttttgtgaatgagcagttctggattatcatcaaatccttttaaagttccgttacttcgatttttagcgtattttatccactcttcggaattaaagccaatcatcatggga

SEQ ID NO: 4889 - DNA, 1295 bp, Diabrotica virgifera
ttattttgcttcaaaccacttattgttattaaaatatcaaagtacaaaaagtggtaaagaaaaacataacatacataaaccagtggcgacgtgtgactttttctaaagtgttaccaaacccagatgtagaaaatcttgtttaaaagaacctcgcaaatataagtcagtggcggatctacgggaaaaaggggaaatccccccccctaccaacaaggtccaaaattaagatatctattcatcatggcaattgattgggaaaaaattgtaactgaactaagtgctgtgttccaagatgagcaagagacatttgcgagagttttgttttatttaggagaagaagaaaaggtgtataaagatgccgataaactaggaccgcagatgaagatcttaatgtcatctatgaaagtagcatctttgtttagtcagtacgccaaacggttagcagaggacacaaagagggctgattcggatgaaaagttcaaacgagtgatgggtctaatctgggcccaaatgatggacgctaacaaacagacagatgacaaagataaaaccccagatgtaagcattattgccaaattagaacacctgtctctagaagcttcgccaggaatggttcgcgccttgagcattattccatatgaaagccaaaagcgttttttagtaatgctcaaagacatcgtaccaacaacagtgctatcgaatgtagagtatgttgttgaaactgttaacaaagtaggtggtgctgtagtaactgtagctttagctagtatacaattggcatatgaagctattgttaacattagaagatggtggaatggagagatttcaggcaagagatgttgtaaaaatattatagattcacttgctacaattggtggtagcgttggtggaggatttgctggtgtagctttgggagcacttggaggtccagttggcatgataatcggaggtattggtggaggaatgttgggcggagaattggccaagcgtctgtcgcaatggatgactgaaaaggtatttgatgttccaaaatctgaggcgctagaaaatgcttataatttctttaatttgcgcaatcatgcttccaatcatcagataaatacagcttacagacagaagtgtctagaataccatcctgataaaggaggttctgaggaaatgttccataaagtgcagatggaaatggcggttattaaagctgccaaaggagaattgtattcataataattagtttgtatttttgtacttagatttagattatataacatattttgtactatactattttctgtaca

SEQ ID NO: 4890 - DNA, 1238 bp, Diabrotica virgifera
cttggcttcgtttaggttttagcttagcactagcaccacgttttcgttttaagttgactgttgactttggccattgtttaagtgtagttgtcttatcgttatcgttacaatttgcaatttggattgagtttgagttgttaggaccaggaccaggtttataacacaagtggatatctattcatcatggcaattgattgggaaaaaattgtaactgaactaagtgctgtgttccaagatgagcaagagacatttgcgagagttttgttttatttaggagaagaagaaaaggtgtataaagatgccgataaactaggaccgcagatgaagatcttaatgtcatctatgaaagtagcatctttgtttagtcagtacgccaaacggttagcagaggacacaaagagggctgattcggatgaaaagttcaaacgagtgatgggtctaatctgggcccaaatgatggacgctaacaaacagacagatgacaaagataaaaccccagatgtaagcattattgccaaattagaacacctgtctctagaagcttcgccaggaatggttcgcgccttgagcattattccatatgaaagccaaaagcgttttttagtaatgctcaaagacatcgtaccaacaacagtgctatcgaatgtagagtatgttgttgaaactgttaacaaagtaggtggtgctgtagtaactgtagctttagctagtatacaattggcatatgaagctattgttaacattagaagatggtggaatggagagatttcaggcaagagatgttgtaaaaatattatagattcacttgctacaattggtggtagcgttggtggaggatttgctggtgtagctttgggagcacttggaggtccagttggcatgataatcggaggtattggtggaggaatgttgggcggagaattggccaagcgtctgtcgcaatggatgactgaaaaggtatttgatgttccaaaatctgaggcgctagaaaatgcttataatttctttaatttgcgcaatcatgcttccaatcatcagataaatacagcttacagacagaagtgtctagaataccatcctgataaaggaggttctgaggaaatgttccataaagtgcagatggaaatggcggttattaaagctgccaaaggagaattgtattcataataattagtttgtatttttgtacttagatttagattatataacatattttgtactatactattttctgtaca

SEQ ID NO: 4891 - DNA, 1281 bp, Diabrotica virgifera
  SmartBlast Evalue=4E-70; Info="Retiin, putative n=1 Tax= Pediculus humanus corporis RepID=E0VLP9_PEDHC"
ttcaatgataacaaataaataaactttatttggattaaaaagcattatctcttaaaccaaacccatggttatagttaatagaagttggtaacagtgatagattaagctatctttgtcggacagtaacttcatcgtgagttaataagttgttacctgtagagctgtccttgttggaatgggcgtgctggacgtcttaggggtagttttctttggacttaacgatgccaatcctagtcttacccttctggcgttagatgcagcactggtagttgacatactcgacattagagattctttagaacccatacgctttatgccgctaggcggtaatccggtaccgtgtacttggcaagtaccgggctttatttttgaaggagacttgcttactttcgtaatgggtgcgaacagaccgaaatttggtcgacattcgaagtacctttttccgttaacagaaccatcatttttacccctaggatcatctagctctaccccaacccattctccagctgcaaattcggtaatacccatatatcttacagtacccactttagagccttggctacttttgataataacgcgatctcctattttgaaatcgatcacatgggaagccgatgatataagacttaagtttgatccacatacagatactggtgattttagaagaccatgggtactaccagtgggagaaatcgaattccttataacgttttcgggtgatggagtagtagcatagctaacaccttctaaaggttcttttgttagtcgagttaatcgcgaaaacacgcctttcttgggttcacattgaaaatatcttataccattaacagatccatcatttttaccaattggctcttctagtgcgataccagcccactctccaggagcaaactgtgtttcaccaataaaggcaatatgtccaggtttcgttccggaaacccaaactttctgtccaataataaaactgtcagtgtcttccgtcagaatagtgctggaatctgtgatacgatgccttctaactcctccagttataattctaatcgattcatctgaactatcgtaattcatgtttccttattaaaaggccacgaagggcacaactataatcacacaactaaaagcaagaccccactaaccactgcctactgagatgcgaggaggtatgttactttactcaacaaaaacaaaacactttctgtagcacaaaagaggaatgacataacaataataacaaaacgttacttggacttcacgctcactggcagaggtgtagagtgtgga

SEQ ID NO: 4892 - DNA, 1253 bp, Diabrotica virgifera
  SmartBlast Evalue=1E-71; Info="Retiin, putative n=1 Tax= Pediculus humanus corporis RepID=E0VLP9_PEDHC"
ttcaatgataacaaataaataaactttatttggattaaaaagcattatctcttaaaccaaacccatggttatagttaatagaagttggtaacagtgatagattaagctatctttgtcggacagtaacttcatcgtgagttaataagttgttacctgtagagctgtccttgttggaatgggcgtgctggacgtcttaggggtagttttctttggacttaacgatgccaatcctagtcttacccttctggcgttagatgcagcactggtagttgacatactcgacattagagattctttagaacccatacgctttatgccgctaggcggtaatccggtaccgtgtacttggcaagtaccgggctttatttttgaaggagacttgcttactttcgtaatgggtgcgaacagaccgaaatttggtcgacattcgaagtacctttttccgttaacagaaccatcatttttacccctaggatcatctagctctaccccaacccattctccagctgcaaattcggtaatacccatatatcttacagtacccactttagagccttggctacttttgataataacgcgatctcctattttgaaatcgatcacatgggaagccgatgatataagacttaagtttgatccacatacagatactggtgattttagaagaccatgggtactaccagtgggagaaatcgaattccttataacgttttcgggtgatggagtagtagcatagctaacaccttctaaaggttcttttgttagtcgagttaatcgcgaaaacacgcctttcttgggttcacattgaaaatatcttataccattaacagatccatcatttttaccaattggctcttctagtgcgataccagcccactctccaggagcaaactgtgtttcaccaataaaggcaatatgtccaggtttcgttccggaaacccaaactttctgtccaataataaaactgtcagtgtcttccgtcagaatagtgctggaatctttgtgtcggcttaatccagcttcgtataaagcgttaggatggaggtcccaaagagcgtctagcgaggatgcggtgctaccatctgtgatacgatgccttctaactcctccagttataattctaatcgattcatctgaactatcgtaattcatgtttccttattaaaaggccacgaagggcacaactataatcacacaactaaaagcaagaccccactaaccactgcctactgagatgcgaggaggtatgttac

SEQ ID NO: 4893 - DNA, 1289 bp, Diabrotica virgifera
  SmartBlast Evalue=2E-94; Info=Homocysteine S-methyltransferase n=1 Tax=Bombyx mori RepID=Q2F5Q8_BOMMO
tttaattctttcacaaccattagataatcttaggggttaagtgacctgtgtcgcacagtgaccagcacaataattttgatcgaatctgttgacaatcctatataatttttattatggtagtcaaagatacttcatttagtttcgtcttggtgtaacgttgtgggtaaataacaattaaactgaaacaatggcccccccgggtatcgggaattcggtggagatccgccccgaggcgacagcatcgtcggcagagaggagcagtagcaacggagtcgctacattccaaaaggacatcgtcgttttggatgggggcttcgctactcaattaggctgccacgtccaacaaccgattgatggagacgtcctatggagttccaggttcttggccaccaatccagaggctgttattgatactcacttagattttctcagagctggtgcggatgtaattattactaacacatatcaagcagatgtcaacttgtttgccaaacatctcaatatgaccaaagaagaaggatacaacttaataaaagactcagtgaagatggccaaaacagctgttgaaagatatttaaaagaatatccggaagcaagaaaacctcttatagctggttcagtgggtccttacggagcttcactacatgatggttcggaatacacaggagcctatgcgaaaactacttcggcagaaaccatgagagaatggcacgggcccagaataaaagccttggtggaaggaggagttgatctcttagcaattgaaactattccgaatgcagttgaagctgagatgttggtccagttaataaaagaagaatatcctaatgttaaagcgtggcttgcttttagtgtagcgcaagacggaaaatcaatagcctacggagaagacttcaaaacaatcgcccgaaaatgttatgactccaatcctgagcaattagtagccataggaatcaactgcacggccccacgactaatcgaaccccttctcaccgggataaatgatgatagaaaagacaacccccgaccacttattgtctaccctaacagcggagaaagttacaatgtcgaactcggatggcataaccgagaaaactgcgagccagtagacacaaatattcacaaatggttagatctgggagtcacgtgggtcggaggctgctgtagaacctacgccgtggatgtcacaagaatacgcgaccaagtgcagttatggaaggagaaacagtagctaaacgttgaatttatattttaatttttatttttaataaaataaattctcactaatt

SEQ ID NO: 4894 - DNA, 1242 bp, Diabrotica virgifera
  SmartBlast Evalue=1E-94; Info=Homocysteine S-methyltransferase n=1 Tax=Bombyx mori RepID=Q2F5Q8_BOMMO
cgccgactgccgacttgatcggtcgatttaggtagtaggtgtaataaattttgaaagtgataaagacagtttgtgataaactgtagtgcagttcttttcgtttattttctcacctctcacataacaattaaactgaaacaatggcccccccgggtatcgggaattcggtggagatccgccccgaggcgacagcatcgtcggcagagaggagcagtagcaacggagtcgctacattccaaaaggacatcgtcgttttggatgggggcttcgctactcaattaggctgccacgtccaacaaccgattgatggagacgtcctatggagttccaggttcttggccaccaatccagaggctgttattgatactcacttagattttctcagagctggtgcggatgtaattattactaacacatatcaagcagatgtcaacttgtttgccaaacatctcaatatgaccaaagaagaaggatacaacttaataaaagactcagtgaagatggccaaaacagctgttgaaagatatttaaaagaatatccggaagcaagaaaacctcttatagctggttcagtgggtccttacggagcttcactacatgatggttcggaatacacaggagcctatgcgaaaactacttcggcagaaaccatgagagaatggcacgggcccagaataaaagccttggtggaaggaggagttgatctcttagcaattgaaactattccgaatgcagttgaagctgagatgttggtccagttaataaaagaagaatatcctaatgttaaagcgtggcttgcttttagtgtagcgcaagacggaaaatcaatagcctacggagaagacttcaaaacaatcgcccgaaaatgttatgactccaatcctgagcaattagtagccataggaatcaactgcacggccccacgactaatcgaaccccttctcaccgggataaatgatgatagaaaagacaacccccgaccacttattgtctaccctaacagcggagaaagttacaatgtcgaactcggatggcataaccgagaaaactgcgagccagtagacacaaatattcacaaatggttagatctgggagtcacgtgggtcggaggctgctgtagaacctacgccgtggatgtcacaagaatacgcgaccaagtgcagttatggaaggagaaacagtagctaaacgttgaatttatattttaatttttatttttaataaaataaattctcactaatt

SEQ ID NO: 4895 - DNA, 1269 bp, Diabrotica virgifera
  SmartBlast Evalue=7E-73; Info=Tetraspanin 1 n=1 Tax=Chrysomela tremulae RepID=C3UTC3_9CUCU
agttaaaattactctatatttaacatttaaagaatctacatacatactacatagacctagtaaagaatatacaaaaacagaaaaggtatatttaacttatatgtaaacactaacacattatacatgagtgtaatgaaatgaacgatggtttaatccatatttaaatctatatttatttaaatcattatttttatatttaatacacgactaattcttaagcttcagaagactctgccacgtataggactggactaactttctcttgtgtgttagattttgcaagcgactcgtacagttgttgtcttcttattgttctttccacttcaatctgtgttttaagttttctaatagatctggccagaagatgggcaaatgtagcaccgagaagctgaatgaatgttatgcacatagccccaactccaagcagaagagcactttgcgagattatatagtggatcttcggtaagcaacctctcgtgtaaagagaagcgatactttggcatttggtatttctgcagcagctctctggtacttggtaaactcctgggtaatttatttgttgcgagtctgaacttgttgagtcgtcttgtaaactataaatgactgtgagattgtagtctgaactgttaaatctgtcccagtcgtttggaccatgtactccacagcagtgcaacgagtattgtgttgcatcccaaatatatccagtatcggctatgtaatactccatactaatccacatatcctgagaaagtgtttcttccaagtgactcctggatttgtaagcaatgatacttacggtcaattccaggataactattacaagaagtagtaaagcgtatagattaaccagtagaacactttctttaattgctcctgcacaaccaaacaaagcaaccactagaatgatgaacccaacagctatagctaagtcggatgctttgtagctatggctgctaaggaaagcgtcaaaatcggtgtagatagccttaatggtatatccaattgatatcagcaacaatccaactaacatgaacataaaattcgccacaaaaatcatgtacttcacacatcgcatccccatctgcaattcccggtctttagacatttttgataatagtaaatgtctttcaatcgtgcaaaataataacttacagtttgagagaactgattcgcaacgcaaacgcaacgactcgactatacgtacacaagcttggtgtattgtcacctgacttcaagttcgacttatctgcttgttgataagataggtac

SEQ ID NO: 4896 - DNA, 1261 bp, Diabrotica virgifera
  SmartBlast Evalue=1E-76; Info=Tetraspanin 1 n=1 Tax=Chrysomela tremulae RepID=C3UTC3_9CUCU
agttaaaattattctatatttaacatttaaagaatctacatacatagacctagtaaagaatacacaaaaacagaaaaggtatatattataacttatctgtaaacactaacacaatatacatgagtgtaatgaaatggacaatggtttaatctatatttaaatctatatttaaatcattatttttatatataacacacgacgaattcttaagcttcagaagactctgccacgtataggactggactaactttctcttgtgtgttagatttcgcaagcgactcgtacagttgttgtcttcttattgatctttccacttcaatctgtgttttaagttttctaatagatctggccagaagatgggcaaatgtagcaccgagaagctgaatgaatgttatgcacatagccccaactccaagcagaagagcactttgcgagattatatagtggattttcggtaagcaacctctcatgtaaagagaagcgatactttggcatttggtatttctgcagcagctctctggtacttggtaaactcctgggtaatttatttgtggcaagtctgaacttgttgagtcgtcttgtaaactataaatgactgtgagattgtagtctgaactgttaaatctgtcccagtcgtttggaccatgtactccacagcagtgcaacgagtattgtgttgcatcccaaatatatccagtatcggctatgtaatactccatactaatccacatatcctgagaaagtgtttcttccaagtgactcctggatttgtaagcaatgatacttacggtcaattccaggataactattacaagaagtagtaaagcgtatagattaaccagtagaacactttctttaattgctcctgcacaaccaaacaaagcaaccactagaatgatgaacccaacagctatagctaagtcggatgctttgtagctatggctgctaaggaaagcgtcaaaatcggtgtagatagccttaatggtatatccaattgatatcagcaacaatccaactaacatgaacataaaattcgccacaaaaatcatgtacttcacacatcgcatccccatctgcaattcccggtctttagacatttttgataatagtaaatgtctttcaatcgtgcaaaataataacttacagtttgagagaactgattcgcaacgcaaacgcaacgactcgactatacgtacacaagcttggtgtattgtcacctgacttcaagttcgacttatctgcttgttgataagataggtac

SEQ ID NO: 4897 - DNA, 1779 bp, Diabrotica virgifera
  SmartBlast Evalue=4E-41; Info=Endonuclease-reverse transcriptase HmRTE-e01 n=1 Tax=Heliconius melpomene RepID= C6Y4D5_9NEOP
gtaatagaaaccaaaaccaaacataaaatgcttctgatactatttggttgtagctggattaaaactagaacatttagtatatttttcttattggtatttaaaaatcttgagaaggtccagttcctagacaaaagatatggagatgtaagagagaaaaaccggttcctaagaaggacataaggctcgtgaaggatatgtatgaggtagcgtacaccaaagtaaggacttgtgtcggttttaccgaaagttttccagttacggttggtttttaatcaaggatacttaatctctacctgtttaatcttgttatagatttaagggagtaggctccttggacaatactttttgctcatgatatcgtgttagtaaacgaaagcaaagaaatgttggaggaaaagttggagggttggagaaggactattgaagagggaggacttaaggttagcaggtagaaaacggagtatgtgtgattggaaggaacaagaatggttggtgacatagaattgtttggagaaaaacttggagcaagagtaagagaatttaaataccttggatcctacataacgaaaaatggaacaccagatctagaaattgtccatacgatacaggctctttggtttagctggaagcaaatatgcggtataatctgtgatctaaaaatcaggaaagggctgaaaagaattatatacgaaatatatagagtttggtgatgcctgcgttggtgtgaagcggtgaagtgtgggcctataaagaagattaaagtagagaatatggaggtagctgaactaaaaatcttacagtggatgctgggtaagactagatggtactggatcaggaatgacttgactaggaaaagagccagggtgaatacagtctaaaagaagaatcaaggaagactgcaatggtttggtaacgtttgatgtataaatgaaaactatgtaagactaaggataaagttgttagaagttgatggaaggggaggtagacaaaaaccgaggagaagatggaaggagtgtgtcgcggggacttgagagagaaatgtttaggtgaagaaggcacaatggacagttatggcgcagaaaaacagcgtccataaactccaacaaaagtaaggaaaagaaaaagaaactagatgtcagctattgtaccaataaccaataacgtataaaaacctaattttctaggcttattcctgtgcacaagaacttaccgtagatacaacagtttgggaacctactaaccttatatgtacctatattaaacagcaaataaattcaagctaaatcttgagaaaataattaataaacgtaatacattaaccaaatgtctgtaatatgaaacaccatatacaaaaagttattatcacaaacactcattgttcccaaacaatcccaactgacttctcaaaaggttgctaccgcataccggaaaatgagcaccttggtagtgcaaaactgaacctcctgtaggtccaggtgtaaaaaaaatgaaaatgaagctgaaacgctcctgcttgctcccaggttgactgactggagccggaataggttcctctcgggtggatgagggtctatgacttcccatgtagtagtgtattatttccccaaaaggcggatctctcagttcttcattactgttttcctttataaaacactgggtggattctgggaaaacactgtgaacaccatgtacatcctagagaactttatttcccaataaaggcttagtacttaagagaaagattccgccatttgggtactgtgacctacctattccgga

SEQ ID NO: 4898 - DNA, 742 bp, Diabrotica virgifera
tggattaagataaataccgaaacgatgacctaaattaaccgaacaaatggaataaagcgaatagaacaacgaaatatctgggagacaagctactaatattacaaaataaatatcaaaccaataacgtataaaaacctaattttctaggcttattcctgtgcacaagaacttaccgtagatacaacagtttgggaacctactaaccttatatgtacctatattaaacagcaaataaattcaagctaaatcttgagaaaataattaataaacgtaatacattaaccaaatgtctgtaatatgaaacaccatatacaaaaagttattatcacaaacactcattgttcccaaacaatcccaactgacttctcaaaaggttgctaccgcataccggaaaatgagcaccttggtagtgcaaaactgaacctcctgtaggtccaggtgtaaaaaaaatgaaaatgaagctgaaacgctcctgcttgctcccaggttgactgactggagccggaataggttcctctcgggtggatgagggtctatgacttcccatgtagtagtgtattatttccccaaaaggcggatctctcagttcttcattactgttttcctttataaaacactgggtggattctgggaaaacactgtgaacaccatgtacatcctagagaactttatttcccaataaaggcttagtacttaagagaaagattccgccatttgggtactgtgacctacctattccgga

SEQ ID NO: 4899 - DNA, 1406 bp, Diabrotica virgifera
cacaattctttcacttctttttcaacttcttcctgtagataaataaataatttattaatacaattagaacttatacaaatttaaagttctcattgcttcaaatcaccacaggtaaacatgttctttattgaccaactaatttggctttgcaaataatgatatataagttgtttcaaaacgttctgccatattccaaagcatttgtgtatagattcgtcagcttttgttgacaattttttgacgtgcatcttctatagacgcggattctgttatatggtgtagattagactttttaaaccacaaaaaaatttagtggagaaaaatctggtaatcgagaaggccattcgattctgcctctccttccaatcaaattctgaaaaattttggtctaaatattgacaaacaggtaaagtataatgaggaggtgcaacgttgtgttaaaaaatcaaatgattttcatcacatttttgatcattttcaataatatcagtcaaggcaaaattaatcacgttcttccagtaattgcaaaaatatttcgccatttaaattgccaggtaaagcgaatggtcttggtcccagtatttgccatattagctggtggtattccctaattgtatcagcctttttgatataaccttagcatttaaaacttctaatatatcggttttaaccgagtaattaacttttctattaatctaaaggtagtgactaaatggacgatggttagttgcaatttgcaacaaagaaaatggtgaatgttactcaaaaagcttaccaatggaatttcttttcgtacgtagtcctggactacttttactattcctacgcaggtatcgcacaaaaagctgaaaaaattaatttttttttgtaaaattactatcaaattcatcattagtattagattaaaactatgtacatacattttattttaaaccgttcacatgccaacgccaatggtttgaaaataattgatagtgaatgggagttgttaaagcagttatattgtctgatgattgattttaattaactaacttacgaacgtaggtaggaatattttttcgggtaaagttgttatttacattgttataatattccaattttatgtttaatacaaagtgatctggaacagaaagaagtcttcttatcgtatcaggacttttttacgtaaaaatttacgaaaattttacgtaaaaattaaagttcacgttaaagtaaaattatttaaaatgttttattttttacttaaaataattaattaattaaccatatcatttgaacaaattgaattttccatttgataaaaagactgataattattttttttataaacagtattttagtctattttcttctttattctgatgaacaagttctagaatgttttgattttatttaatatttcaata

SEQ ID NO: 4900 - DNA, 1116 bp, Diabrotica virgifera
cacaattctttcacttctttttcaacttcttcctgtagataaataaataatttattaatacaattagaacttatacaaatttaaagttctcattgcttcaaatcaccacaggtaaacatgttctttattgaccaactaatttggctttgcaaataatgatatataagttgtttcaaaacgttctgccatattccaaagcatttgtgtatagattcgtcagcttttgttgacaattttttgacgtgcatcttctatagacgcggattctgttatatggtgtagattagactttttaaaccacaaaaaaatttagtggagaaaaatctggtaatcgagaaggccattcgattctgcctctccttccaatcaaattctgaaaaattttggtctaaatattgacaaacaggtaaagtataatgaggaggtgcaacgttgtgttaaaaaatcaaatgattttcatcacatttttgatcattttcaataatatcagtcaaggcaaaattaatcacgttcttccagtaattgcaaaaatatttcgccatttaaattgccaggtaaagcgaatggtcttggtcccagtatttgccatattagctggtggtattccctaattgtatcagcctttttgatataaccttagcatttaaaacttctaatatatcggttttaaccgagtaattaacttttctattaatctaaaggtagtgactaaatggacgatggttagttgcaatttgcaacaaagaaaatggtgaatgttactcaaaaagcttaccaatggaatttcttttcgtacgtagtcctggactacttttactattcctacgcaggtatcgcacaaaaagctgaaaaaattaatttttttttgtaaaattactatcaaattcatcattagtattagattaaaactatgtacatacattttattttaaaccgttcacatgccaacgcgcgttttaatgacttaaaacgcgcgttagcatgtgaacggtctcaagtaaaatgtatgtagttaagcgcgttaagcgcctgtcatgaaaacggggcctttatttgaggccgttcacatgtcaatgcgcgctataatgatttaacacgcgcgttagcatgtgaacg

SEQ ID NO: 4901 - DNA, 1276 bp, Diabrotica virgifera
  SmartBlast Evalue=1E-80; Info=Cytochrome P450-like protein n=1 Tax=Tribolium castaneum RepID=D7EJT1_TRICA
gttattggcatgctccgtgacatttttagtgttagttatagtgaactactgggattaataatatatattatataaatgtctttcttgaattcttcatggctattcagccttgcaacattttgtattgggataatattcctgggatacaaatattttaccagagaatttaactattggaaaaaacgaggtgtgtacactccaaagccaattccattttttggcaatctttacgatgttgccacgttaaaactcactttatacgagtatgtacaaaagctttacgatgagactgaagaaccatattttggaatgtttatttttgataaaccagttttggtgattaaatcacctaagttaattaaagacattttgataaaagattttaacacgttttgtgatagaaccgtggctgatgttacccatcataatcttatatcgaagtttatctttatgcaaaagcaccaatcatggaaatatacaagggcaaagatgtctgcagtatttagttcctcaatgataaaaacgtattttacaaatttagagttaataaataagaaatttattgaacatttagaaaatatgtctggtccagtggatgctaaatacatagcgggtcatttcggcactgaaatgattgcccgttgttttttcgcaactgatccacggtgttttgaaagagaaccatcgaggttcagacaatgtgttcatcgtatatttggatttagtctgaggaacggaattgttcagactttgtatttttttatacccagtttggtaaaggttttcaaattaaaccctgtcgaagattcagtaatgcgatacttggaacaaacatttttggaagccatggactgtagaaagggatatagcggtaaaccggtcaatatggttgatgttgtcaatgatttagaaaaggcatacaatggaaattttcctgatcgggagctgcttatatctaatgccatctttttattggtagctggaccagaaacaactagttctatcatttcttttgccttatatgaattggctctacaaccagatatacaagaaagactaagaaatgaaattaaagacaattatgaaatttataaaggtttcacctacgaagggatacagaaaaataaatatttagatatggttgttaatgaaactttaagaaaatacggcgtgttaccatttattgatagagaacctattactgactattgcctagagggtacagatcttgtcattgaaaagggaatgcgagtgtacattcccttatttgctttga

SEQ ID NO: 4902 - DNA, 1235 bp, Diabrotica virgifera
  SmartBlast Evalue=1E-75; Info=Cytochrome P450-like protein n=1 Tax=Tribolium castaneum RepID=D7EJT1_TRICA
ttttttcaagttgagtgttgtgttaataaaataaatgtctttcttgaattattcatggttattcagctttgcaacattttgtattgggataatatttctgggatacaaatatgttacaagagaatttaactactggaaaaaacgaggcgtatataattcaaaaccaattccattttttggcagtctttacgatgttgccacgtttaaactaactttatttgagttgctaaaaaagctttacgatgagactgaagaaccatattttggaatgtttatttttgataaaccagttttggtgattaaatcacctaagttaattaaagacattttgataaaagattttaacacgttttgtgatagaaccgtggctgatgttacccatcataatcttatatcgaagtttatctttatgcaaaagcaccaatcatggaaatatacaagggcaaagatgtctgcagtatttagttcctcaatgataaaaacgtattttacaaatttagagttaataaataagaaatttattgaacatttagaaaatatgtctggtccagtggatgctaaatacatagcgggtcatttcggcactgaaatgattgcccgttgttttttcgcaactgatccacggtgttttgaaagagaaccatcgaggttcagacaatgtgttcatcgtatatttggatttagtctgaggaacggaattgttcagactttgtatttttttatacccagtttggtaaaggttttcaaattaaaccctgtcgaagattcagtaatgcgatacttggaacaaacatttttggaagccatggactgtagaaagggatatagcggtaaaccggtcaatatggttgatgttgtcaatgatttagaaaaggcatacaatggaaattttcctgatcgggagctgcttatatctaatgccatctttttattggtagctggaccagaaacaactagttctatcatttcttttgccttatatgaattggctctacaaccagatatacaagaaagactaagaaatgaaattaaagacaattatgaaatttataaaggtttcacctacgaagggatacagaaaaataaatatttagatatggttgttaatgaaactttaagaaaatacggcgtgttaccatttattgatagagaacctattactgactattgcctagagggtacagatcttgtcattgaaaagggaatgcgagtgtacattcccttatttgctttga

SEQ ID NO: 4903 - DNA, 1670 bp, Diabrotica virgifera
  SmartBlast Evalue=2E-31; Info=Endonuclease-reverse transcriptase n=1 Tax=Bombyx mori RepID=D7F164_BOMMO
acacattttattatttcattataaaacaataaagtaaacgaagattgtgtaaagtaaacgaaaagtctttatatcaaaaacaggtgtttgttaccatttcgtataccgtgagcgtctaaagtcttccatcctaaggtaaacaaattcattaaagttttaggtaagtcaactaaagtaaagttgtcctggcagctcctggaactgctaactcacaacttaatgtcgccggtcgacgttatttcaaataatttttcaaatatcaaattgtacaaaatacagtgctttttagataaaactatccacctaaataacttttgaaacactgatttttagaaaaagcgcaaaaatacgtcaaataatatttgtagggggatacatcatgccatatttaagcttgtcggcaaaggcactctctcactctccgtatcatcccttattttttttaaattacttcatttcaaacatttactaacatttaaaaattttaacaattattcaaaatgacttgaaattttgaatgattattgttaaaattttgaattgatttgaagatttgtttaaaggggacatttttgaacaggacttcacaacccatttgttgataacaattttctataacatatttttatattgacataaaaagttagaaaatcactcgatatgacttacgaaaaccgtatctctcgacagtgcctaaattcttaacattctgcttcaaaatcctgacttataacttctgttttggccatgaatataatgtgatagcaaaaattttgctcggtagagagaagggagataattttgtggatgaacagttggaggttgtcggttagcgacgttgaggttttttacatatttttgattttttcataagatccgcacgtcgtgaatttttcactgtgtgattaaatgtgtatgtttcatcacaaaaagacaattttctctatttaggagattaagaaaattttagttaggtatagttgttaggaaagtattggttgtaatgtttaataaaattttgacactattttgtaatatttagattaatttgaagcttaataggccatgagaaaatggaacaggtaaggggaagcttattatttatttagatagtcttacgctagccgttgccttttggccacgttatactatctgaacaacaaacaaataaattctgtatacagccaggagtacggcaaggagacaccatctcaccaaagctattcacatctcttagaacacacttttattaagaaggccgatctaaacgaatatggtatcaacataaatggagagaagctcagtcatttgagattcgcagatgacatcgtccttatagccgatcgtatggatgatgcaataataatgttgaacaaattatatcacgcttccatagaggtcaaactaaagattaacatcaacaagacgcaaataactaatctggtgctaaatcgtaatattgttgatagaatggatattgagtagtctacatcttataagtacttgtgacatgaaattcggttgggaagagataaccagacgtgcgagctcccacgtcgcataggattagcctgggcagcgtttggtaaactgaactatgtatttaaatcggacttacccagatgcctgaaaaggaaaatctttgaccagtgtgtattgcctgtactcac

SEQ ID NO: 4904 - DNA, 816 bp, Diabrotica virgifera
  SmartBlast Evalue=1E-31; Info=Endonuclease-reverse transcriptase n=1 Tax=Bombyx mori RepID=D7F164_BOMMO
catcatttgaattacctattttgcaatgttttatcccacacgcaaataaatgactgcgccaattattgtgtaaaggacaccgcacacgtctcatggaaaatgtaatatcactcaaatgcaataaaatccacatgaatagattcctctcgaaaaatcattttatatcattgcgccaactgtcaatttcgattaacaatggcctaaattgtaattaaaatttatggaaatcacatttttgaagttcttaaaactgtcatattcgtaaatactattagtctagtctctagtcagttagtatctgaacaacaaacaaataaattctgtatacagccaggagtacggcaaggagacaccatctcaccaaagctattcacatctcttagaacacacttttattaagaaggccgatctaaacgaatatggtatcaacataaatggagagaagctcagtcatttgagattcgcagatgacatcgtccttatagccgatcgtatggatgatgcaataataatgttgaacaaattatatcacgcttccatagaggtcaaactaaagattaacatcaacaagacgcaaataactaatctggtgctaaatcgtaatattgttgatagaatggatattgagtagtctacatcttataagtacttgtgacatgaaattcggttgggaagagataaccagacgtgcgagctcccacgtcgcataggattagcctgggcagcgtttggtaaactgaactatgtatttaaatcggacttacccagatgcctgaaaaggaaaatctttgaccagtgtgtattgcctgtactcac

SEQ ID NO: 4905 - DNA, 1879 bp, Diabrotica virgifera
gttttggccctctgtgctacttgtattttgtttattatttttctggtgcacatgggtaaaatctttcttttcaagcacatgggaatatctgatttaaacacttccctcagttttccataagctacccatgctagtcatactctgtgtttatgtgttgttgtttgtatgttgtttggttgtctgttcctaacatgatatatactaaatttacaatcaagatgcagtagaaataaacaaaccaagacacgccaaatgccactaggagcacacccgaatcataatttacaatgtatatactgttaaataatttttatggggagaatttagagaattcattttgtgttaaagaccacgagatcgtaaatttttatcgccttgtatatgacccaaatttgtaaataaaataatttagccgtaagcagtgtttcgtggaagagtcaaagtctagtggtaaagtttctacgaacagattaatacatttcaaaacaatgaactagaaaacggtagttttagaaagttaatgtgccgctttggaatggacaatagaccatgtttctaaatggtttcgtagaaagaaacaattgtaaacaattttgtttagtttagaatggagggtttttctaaaatgtaagtaaaatttaattttagtttctcctggaaattgacaagacatacaatttgtacacaatactatttgttcttaagaaaaaaagtagtgatatgatgtatggagaatgcttgtgattggcgaggagaccgatggagggagaatagagtggttgattttcggattgatgaggaaagcaagcaaaagaaattactgtgtaattaagatcggaagcaaccagtccagttcgaaagtagtatttttgtgtaaagtggttaatttggtggccgtggaagcagattcatgttgagatgaaatcgtgatcaagtcgagaagtacaaactccttgtgtccgaatagattccagtttttgtctggaacgagtggccggtttatatcaacttgcacgagatatcgagctgagagaagaaatcttggaattataaagattgatattgtttgtatcgagtcagagatttaattgaggagagaattcgaacgagtgctgtttttgtttgctaacagtttgaaggagaaggacagtcggagcatccgaggagcacgttgtgggagaaccgaggacatcacaatccatgagaagaagtaaagaagatagaaaaggttagtcagattatttgtgaacagagagagttgttttatattacacaccatatttgtttttgtcaactgaacagttttacagcataatttattcattcgtaaattgatagaagatataagtaatctatttaaaaagtgaaaattaaattttgttttttatataataataagaacagtctaccgaatcatttaaaaaagttttggttcaaaaaaggagatagtagaattgaagatttttttattagataagaaatgtttacaacagaataaagtttagcatacattttgaatcgtatatttatggtatagtatataaataaataatagttataaaaatttatatgattttgagtatatttattttccgtgttttgtcctggataaagtaagcaacgagaaatactagaagccacaaactaaaggtgatacattaaaatcaattagccctgagaatattttttattggaaagttttattaaattttggtttgttttcatgagtagcaattaaaataattaattaattaattgaattgataagatgctgatcaatctcataactgagataaaatatagagcataacaatacatatctaagaatatgtatgtatacatttaaaaatatagtccgttctttaacggtaaaatattg

SEQ ID NO: 4906 - DNA, 614 bp, Diabrotica virgifera
acagcatccgaggagcacgtgtgggagaaacgaggacaacacaatccatgagaagaacttaagaagatagataaggttagtcagattatttgtgaaaagagaaagttgtttgacattacataccatataagaacagtccaccgaaacatttaaataaaattttgttgaaagaaaatgagatagtagaattacaaattattttagtagataaaatatttttatgagagaacaaagttttagcatacattttgaatcgtatatttatggtatagtatataaataaataatagttataaaaatttatatgattttgagtatatttattttccgtgttttgtcctggataaagtaagcaacgagaaatactagaagccacaaactaaaggtgatacattaaaatcaattagccctgagaatattttttattggaaagttttattaaattttggtttgttttcatgagtagcaattaaaataattaattaattaattgaattgataagatgctgatcaatctcataactgagataaaatatagagcataacaatacatatctaagaatatgtatgtatacatttaaaaatatagtccgttctttaacggtaaaatattg

SEQ ID NO: 4907 - DNA, 1265 bp, Diabrotica virgifera
gtaatttgggttgcctatataaacttgaatcaacggaatgggccttgagtgttaatttaaaacgctgaaaagaccgtttagtgataataaaaagggtgggttgtgattgcgcgcagcggtcaaatacctcctgccctgcggttctctcactctatacccgtaagttgggtttggaccgaagggttaggtcttcctcctttcaggcaaaaatcgatatttactgcagttacatgatatttaatattaaaatagtattggttgtggtagaatgtagactctttgtataattaccaattgaacagtgaagctgttggattaattttccgatgtaatcatttctactgttcacagttctgtgtttgctttgtgagtaggtatttcattttcttgacaacgaaaatgttcggtgtggaaagaattaataagtgcgtggaatgcggaaaagtgtttacacgtgaacatgatacatgatttaagaagacatgtaaaaagttcgcagtaggcaacccaaattacacggcgcaaagtagtgggtcaggatctagaatcgagttaaaaaaacttttcaatcgagaaaattttaacatactaaatatttcaaaaatttaagccaatctgtagtggattatgaaaataatctcaagacctggatgactgctgacaatttcactatcctggtaagcgcttggaattaagaaataacgaaaattataatgctgcgtttggtggataactggatgaactaatatcatattactgactttactgatgtttttgtcttctaaaataaattttaagcattgaaactaatggaccaaggactggaatcatcatttttcaaagatctactatttgtattaaaaaatcatcgagttttcgacgctattttacgatgcgtgaaccaaactcacgcagagtcatttttaactgttgtaacacgctgcgttttttcgagccaatgtagactctaccataacctcaaatgcagatgtaccgcgaccgtttacgtacggctatttatagtcaactacccacaacacatgtcgtgtaccttaatcaatattcttgtatccatgatactcaatatgtgaagaacagtctgatacaaatattgtgcaaaaaaatcgtcgccaccagacaaggcggttatacgaaccaacataatttgtttggcttccagtgtgtctgaaggctgcaggaacgttcaatatattcatttacactatctttgatgatgataatattaaaagtataatatctcgcat

SEQ ID NO: 4908 - DNA, 1200 bp, Diabrotica virgifera
tctagattttaattgcgaagcgcattcaatgaatcataataatatgtaatttgcgctaattatgtcatgtgtgaatgatcatatatgtgaccgttaaaattgtttttagaaaaacgctgaaaagactatttagtgataataaaaatcgatatttactgcagttacatgatatttaatattaaaatagtattggttgtggtagaatgtagactctttgtataattaccaattgaacagtgaagctgttggattaattttccgatgtaatcatttctactgttcacagttctgtgtttgctttgtgagtaggtatttcattttcttgacaacgaaaatgttcggtgtggaaagaattaataagtgcgtggaatgcggaaaagtgtttacacgtgaacatgatacatgatttaagaagacatgtaaaaagttcgcagtaggcaacccaaattacacggcgcaaagtagtgggtcaggatctagaatcgagttaaaaaaacttttcaatcgagaaaattttaacatactaaatatttcaaaaatttaagccaatctgtagtggattatgaaaataatctcaagacctggatgactgctgacaatttcactatcctggtaagcgcttggaattaagaaataacgaaaattataatgctgcgtttggtggataactggatgaactaatatcatattactgactttactgatgtttttgtcttctaaaataaattttaagcattgaaactaatggaccaaggactggaatcatcatttttcaaagatctactatttgtattaaaaaatcatcgagttttcgacgctattttacgatgcgtgaaccaaactcacgcagagtcatttttaactgttgtaacacgctgcgttttttcgagccaatgtagactctaccataacctcaaatgcagatgtaccgcgaccgtttacgtacggctatttatagtcaactacccacaacacatgtcgtgtaccttaatcaatattcttgtatccatgatactcaatatgtgaagaacagtctgatacaaatattgtgcaaaaaaatcgtcgccaccagacaaggcggttatacgaaccaacataatttgtttggcttccagtgtgtctgaaggctgcaggaacgttcaatatattcatttacactatctttgatgatgataatattaaaagtataatatctcgcat

SEQ ID NO: 4909 - DNA, 1315 bp, Diabrotica virgifera
  SmartBlast Evalue=2E-34; Info=Endonuclease-reverse transcriptase n=1 Tax=Bombyx mori RepID=D7F161_BOMMO
aactctgacataaataaacgtcaaaatattacaatgtagtagctaaatatttttggtctagggaatgggaaaactgtttagttttgaaattagtttttaaaaataaatatttcaaaaattaaagtaaagttattaactcattaataagaaactttgttttcgatttatttatggacagccttgcttcaaaattcactcattctattcgttctaacagctctattgcaccaaaaactcgtactcgaacagaagcttcaactaacacaggttacggcagttgccacaattctctcaatgtataatccctatgtccagccgaacgatttatgtactgtataaggcatttattgattgttgtttatttatgagctttcagtttttgtaatatttaatgagatccagatattatatcagcagagatgctcaaagacacagaagaaatcggaataaaattgcttcacatgctctgtaaaaaaatatgacattccaagtaatggcctgacgactggacaaaatcaacaataacgacaatacaaattgtaaaaaaggcagcttccataaatgcgacaactatagaaccatctcccttatctcacatgccagttaaataataaagttaaaatccagctaaatttcagatcatcgatgagagacagaaatttttcatacaaaaagaaccccaaggccaaattgtaatatataaccccaagagcaaataatagaaaaatgtagggaattcaatatctcactatacatttgttttatagactatcgcaaagcgtttgacagtgtgaaatggcaacacttgtggcagatactaaaagaggtagaggcgtaccataacacttaatttcacttataactgaactatacgaacacaatactggaataaataaagttcttgacacactgtcaaatgaattccatccagaacaaggtgtcagataaggatgtatactacctccacaattatttaacaccaatggggcgcatattatgagaagagcgctagaagaatgggaaaagggtatctcaataaatggcaaaaaaataaacaatttactttttgcaggtgacacagccgttcttgtaaatagtcaaaaagagttaattgatctcatactactggtggaaagaaataatggaaccatggaataactatgactaaaaaagaacatggacaactgagatgaagaagctataaagaagaatttagacagaagaaagccagtttaagactaataatgacatatgcatcagaaacaagacccgatacagccacaacacaaagactattagaaccggcagagatgag

SEQ ID NO: 4910 - DNA, 1147 bp, Diabrotica virgifera
  SmartBlast Evalue=2E-25; Info=Endonuclease-reverse transcriptase n=1 Tax=Bombyx mori RepID=D7F167_BOMMO
aactctgacataaataaacgtcaaaatattacaatgtagtagctaaatatttttggtctagggaatgggaaaactgtttagttttgaaattagtttttaaaaataaatatttcaaaaattaaagtaaagttattaactcattaataagaaactttgttttcgatttatttatggacagccttgcttcaaaattcactcattctattcgttctaacagctctattgcaccaaaaactcgtactcgaacagaagcttcaactaacacaggttacggcagttgccacaattctctcaatgtataatccctatgtccagccgaacgatttatgtactgtataaggcatttattgattgttgtttatttatgagctttcagtttttgtaatatttaatgagatccagatattatatcagcagagatgctcaaagacacagaagaaatcggaataaaattgcttcacatgctctgtaaaaaaatatgacattccaagtaatggcctgacgactggacaaaatcaacaataacgacaatacaaattgtaaaaaaggcagcttccataaatgcgacaactatagaaccatctcccttatctcacatgccagttaaataataaagttaaaatccagctaaatttcagatcatcgatgagagacagaaatttttcatacaaaaagaaccccaaggccaaattgtaatatataaccccaagagcaaataatagaaaaatgtagggaattcaatatctcactatacatttgttttatagactatcgcaaagcgtttgacagtgtgaaatggcaacacttgtggcagatactaaaagaggtagaggcgtaccataacacttaatttcacttataactgaactatacgaacacaatactggaataaataaagttcttgacacactgtcaaatgaattccatccagaacaaggtgtcagacaaagatgtatactgcctccacaattatttaacaccaatggggcgcatatattgacgcataatgggaaaagggtatctcaataaatggccaaaaaataaacaatctacgttttgcaatctccgttcttgtaaatagtcaaaaatagttaatttatctcataccactggtggaaagaaataatggaaccatggaataactatg

SEQ ID NO: 4911 - DNA, 1214 bp, Diabrotica virgifera
  SmartBlast Evalue=1E-103; Info=Transmembrane protein 120-like protein n=1 Tax=Camponotus floridanus RepID=E2B080_9HYME
ataaaactaatatcacacttttttaaacaaaatgaatattaccttaaaaatatcccttcaaaccaaatttatgtttgctttacctcactttctttttttgttactatccttggaactctcttttcttacagaatcgctaattgtctcataaaacttattagacaatatcttgtactgtatatacatattttttttcatcttctttggaataacacgtaacgttgtgatggtattaccgacgaagaacactaggaagataatagcaagtgcgccactttcccaagaagcctgtggatgttggctcaagccatacagaacaacagcattgaccagttggaagatatatgcaataaacaaaaacggcaataggaatgttagtcctctccacatccaagaatggaaaccttccactgtgatatccatgttttccatttcaccaagagattttagtctgtagagaactccacgttggtatctaaactgcaggtactgtgtaaaagtactgtaaatggtataacggatgaagtacactctaaacaactcccacggttcattgtcaggccatgtaagtaacaaaccagaactaactattgataggatgtgatgaaccctccaccaacctttgattcttgatccattcactttgaggatgctttctctaattgaaatcgtacaatagtaccaagctaagaagccagcgaatatcttgtccaaaaatctatagttgtaatggcttaaagtaatacataacacgaaagctatgaagtgacaaacaagtttaaatttttcgtagtcttctttgtattgaaactttctttctttgtttagaaatgacacatctattctacctaagataaattttagcatgtatctgtcactttttcttggcaagttttgttcaatatcttgcagactggcttctcgttctgcgaacatttcatgcagttctttggtttttggatcttctggaacatctttcaacgactggcttagtttttgcattcggtatctttggtgtatgatatgttttttacaattatcttgtagtgcttgtacttctttaattttctttaaatacacttcgttgagagcatctaactttttgtaatcttctgccagttcgtcccattcttcttgcacttcttttacagtatttgccatattgcactacttgtattatcacttggctatcgatcacttggaattgaattcac

SEQ ID NO: 4912 - DNA, 1212 bp, Diabrotica virgifera
  SmartBlast Evalue=1E-103; Info=Transmembrane protein 120-like protein n=1 Tax=Camponotus floridanus RepID=E2B080_9HYME
ataaaactaatatcacacttttttaaacaaaatgaatattaccttaaaaatatcccttcaaaccaaatttatgtttgctttacctcactttctttttttgttactatccttggaactctcttttcttacagaatcgctaattgtctcataaaacttattagacaatatcttgtactgtatatacatattttttttcatcttctttggaataacacgtaacgttgtgatggtattaccgacgaagaacactaggaagataatagcaagtgcgccactttcccaagaagcctgtggatgttggctcaagccatacagaacaacagcattgaccagttggaagatatatgcaataaacaaaaacggcaataggaatgttagtcctctccacatccaagaatggaaaccttccactgtgatatccatgttttccatttcaccaagagattttagtctgtagagaactccacgttggtatctaaactgcaggtactgtgtaaaagtactgtaaatggtataacggatgaagtacactctaaacaactcccacggttcattgtcaggccatgtaagtaacaaaccagaactaactattgataggatgtgatgaaccctccaccaacctttgattcttgatccattcactttgaggatgctttctctaattgaaatcgtacaatagtaccaagctaagaagccagcgaatatcttgtccaaaaatctatagttgtaatggcttaaagtaatacataacacgaaagctatgaagtgacaaacaagtttaaatttttcgtagtcttctttgtactgaaactttctttctttgtttagaaaagacacatctattctacctaagataaattttaacatatatctgtcactctttcttggcaagttttgttcgatatcttgcagacttgcttctcgttcagcgaacatttcttgtagttctttggattttggatcttctggtacatctttcaacgactggtttagtttttgcattctgtatctttggtgtacgatgtgttttttacaattgtcttgtagtgcttgtacttctttgatcttctttaaatacacttcgttgagagcatctaactttttgtaatcttctgccagttcgtcccattcttcttgcacttcttttacagtatttgccatattgcactacttgtattatcacttggctatcgatcacttgctattgaattc

SEQ ID NO: 4913 - DNA, 1409 bp, Diabrotica virgifera
ttatattcatttcaggaccaagcttttgttaatttttgaaagagcaaagagccttttagcatggccagtaaaaagattattgtggtaaaaatgcagcctgatgattttacgttatatctcccatggagaatacaatgaaatcaagtttacaggaataagtaaaacgcgatggctaaaaaagattatccattaaaactctttcacaaggaactttataatactgatttttgtttttttaagaaattaatttttcaattcttcttaaaagataaaaatagtcaaatttatcaagtttgacagttttatagaaagttaatgcagggcaacaaaatagacaaaacgatgataatactttcagaactgtattcagtgagattctattcagaatctcactgaatctgatgaaaataataactgtaaaatattttacattaaagatttttctgtttgacgcatttttattacttatctgattaactatctccaaaattaagatattttctaactctgccccaaagtccgggcttgtaagaaaaatatagctaaaaaatgttaagttgcataataaagtataagcattgattaataaatataggggagaatttgaattcttgaaagaaatcattaaatattccaaataaaaaaattatttaacgagaaaaatactcactgggtgattttagatattgtacatttatcttatttgcctcataatctcgataaaaaaattaggtagttattttcgttaattacagtctcttctgatgattgtatattttgtttggagatattgcaacgtatttacttaatataaaattgacttagtaacccgctcggccactttaaactcttcgagaaaaaatggtaaggacttaagttgttgcgatttcctacaatttcttccaagttttttcatgcggtcgatattttccgagttagggggaaatcgtgactaagtatacttattgaattatttattattaactttacttcttaaaggtgccttgtatttctgcgtaggcgtccaccgtggattgtattgtcaggtgagatattagatagtcaggattacctacattattctattaagagtaattccattaatagcattcggcgaatattacgcagccttgacatcttttcctagacctctcttaccctctaactttcctttgattaccagttgccgtatatcgttctcctcgtaatatgtccctaaatatgtccatgataaaaaaaactaagttttcaatctaatagcacataaaacaacatcaaaagatgttactctacatcctaccagattgaaaacaatgggaaccttctctggtaacacctccgaggcttctacaatttgcaagccataacggatgctgagactatgtctcaggtcattcatgtccatgata

SEQ ID NO: 4914 - DNA, 999 bp, Diabrotica virgifera
ggccgactggattataatagaacgtatttattttttttttcattcatttatatttgagttatcattcaactattcaacgataatagtggcatgatcatgacaatatttaaaataattattgaagttagcacctattactttctaaactcgtttttaaattaacaagaattgtagttgtaatttgtcttttaatttgaattcttgaaagaaatcattaaatattccaaataaaaaaattatttaacgagaaaaatactcactgggtgattttagatattgtacatttatcttatttgcctcataatctcgataaaaaaattaggtagttattttcgttaattacagtctcttctgatgattgtatattttgtttggagatattgcaacgtatttacttaatataaaattgacttagtaacccgctcggccactttaaactcttcgagaaaaaatggtaaggacttaagttgttgcgatttcctacaatttcttccaagttttttcatgcggtcgatattttccgagttagggggaaatcgtgactaagtatacttattgaattatttattattaactttacttcttaaaggtgccttgtatttctgcgtaggcgtccaccgtggattgtattgtcaggtgagatattagatagtcaggattacctacattattctattaagagtaattccattaatagcattcggcgaatattacgcagccttgacatcttttcctagacctctcttaccctctaactttcctttgattaccagttgccgtatatcgttctcctcgtaatatgtccctaaatatgtccatgataaaaaaaactaagttttcaatctaatagcacataaaacaacatcaaaagatgttactctacatcctaccagattgaaaacaatgggaaccttctctggtaacacctccgaggcttctacaatttgcaagccataacggatgctgagactatgtctcaggtcattcatgtccatgata

SEQ ID NO: 4915 - DNA, 1970 bp, Diabrotica virgifera
  SmartBlast Evalue=1E-163; Info=Adiponectin receptor protein 2 n= 2 Tax=Culicini RepID=B0W6M8_CULQU
tgtttgagaagtagtaagtataaattaatttaatatttaaataaaatataaataaaaagtatattaatttcgtttataatcatataatcatataatagaagtataacttcttacgtgcgtacaaagtacacacacattctttttttttgtttccgggaatcacaggttaagacgacaagcgtgtgtattcaccttaaaagcgaatactttgaaaaacaataaagctgatttttccaaaaaatatgttttgtgcagaactttttaaagaaccttcgtatttgagttcttgggtacatttaaattgacatttcatgactttcatgtcgtgactaaaattaacatcaattagtatgtagtaaaaagtttgcgcattacaaaaatatcgttatttatcaaactttttccatgaccacacatatatgtgccaaaccagagctgtgcacaaccctgtatgtaaataaaaatacaactaataaatataaacgtataatagggatgttttaataaaattcttcggtccaagtaaatttaatcgaaaacattcagatcacttttaaacaacaatgtcaacgaaaggataaataaaacatcatttttctatttggaaaagtaattttcctaaaaaataaaatacctatcaatagatgggtgtatcaggtatttcgcattgtccgatcgttactcgatgcattgccatttcggatataccatgataatggacaagagcgccgcccaagacgaaaacgtggaagatttgatgtgagtgcagccagatatcacatttgccggggaaccaccgttcgggtatgcgcagcgcgtagaacatggcgcccacgatgtacagcattcccataagtactaaccaaccaaggtatttttgactaacgtagttgaaccaaccttctacgattccataatggatggcgggtacgattccacttaaaccaaaggtcatgaatactgctgccctaaatggacgccaacccgattctgagaatttgtcccacaaacttacaaaaatactagttattcctaaagcacatacaactgataagtacaccactttcggcctgaaatggcagtagaacccgtagtacagccatggaacgaaggaacccataattagaagcgctataccacaataatccagctttgaaaataatttccctataaattgtgaatgacagttgacagtgtggaacataaacgacattcctaaacagatgatagctcctgcaaagaatgctccgaagaccaccttctcttgaatttcaatttcagtatttggtcgcattaaaaagtagattgcaattcctataaaagccacacatcccaacaagtgtgtccaaatattcgccgtttctgtatgaagtctaaagatgctcttgaaacatgcccggaaactaggtagtggtggccgatgacagtggtggagaaaatcattatcttgcaaccaagccggtaggttcctaaaatgacagacggaccatccggcttggatcatctttctgacgacatgctcggcttgggtcgcagcattgtgggccaaagctgtgatgtccaagtcatcccctagaactgctgcttttagaacatcactcatctccgaatccagaagaccttcatcttctggagtggaaggaaggggacagccgatgcagtcctcctcctccaatgagttgacatcctcttccaataaatcctttatttcagaagcaatagactctgtttctgggtcccatcctatcacccttctttttcttaatcctaagtctaaatcttgtatatctttgatagattcttcagcatcactgtagtgcgacattcttctcagttttttgtctcagatgccccacagtgaacactggatgtttattaacattaaaagatattttaatacacgtataatttcaaagactgaacatgatcattgaggaaatcgaaaaaattacattagtctcgtaatcagc

SEQ ID NO: 4916 - DNA, 455 bp, Diabrotica virgifera
tgtttgagaagtagtaagtataaattaatttaatatttaaataaaatataaataaaaagtatattaatttcgtttataatcatataatcatataatagaagtataacttcttacgtgcgtacaaagtacacacacattctttttttttttaattatattatcacaacttaatatattattaacaaattaatttccatttttattaaaaagaaaaagatttaatatatgcaagttctttattctcagattttttctattacaaaactaggactttttgattcttacagcgcgtattgatgtgatgtattaagtttaaatgttgtcttactaatagagatattatattgtggtgctaacagttatatatcagaaaattggtatgtgattaggatagattgggtcattcagacaatgtgtgacccttctcacttcggtatatggatatgctttgtatt

SEQ ID NO: 4917 - DNA, 1485 bp, Diabrotica virgifera
caatactttctttttaattattttctttctagatccttcttgcgtaactgtaatttcttcaggaagtgcttctattatgactgtctctggtttctcttctagtaactcttcttctggtacttcctcttctacaactgtgacggtaggttctaagatcttaccgtcttcttcaacagtcacaatttcagtagtttcttgtttcttacccttttgttttttgattatacgtttactaaccttagttttctttaattttccgtcttcaacggattcaactacctgaacttcttctggcaattcttgcatgtaagtaatttcttccgttggtttttcttcttcatatacagtaattgatgtttgcggttctttcccttcttcttccactgtcaaaatttctgttgtttctttctttccctttttgtcttttttgataacacgtttctttacaacggttttctttgttacaccatcttcaaccttttctataacctttacttcttctgattcttcgacttcttctggaagtacgacagattcttgagattcaatttcttcttcttcgacgaaaagaatctctgtcgttccatgtgtatctcctttcggctttttgactattttcttctttacaacccttttctttggagcttcttcttctatagtttcaacaacctcatctgcttcgatagtttgttctgtggcatcttctggttttggaattttcggaattggtttctgtgtttgtactgtttcaataactacagattcttgaatatcttgtataaccttagccttttctgtagttaagtctgttgagtcttctactcccacctcctgtgtattttcggaagtgtatacctcagtgatagttttagatgtgaatggtgttattttggtgttaaatactcttgaactacaagttcaggttccagagtactgacatcagtatactcgtgtacgtacacattttgtattggttccttgccgtcttccaaaatggtcacaatctctgtagcttctatagtaggtccagcttttttcaagagggttctctttttggtgatcttcttcgaaggctttttacctttggtggttatttcaataatgcttacatcttctggtagctcaataagagcagcaactgggtgatgcaaatcttctgtttttggaccttcagttatttcaacctcagtttcaggtttctcttcatctacttcatgagttgttatctcaattacttcttgtttacggccctttggttttttcaatggtctctttcttattacttctttctctccagttggtaagacatgcgtaactacctcttccgggtattcgtaaacaactgcacaagtactcaaagatacattgagctgtaacggtaactgtggtagagggtgagctaaatgtttcttaattagttctattttcagtatattcaaaatttcttcatctgtaaaatcgctctttgcttcgtaaagtgtaggc

SEQ ID NO: 4918 - DNA, 930 bp, Diabrotica virgifera
caatactttctttttaattattttctttctagatccttcttgcgtaactgtaatttcttcaggaagtgcttctattatgactgtctctggtttctcttctagtaactcttcttctggtacttcctcttctacaactgtgacggtaggttctaagatcttaccgtcttcttcaacagtcacaatttcagtagtttcttgtttcttacccttttgttttttgattatacgtttactaaccttagttttctttaattttccgtcttcaacggattcaactacctgaacttcttctggcaattcttgcatgtaagtaatttcttccgttggtttttcttcttcatatacagtaattgatgtttgcggttctttcccttcttcttccactgtcaaaatttctgttgtttctttctttccctttttgtcttttttgataacacgtttctttacaacggttttctttgttacaccatcttcaaccttttctataacctttacttcttctgattcttcgacttcttctggaagtacgacagattcttgagattcaatttcttcttcttcgacgaaaagaatctctgtcgttccatgtgtatctcctttcggctttttgactattttcttctttacaacccttttctttggagcttcttcttctatagtttcaacaacctcatctgcttcgatagtttgttctgtggcatcttctggttttggaattttcggaattggtttctgtgtttgtactgtttcaataactacagattcttgaatatcttgtataaccttagccttttctgtagttaagtctgttgagtcttcctcatgttcgtgaagtactacttcgcttatctgtaggctaggagatacttcatccattacaattttcacagtttttgaggtaggctgtgtactttcaatgtagcctatatc

SEQ ID NO: 4919 - DNA, 1210 bp, Diabrotica virgifera
atatttattaaaatgaccctttcggactacatcacagatggttttcggaatgacaattccatcatcagtaaggtactgcttgcaaggtatacatggttgagctactaaaaatatatgggtgaaaaactctttaaatggtataaagttgttattatgttacattgttgtagatactatgtataatatattaatattaaatgatgcatttgtctttatcctccatatagaaatggtcgagatcattccaatcaaatcaatatggtatattaatatcgaattaatttttccataaaacaatgataaacataaaaaattgttatccttgatataacataaagtggacttaaaccaaataagggatacaacaccatatatttacaaagattaaaaaacctacatcttacttattcggcgcataacccgaactggttgggaaaaattttactttcacgtatgggatagatactgtaatttattccccgagcacggtatttctctaccccctcctctcaacgtttttaaaaacaaacaaacaaataataatttttatttaaataaaatctgattgtatcacagttcagggttgccagattgggaaaatttcccgcaaatttggggtattttttcttgtttgggggatttttgggggaatacactgaatgggggattttttggaggaaaattttttcgcattggggttttttggggtataattttaagaacacattccattgcttggccgattttgaatttcaagttaaactgtgattcacaaaaatatttgaatataaattcatttacagtcgattctgccatctagtacaaactacttaaattattttgtaaaccattacagttttcttcaatagcgacacaacaaaatttggtttttgtgcgcttgatggtgtatttaaatattcataacggtacgtacctatgtgaaacacagaaaatcgtatctcctattgtttaactttatttacttttcaaattaactttgaagaaggttaggtatatttctggtgtgttcaaaatacgcataatttatttaaattagtgtttgtgttaatctagaaatatgcctaaagaaaaggagtatacccgaaaataccgacttgcttgggcatcggatactgaacttaaagaaaggtaatctgtttaatagaattttattggtgtgggtcattaataattaattattctatgtatg

SEQ ID NO: 4920 - DNA, 1165 bp, Diabrotica virgifera
atatatttattaaaatgaccctttcgggctacatcacagaacatttttgaaatgacaattccattatcagatatatacatggtttagctactaaaaatatatgggtgaaaactctttaaatggtataaagttattatgttacattattgtagataatattctattataagtcttcatacttcatataaaaatggtcgagataattcccatcaaatcaatatattaatatcgaattaatttttccataaaacaatgataaacataaaaaattatatccttgatataacataaagtggactaaaaccaaataagggatacaacaccatatatttacaaagattaaaaaacctacatcttacttattcggcgcataacccgaactggttgggaaaaattttactttcacgtatgggatagatactgtaatttattccccgagcacggtatttctctaccccctcctctcaacgtttttaaaaacaaacaaacaaataataatttttatttaaataaaatctgattgtatcacagttcagggttgccagattgggaaaatttcccgcaaatttggggtattttttcttgtttgggggatttttgggggaatacactgaatgggggattttttggaggaaaattttttcgcattggggttttttggggtataattttaagaacacattccattgcttggccgattttgaatttcaagttaaactgtgattcacaaaaatatttgaatataaattcatttacagtcgattctgccatctagtacaaactacttaaattattttgtaaaccattacagttttcttcaatagcgacacaacaaaatttggtttttgtgcgcttgatggtgtatttaaatattcataacggtacgtacctatgtgaaacacagaaaatcgtatctcctattgtttaactttatttacttttcaaattaactttgaagaaggttaggtatatttctggtgtgttcaaaatacgcataatttatttaaattagtgtttgtgttaatctagaaatatgcctaaagaaaaggagtatacccgaaaataccgacttgcttgggcatcggatactgaacttaaagaaaggtaatctgtttaatagaattttattggtgtgggtcattaataattaattattctatgtatg

SEQ ID NO: 4921 - DNA, 1281 bp, Diabrotica virgifera
  SmartBlast Evalue=4E-42; Info=Affixin n=2 Tax=Danio rerio RepID= Q09SN9_DANRE
ataaactgcaagttgtgaaaaagtcgttggtaacatttgtgaacaaacatctgaacaaaatgaactttgaagttaccgaaatagagagccaattccatgatggggtctacttgatcatgcttatgggacttttagaaggtttctttgttcctcattacagtttccatctaactccccacgagtttgaacagaaagtacataatgttaattttgcctttgagcttatggaggaagtcggcttgcagaagccaaaagctagaccagaagatgttgttaatatggatctgaagtcaacactccgtgtgctgtacaacatatttttacgctacagaacgataatataaacgagaatcggatttttttagtgccttatactgcctctaaaacttatctacaagttgttactttattaatgtacataacaatttactagcatatttttatagttgttttattgacaatgtttacacggaaatgttttattaataatatttttggtgttactaattaaataattataaaaccaagtcttcaaagaatattataaagccaattatgtaactatttaaaaattaattcaaagttttgtttccgacgaaataaacttttaatgagacctatttctggttacgccttcttggtttctattatttgcaaatcataagaatgttggatgaaagaagacaaagggagatctaagattgcacctgtctatccaacttggcaaaattccaacgaaaagtaggtctcgatactcgaattttgtcatgaaacgaaaacaacaggtgtattatatttcaatttgttcagagagtgccttaaacaatcttactagtttcattcttattagaaatcattagagattgtataaatggaaatctctgaacaaaacaaaataaacacagccgatcagtatcgaatcacgactaacaaataggtacggatgccgtagcggcatctgcttacaacaattcaaagttttgtatccaaagaaataaacttttaatgagaatcttatttaaaaaatatttatttgttttaaaatctttaaagtatttgaaatgttattcgcttgtgtttgataaatagtaaaaattagatttgttctcttaaattaacatatttgtaagatagaacaacttacttagcaaaacattaaaaatactgtggacagaacatgttagacgattacgaatacgagtttccactacatatatccgtctatagcaatctatttactgcacctactaaaatttgtaacccttttattacatactctca

SEQ ID NO: 4922 - DNA, 1107 bp, Diabrotica virgifera
  SmartBlast Evalue=3E-42; Info=Affixin n=2 Tax=Danio rerio RepID= Q09SN9_DANRE
ataaactgcaagttgtgaaaaagtcgttggtaacatttgtgaacaaacatctgaacaaaatgaactttgaagttaccgaaatagagagccaattccatgatggggtctacttgatcatgcttatgggacttttagaaggtttctttgttcctcattacagtttccatctaactccccacgagtttgaacagaaagtacataatgttaattttgcctttgagcttatggaggaagtcggcttgcagaagccaaaagctagaccagaagatgttgttaatatggatctgaagtcaacactccgtgtgctgtacaacatatttttacgctacagaacgataatataaacgagaatcggatttttttagtgccttatactgcctctaaaacttatctacaagttgttactttattaatgtacataacaatttactagcatatttttatagttgttttattgacaatgtttacacggaaatgttttattaataatatttttggtgttactaattaaataattataaaaccaagtcttcaaagaatattataaagccaattatgtaactatttaaaaattaattcaaagttttgtttccgacgaaataaacttttaatgagacctatttctggttacgccttcttggtttctattatgtatttgcaaactataagaatgttggatgaaggaacacaaaggggagatctaagattgcatctcactatctgtctatcccgtggcaaaattccaacgaaaagtaggtctcgatactcagataggagtaaaactaatacatgttgtgaaacgaaaacatgtgtaatatatatttcaatttgttcagagagtgccttaaacaatcttactagtttcattcttattcaagagaatctataacaccaatagcatgctatggcagtgaagcatgggtcctgaaggaaacatccaaaaataaactcgaccacagcctcctacagttacaagccatgaagtagaaatttggcaacgtcaatgggtagtcctattcgaatgtggccagctgattgcagtgcattgagagctatgtataatttatatttctttacttaatattaagtgtttttatatatgtctag

SEQ ID NO: 4923 - DNA, 1286 bp, Diabrotica virgifera
tttgtacataaaaatttacacatctaataaacattttcagtaatttatatatttactctatttggagtactaagggaaccgctggaaaccttaccgcctgagcagatgggatgttaattataaattgtaaaattccctcatcttcctatagtctcagaatccgcatggcttgcattttttagaagcctcggatggtgtaaccagaaaaggttttccattgtttttaatctggtaggatataaaatggtatcattttatgtgctattagattaaaaattaaacttttttatttattatttacatttacatctaagataaggcaaggatatcaaaagttatcgtcttatttaaacttttcctagaagggcataatagataatattttattgattttcatcatatcgtgtaaactgttcctagaaaaacgcatttggaaacgttctatattaagaacagttttcatgtacctatactgatataaaaataattgttttactcttctgcagttatcgaaaaataaaaacatacttattactgccttggtttatttggctataggcatcacaatagttttgacaaatgtatcacctgagagtgaaataatacaatatatgcccatttcttaaaaatctcgccatgcatttctggactgtttgaaatgggtttatattaagctttgcagtccactaaattatcattaagttgtcttaaaagtaactcacaatggagaaattgatatatttgacacaaaaatggcgagttgacgaaatgccggtatttaatgttaattttgtgtttgtgttttgtccatttttatatttttcatacggtggaattgctgtggatatacaccctaataataataatcagtgcaacgttgtaacacctagtccaatagactatactgtgatgtggcattttttctccggagtattcaaaaaagacaagcaaacttttattgttttttcaaaataagcttcttataatatgccagtgttgcctacgtaatcttaatttaagtgttacatagcaaaggtgtaatttcttagacacacttggagccctagttattatttgcctattaatcagcatgtctcattttatgttaggagataattttcgtgctttttgtaaatcaccaccttttcattaatgtgatttttgcaaattggaggaccacttactcagaactgttgtctttaccatgtaatattaatacttcacatataaatggactgataatgttttgtaaacacaaaacgaaacgtatccaacaatatatgaat

SEQ ID NO: 4924 - DNA, 1108 bp, Diabrotica virgifera
ctgaacagatgggatgtgaattataaattgtaaaattccctcattttcctatagtctcagaatccgcatggcttgcatttttagaagcctcggatggtgtaaccagagaaggttttccattgttttaatctggtaggatataaaatggtatcaaaagttatcgtcttatttaaacttttcctagaagggcataatagataatattttattgattttcatcatatcgtgtaaactgttcctagaaaaacgcatttggaaacgttctatattaagaacagttttcatgtacctatactgatataaaaataattgttttactcttctgcagttatcgaaaaataaaaacatacttattactgccttggtttatttggctataggcatcacaatagttttgacaaatgtatcacctgagagtgaaataatacaatatatgcccatttcttaaaaatctcgccatgcatttctggactgtttgaaatgggtttatattaagctttgcagtccactaaattatcattaagttgtcttaaaagtaactcacaatggagaaattgatatatttgacacaaaaatggcgagttgacgaaatgccggtatttaatgttaattttgtgtttgtgttttgtccatttttatatttttcatacggtggaattgctgtggatatacaccctaataataataatcagtgcaacgttgtaacacctagtccaatagactatactgtgatgtggcattttttctccggagtattcaaaaaagacaagcaaacttttattgttttttcaaaataagcttcttataatatgccagtgttgcctacgtaatcttaatttaagtgttacatagcaaaggtgtaatttcttagacacacttggagccctagttattatttgcctattaatcagcatgtctcattttatgttaggagataattttcgtgctttttgtaaatcaccaccttttcattaatgtgatttttgcaaattggaggaccacttactcagaactgttgtctttaccatgtaatattaatacttcacatataaatggactgataatgttttgtaaacacaaaacgaaacgtatccaacaatatatgaat

SEQ ID NO: 4925 - DNA, 1722 bp, Diabrotica virgifera
  SmartBlast Evalue=1E-29; Info=Transposase n=1 Tax=Agrilus planipennis RepID=D2WLV0_AGRPL
ctataggcatctcacaaggctcagtggtttcaattttgaaatgatcacttggttatgagaaagctttctgtaagatgtgagccgcacttgctcaaaatcgaccacaaacgcaaccgtgtgacaatttcgcaggaatgtttggcgttattcagacgcaatatgaacgagtttttgtgccgtttcgtaaccgtgggcgaaacttggatccactacaacacacaagagaccaaacagcagtcaaaacagtgggtttctcggggtgaatcgtcgccaaagaaggcaaaggtaggtttgtcagccaataaagtcatggtgaccgttttttaggaatcacgcggtataatccacattgactaccttcaaaaggggaaaaatcaatggcgaatgttataccaacttattgatcgattgaatgaaaaaattgaaaaaaaaacgaccgcatttggcaaagaaaaaggggaccagaacaatgcaagagtgcacatatatgtgcagttgtgtgttggtgcgtcatcaattgaaagaaatgataactggaaacagtttcacaagcttctttctaattatagttaggaaattgtagtacaatactatcctggatcgtatgacatgagtcatgacgtattagatgagtctctaccatgaatttacccaaacaaaacaggatttgtagatctccaaaatatgacaagctagttggtcacaagtatcctaattagaaataaacttacttagaagtttttttaacatacagcaaaaatcaactataatgtaattgtaatagattacaaaatgtagatcgattaaaaaaatttcgaattttgataaaagaagatacaaccaaaaatatctggggagagaaacggagttattccttcaattgtctaccattttaatactaatctcaaaaggttgtaaatatcatctaaaactttgtacatatgcgagcgctttcgccgcgtttcacctgataaaccctaacgccgcgtttcaagttaagtaaagtgcataatatatcttatcttgttaaattgaccgcaaataccctatacttttaccagaaaaaaagtcacatagatgtttacttccaacttcgaaagatggcggtagtgtcattattcctttggcaataaaatggataattgtatgccggaacatagccacctttacttaacaagccatgaagttgaaacttggcaacatctaatggtagaccggttaagtctgtcagttctcatttgtttgtatacaatattcaccatatttacagagaaactgaaaaaatttacaatgtttcgtgctactaattataaagagctttaaaaggtatgttattaagatgattctagttcaaaccgcttgttttttgcagtaaaggagagacaactggaacagattactatgattatttgcaaagggatggtttgtgcttatcaacggattcagtaaaatatatttattatcacctttgtttaacatttcaatgtattattaacaatcccaatcttaaaaaattatttttgcaaaataattattgtcacctgcggtgttattatgatctttggtaatgaaaagtttacaacagcatgaaggatttcacttaaattttgaattttattgtgaatgtagggaaaatgccttcaaagtttattctactgttataaaaattatgtgtaatattgttttagataattataaaaaatagcagccatcgaagtaatg

SEQ ID NO: 4926 - DNA, 657 bp, Diabrotica virgifera
  SmartBlast Evalue=6E-11; Info=Endonuclease-reverse transcriptase n=1 Tax=Bombyx mori RepID=D7F170_BOMMO
gttattactgttcctctggggttgacttttgactctctaattattttctccaatgtgatgttgaatagaatacaggatagggcatctccctgtcgtaggcccgttctaacatggattgtatctgttagtgcgttttcaattcgaaccctgctttgtactttaagtgtttcttttactattccaatgagatgagttggaatattaaactctttcagagcattgatcagaaattctcgattctactttccactggggttggttacccaatctccggaagggttgctcaggtttaccagggtccacccgtgtgactaagtcacacttcttggaggtgagcataggaattgagtaggagtggctagaggtgttatgagcaagcgacaccttgtatgtattgcgcatcactactcctttgaacccctattattaacaatcccaatcttaaaaaattatttttgcaaaataattattgtcacctgcggtgttattatgatctttggtaatgaaaagtttacaacagcatgaaggatttcacttaaattttgaattttattgtgaatgtagggaaaatgccttcaaagtttattctactgttataaaaattatgtgtaatattgttttagataattataaaaaatagcagccatcgaagtaatg

SEQ ID NO: 4927 - DNA, 1204 bp, Diabrotica virgifera
ccctgtttgtggatatactatcaatttgataatttattgcaaccgatatagtcgtattttccatacccagattaaaaatacacatttaaaatactgactaactcaccaattccatcataaaaagttcaaaccgactgcattgaagcattgaaccaatcaatgtgtaataataatatacacagagtgaggcctatgtacggaaaccctcaatcatctcgaaaacggcttgcacgattcttataaatcctggtgggtaggggttctttaatgcggccgatatcctagtgacaaccacattgttgtcagatcctccattttttaaaaatctaattaaattttttacttcaattggaacaccctccatattttttgcgttttgaagtcctcaaaaaatactaaccatttttcatgttattttccccaaacctaaaggccacaatttcggaattattgctacatttatttcaaaaaatttaaacaaattataaaaatcaacttttcggcccgggcagacaccaccttacgttctttggaccattggaaacaaaaaagttcttttgtaatttttctctaaagttaatcgttttcgagttataaacaattgaaaactaaaaaaaaaatcgaataatgacgattttcaaggttcaaaaacacaaatactacccaaaacactacccagtatacaaattcaagttcaagccttattttatcagttactaattagttactaaagtaatttaagcttgtttcattctaaaacattgttttttagttgttaatgcagcccgatcgcccgtcctcccatatgcgctttactaacaattattaaaaagcaatgttttagaataaaacgggtcaaaatggtttatagcgagcgcctagaagaagagcttagcttgaatttgagtactcagcagtttcaaaaataatatttttatttgtgtttttgaaccttgaaaatcatgatccaaagaatgtaaaataatgtctacacgggccgaaaaaattgattttataatttgtaattcttttttaaatacatgcagcaataggtccgaaactatggcatttaggtataggctaacatgaaaataatcggtatttcttaaggacctcaaaacaaaaaagacatagagggcgttccacctaaaataagaaaggtcataagatttccagaaaaacggaagatctgacaacaatgcaa

SEQ ID NO: 4928 - DNA, 1145 bp, Diabrotica virgifera
ttatacctagattaaaaatatacatctaaaatactgacaactcaccaacccctatcataaaaagttcaaattgactgcattgaagtattgaaccaatcaatgtgtaataataatatatacagagcgaggttcatgtacggaaaccctcaaccatctcgaaaacggtttgcacgacccttataaattttggtgggtaggggttttttcaatgcggccgatatcctagtgacaaccacattgttgtcagatcctccattttttaaaaatctaattaaattttttacttcaattggaacaccctccatattttttgcgttttgaagtccttaaaaaatactaaccatttttcatgttattttccccaaacctaaaggccacaatttcggaattattgctacatttatttcaaaaaatttaaacaaattataaaaatcaacttttcggcccgggcagacaccaccttacgttctttggaccattggaaacaaaaaagttcttttgtaatttttctctaaagttaatcgttttcgagttataaacaattgaaaactaaaaaaaaaatcgaataatgacgattttcaaggttcaaaaacacaaatactacccaaaacactacccagtatacaaattcaagttcaagccttattttatcagttactaattagttactaaagtaatttaagcttgtttcattctaaaacattgttttttagttgttaatgcagcccgatcgcccgtcctcccatatgcgctttactaacaattattaaaaagcaatgttttagaataaaacgggtcaaaatggtttatagcgagcgcctagaagaagagcttagcttgaatttgagtactcagcagtttcaaaaataatatttttatttgtgtttttgaaccttgaaaatcatgatccaaagaatgtaaaataatgtctacacgggccgaaaaaattgattttataatttgtaattcttttttaaatacatgcagcaataggtccgaaactatggcatttaggtataggctaacatgaaaataatcggtatttcttaaggacctcaaaacaaaaaagacatagagggcgttccacctaaaataagaaaggtcataagatttccagaaaaacggaagatctgacaacaatgcaa

SEQ ID NO: 4929 - DNA, 1283 bp, Diabrotica virgifera
  SmartBlast Evalue=5E-67; Info=Serine protease P66 n=2 Tax= Tribolium castaneum RepID=D6WV12_TRICA
acgaaacaagagaagcagcggaacaaatggtagtactagtcgctttggatcctcatcctcattagcggtcatcaagtcgttcttgacaatgaacatgaatttttgtatttttaattgagaagtgtgccttggaagtgatggaaaacttggtgtttgttgtgttgtgtgcagcctctattatctgtggttccaggatttcgtatgcttatgaagattatgacattggcagtaaatgccacacttcaggactacctggtatatgcaaaagtgtcacagaatgtccacaggcattggactcgttacgaaaattccataaacacaattttaaaagatgtctttgggaccatatggacgaaatcatatgctgccctggcaatgtggtaaagggccctacagagatagatccctatcccgacggtagtacggaagtacctactaaaagacccaacacggacaataaaggacaatttcctaataaaagaagataccaacaagcttgcgatgcaattgaaacagaatctagatcaaatattatttttcacatcacagatggtgaagatgctttggacaaggagtttccacatatggtagcccttggcttcgaagatagtgatcttccaccgggagaactcagctggaaatgtggagcatctctaatctctcccaatttcttgctgacagcggcccactgtgtatctaaagagaaacctataagagcccgtatgggagttacaaaaatcaccgatacccatcatcaagaaatcgatgttaagagaattagaatacacgaatcttatgatccgttagggaaacacggtgatcttgccattgtagagttaacaagaaatgccactttatccgatagcgtgaaaccagcgtgtctgtactggaaacatgacgatcctctaggactacttgtaacaggatgggggaaaacgtctgtgtataacgaagatgatagaagtataattttgcaaaaagccaaattggttcctgtttctactacatcatgtaacaatacatactctactagatctctgggtattcaaacaatagaaaacacacaaatctgtgcttttggaaactcttctgacgcctgctggggtgactcaggaggtcctttgcaaatcagagagagaacaggagctttctcaattgttggaatcgtgtcctatggagcaggctgtggtggtaaaatccctggtgtatatactcgagtctctgaatttgtagattggatcgaaaaatatgtgtggccatgacaaataaagtagttaatagtg

SEQ ID NO: 4930 - DNA, 1090 bp, Diabrotica virgifera
  SmartBlast Evalue=3E-43; Info=Serine protease P66 n=2 Tax= Tribolium castaneum RepID=D6WV12_TRICA
acgaaacaagagaagcagcggaacaaatggtagtactagtcgctttggatcctcatcctcattagcggtcatcaagtcgttcttgacaatgaacatgaatttttgtatttttaattgagaagtgtgccttggaagtgatggaaaacttggtgtttgttgtgttgtgtgcagcctctattatctgtggttccaggatttcgtatgcttatgaagattatgacattggcagtaaatgccacacttcaggactacctggtatatgcaaaagtgtcacagaatgtccacaggcattggactcgttacgaaaattccataaacacaattttaaaagatgtctttgggaccatatggacgaaatcatatgctgccctggcaatgtggtaaagggccctacagagatagatccctatcccgacggtagtacggaagtacctactaaaagacccaacacggacaataaaggacaatttcctaataaaagaagataccaacaagcttgcgatgcaattgaaacagaatctagatcaaatattatttttcacatcacagatggtgaagatgctttggacaaggagtttccacatatggtagcccttggcttcgaagatagtgatcttccaccgggagaactcagctggaaatgtggagcatctctaatctctcccaatttcttgctgacagcggcccactgtgtatctaaagagaaacctataagagcccgtatgggagttacaaaaatcaccgatacccatcatcaagaaatcgatgttaagagaattagaatacacgaatcttatgatccgttagggaaacacggtgatcttgccattgtagagttaacaagaaatgccactttatccgatagcgtgaaaccagcgtgtctgtactggaaacatgacgatcctctaggactacttgtaacaggatgggggaaaacgtctgtgtataacgaagatgatagaagtataattttacaaaaagccaaattggctcctgtatctgctacatcatgtaacgatacatactctactatatctctgggtattcgaacaattgacagcacacaaatttgtgcctttggaaatgcttc

SEQ ID NO: 4931 - DNA, 1217 bp, Diabrotica virgifera
  SmartBlast Evalue=2E-10; Info=Peritrophic matrix protein 5-A n= 1 Tax=Tribolium castaneum RepID=D1MAJ5_TRICA
attttttgcagcaaaacatttagtattgtgtggataaacacatttttccaaattctgatcaaaccatagtcctgatggacaatccataacatactctacgccgtgaacacaaacaataaacttcgtacaatattcagggtgacaattataagttattttattaacatcggaacatattatttgagtattttcattattatcgataatagtcgtgataaagggcgcactacttattatcgaggtcgtgtccattcgtttacaatccgataaatgcgactccacgcatcgtaagtgtccgctgctaaaccagagtccgttactacagcggtaaatgtttgcctttccaaatgaacaagcaatatataaggcacaattggcagggtgggctgtaagaaaatattggccaggattattttgacaaatataatcgagattttcatttgctcttgtggtactaatggtactactagatatagctctactactgctaataggtctactagttacaacagtgctactactagaacttgtctcatctgtaattacagttctatttggatcagattctgtagatgaatctcttgtgtaaaattctgtaatactagcaatactatctgtgatactacttgtaatcatatcgtttgatttttctgtgattgtctcaaaagttgttgtatcaacaattatgctagaactactaacagtattgtcacttgtttcagtagtactagtattatctgttatagtttcttctgtatattcttctgtttcaacattactactagtactggttatatgttttgtactggtgctagctgaaccatctgttcttgatgttgaagtcatactttcatcttcttttgtttctgtattattgtcttcattattggtactgtaactagtttctgtaatagttatgttttctgtaaattcttctgttatagtgcttttactagaattgggtatattctcattgtctgttgttgatgtagaaatgatagttttatcttcttttgtttctgtagtattctcattatgatttgtactgtatgtagattctgtagtagttgtttctactgtatttccatctgtttcaatactacttgaagatatatcaacagaactctcagatccaattgtttctgtactagcactggttacatgttttgtactggtgctcgttggaccatctgttgttgatgtcgtagtcatacttt

SEQ ID NO: 4932 - DNA, 1150 bp, Diabrotica virgifera
  SmartBlast Evalue=2E-10; Info=Peritrophic matrix protein 5-A n= 1 Tax=Tribolium castaneum RepID=D1MAJ5_TRICA
attttttgcagcaaaacatttagtattgtgtggataaacacatttttccaaattctgatcaaaccatagtcctgatggacaatccataacatactctacgccgtgaacacaaacaataaacttcgtacaatattcagggtgacaattataagttattttattaacatcggaacatattatttgagtattttcattattatcgataatagtcgtgataaagggcgcactacttattatcgaggtcgtgtccattcgtttacaatccgataaatgcgactccacgcatcgtaagtgtccgctgctaaaccagagtccgttactacagcggtaaatgtttgcctttccaaatgaacaagcaatatataaggcacaattggcagggtgggctgtaagaaaatattggccaggattattttgacaaatataatcgagattttcatttgctcttgtggtactaatggtactactagatatagctctactactgctaataggtctactagttacaacagtgctactactagaacttgtctcatctgtaattacagttctatttggatcagattctgtagatgaatctcttgtgtaaaattctgtaatactagcaatactatctgtgatactacttgtaatcatatcgtttgatttttctgtgattgtctcaaaagttgttgtatcaacaattatgctagaactactaacagtattgtcacttgtttcagtagtactagtattatctgttatagtttcttctgtatattcttctgtttcaacattactactagtactggttatatgttttgtactggtgctagctgaaccatctgttcttgatgttgaagtcatactttcatcttcttttgtttctgtattattgtcttcattattggtactgtaactagtttctgtaatagttatgttttctgtaaattcttctgttatagtgcttttactagaattgggtatattctcattgtctgttgttgatgtagaaatgatagttttatcttcttttgtttctatagtattctcttcatgattcgtactgtacatagactctttagtagttgtttctactgtatcttcttctgtttcaacgctgcttgaagatatatcaacagaactctcagatccaattgtttctgtacta

SEQ ID NO: 4933 - DNA, 1201 bp, Diabrotica virgifera
  SmartBlast Evalue=2E-55; Info=Pancreatic triacylglycerol lipase n=1 Tax=Harpegnathos saltator RepID=E2B986_9HYME
cgggccgaaaatattgatttttgcaatttgattaaaaaaattgtaaaaaaaaccctggaccacctttcacgtaggcaacttcttgaaccccactctgggatgcctcacggataagactatgcaaaatagtctcatgggaatatttttttaacgaacctgccgttttcgccttctctaaaatgcctttatattattttaatgatcgtatacattttcggtcagtttttggcatatggtggatcatcattggtgtccaaataatatgcaccggaagcccttttatcaatatgatattcgcccatattagaggattctttggagcaattattgtattgaaaatcattgtaattattgcatttctttgcaataaatcccccagtttttattgattctgcaaagtatctaaatgatcttccatgtgcacatgtacctactacatccatccaacagcctggttggtcccttccaccgttagggtagtaatcggaatgtccaatattgaagtcgataccaagaaaaccggcacaagtgtgaatcacttgaacaaacttggcatctgtggcatccaatctgaagtcatcgtgaaccattaagaataaaggtaatgcgggatccaaaccgacaatatagtcaagtttttcaccaagagcatgacctactattcctgcaacgtgagctcccaaggaatgtcctactacagctgttctatcgaaatccaaattattattttttaccagagactgaatatagttaccaacaatctccccaactccgccaacagctgaagctgcatttacgtaaaggtcatcagctaagttgctccagtcaacaacaaagacgttgatgtcatatttgctgagatatgcttcagttagtacggtgttgatatcggaatcatactcgtttcgccagccatggatgaggagtatcgtaaacttctctggtgagaatccaagactttgtagtgagcttgtattatttacatccaatgcatgttcattgtccatatcgttctgatttctgaaatatagttttatatcgtcattacaaacactttttgtcagttgtatcggttggcttaaatcttgaattttatacagctccgcagaagcatccctgtccaacacggaagttggtattgctgcgacacaggcaagaatcgcacacaagacaagtacgttgttcattattggtaggaatt

SEQ ID NO: 4934 - DNA, 1166 bp, Diabrotica virgifera
  SmartBlast Evalue=2E-54; Info=Lipase n=1 Tax=Aedes aegypti RepID=Q173Q0_AEDAE
tttttttaataatgttatctttattatctatatcacacaattttaaaaacatcgatttaccataagattatattatcaatgacgtttttattttacgcactaaaaaaactataaataaattctcttaaaacagaaaacgaccaaaggcctttatattattttaatgatcgtattggtgttcggtcagtttttggcatatggtgggtcatcattggtgttcaaataatatgcaccggaagcccttttatcaatatggtattcgcccatattagaggattcttcggagcaattattgtcttgaaaatcatcataactgccacatttctttgcaataaatcccccagtttttattgattctgcaaagtatctaaatgatcttccatgtgcacatgtacctactacatccatccaacagcctggttggtcccttccaccgttagggtagtaatcggaatgtccaatattgaagtcgataccaagaaaaccggcacaagtgtgaatcacttgaacaaacttggcatctgtggcatccaatctgaagtcatcgtgaaccattaagaataaaggtaatgcgggatccaaaccgacaatatagtcaagtttttcaccaagagcatgacctactattcctgcaacgtgagctcccaaggaatgtcctactacagctgttctatcgaaatccaaattattattttttaccagagactgaatatagttaccaacaatctccccaactccgccaacagctgaagctgcatttacgtaaaggtcatcagctaagttgctccagtcaacaacaaagacgttgatgtcatatttgctgagatatgcttcagttagtacggtgttgatatcggaatcatactcgtttcgccagccatggatgaggagtatcgtaaacttctctggtgagaatccaagactttgtagtgagcttgtattatttacatccaatgcatgttcattgtccatatcgttctgatttctgaaatatagttttatatcgtcattacaaacactttttgtcagttgtatcggttggcttaaatcttgaattttatacagctccgcagaagcatccctgtccaacacggaagttggtattgctgcgacacaggcaagaatcgcacacaagacaagtacgttgttcattattggtaggaatt

SEQ ID NO: 4935 - DNA, 1675 bp, Diabrotica virgifera
aaaagccttgtaagtacaattgtagatatttaaaaacattccacaagtatgcggagaaacacaaaagagtatgtcaaaaaatagtttagtgtgaggtaaagtagaaaattttgcaatataggttcttgaaataagttactgagactgggcttataatatatattaccgggaaattgtagttttaatagctataaacaaattaggtaattctcgtccaaactcagttttaaaaataatatattaaataatctgaactaagaactatactgtagaaaaatagtagtttaaaacactggacttagttgctcaaatttccataaaattattcgtcgaattaaacaagaataaaatatgatagatcatgcaaataagtatatataaatataacaaaacaatgtaaaatgaacacggtttcgtgtttttcggctatatgaaaagtaagatcaagcaatgcacttattgaatattccaatttggatacaaataaacagcaaaaataatgtaaaaatttcaaacccgtttatttcaaaatttcgagatcccactataccttattaatggattatccctgaataaaattatacaattctagaaaaagtgcatgaaaaaagtactttgttgtcgttattgttaatataatttatttctatttgatgtgcacaaaaagatattaataaagtagcataaatattaggaatgtaaagagtgaaatcaaaaccatatactggaatgagccaaatcggcggtaaaaataaagaaagattcatagccccactaaccaaagaacaagtgatgaagaaatatacttacataacaaaaagttaaaaaagtttaaagacagaagtcaatcgttcacaaataaaggacatttataaaattgttaacatgttctacaactcgacattttctaaaaaaatagccagattacatttctaattctaatattttattatgttggcataatttatttaaatataaaaaaaggtgaaatatggtggtgggtagatactcatctatgatccctgaatacgtaagccttggtttagctcctaatatatactatacagaggataccaaggcaaaatcaaaggcagaagaagcgtaggaagacgtaaaatctcgtggctacgcaatctccgtgaatggtttggatgcagctcaattgaactattccggcgcgtaaccaacaaaattataattgccagaatgatttccaatctccgataggagcggaactttaagaagaagaggataccaatgacctactctaagcccaaatccaaacctaccatttccctcccagttccctggatggatttaccgataacgattgaacgtctagattgaatatggaaatgattttgattactgaacagaaggtctttcgaagaaatagggatttatttaataatagtaagaaaagaagcaaaacaataatacaagatttaagagtgtacagacaagcagaatgtgcaagtaaccataaccaccgattagtattagggaaagttaagcaaagaataaggctcgagaagaacaaatactgaaagagaatgtgcagagacatagacaatacgatagggtataatagattaatggaagcatggaaaaagataaacacagaagtaataaacggtaaaaatatacagataattacatgagtgggcaaattaca

SEQ ID NO: 4936 - DNA, 682 bp, Diabrotica virgifera
  SmartBlast Evalue=7E-15; Info=Endonuclease-reverse transcriptase n=1 Tax=Bombyx mori RepID=D5LB38_BOMMO
aattccataaaaatcaggaagttggaatacttggggcacatcatgagaggtgaaaaatacgaactattaaggaatataatgcagggcaaaatcaatggcagaagaagcgtaggaagacgtaaaatctcgtggctacgcaatctccgtgaatggtttggatgcagctcaattgaactattccggcgcgtaaccaacaaaattataattgccagaatgatttccaatctccgataggagcggaactttaagaagaagaggataccaatgacctactctaagcccaaatccaaacctaccatttccctcccagttccctggatggatttaccgataacgattgaacgtctagattgaatatggaaatgattttgattactgaacagaaggtctttcgaagaaatagggatttatttaataatagtaagaaaagaagcaaaacaataatacaagatttaagagtgtacagacaagcagaatgtgcaagtaaccataaccaccgattagtattagggaaagttaagcaaagaataaggctcgagaagaacaaatactgaaagagaatgtgcagagacatagacaatacgatagggtataatagattaatggaagcatggaaaaagataaacacagaagtaataaacggtaaaaatatacagataattacatgagtgggcaaattaca

SEQ ID NO: 4937 - DNA, 1212 bp, Diabrotica virgifera
agttgttacttttgttgtggacgtctatgtaagaatgttgcaaagattttgtacattactgatgtatactcgactttaacaaataaataggcataaaaacttatggtacctcggtacttagcttcattttggctccgtacattaataccttttcgaaattgattctgataagtattcttactcttttttagtaattgtcatctccgaccgtcatacaatctgtgaattatcattaagacgaagaactcgtcacatcaaatttgactttttcttagattttttttgttaattgatgttcattctgtttattgtaatttttaacaatttacaatttaatatcttgcatggacctcctgttactcttattttttagtgcccgtcatttcagctaattatgttaagtttagaagccaatgatatatttaagtattatatttaactactgtgcttaaacttatccaaaacataatatacttttcaaaaaaatataacagaaagatatttattaatcgaaaaatggacatatacagtatacatatgttgaaactagttgtttctatttatgccagagattctgagccaatttgtgatttgtaaacaattttactctattagttttacattcttgtttcttaaccacatttttctttatctattatatggtataaaatggttttacatgtacattatcttgtacaagtctgtctcttgatcttttatatggtaatataaagattgcacattttgccgataagtgtttgataggtgatcaaactaaaataaattataatatacagtaagcaccacgctactagatacatagggtaggtacctaattcctatgattatgggctaatccggtccgttctcagatgtgactttcatctctgtcaagaaagtattcaaaacaatttattgtttttccttacaaaaattacattaattaatagtattgttactctgctttaaaataactttattcaaacaccaagaatattgcaatactttaaaacttttacaacttcaacaaaatgacaactataagcgctaaatacggctgatctattagttgtcaactttctctgttaatattcagtttctttgcattttctgacgttctaaacgtcactagcaataaaaataaacattgcaacgagtgaagggtccagaactgtaatagctcaatgtttctatgtgtctagtagggtggcg

SEQ ID NO: 4938 - DNA, 1135 bp, Diabrotica virgifera
agttgttacttttgttgtggacgtctatgtaagaatgttgcaaagattttgtacattactgatgtatactcgactttaacaaataaataggcataaaaacttatggtacctcggtacttagcttcattttggctccgtacattaataccttttcgaaattgattctgataagtattcttactcttttttagtaattgtcatctccgaccgtcatacaatctgtgaattatcattaagacgaagaactcgtcacatcaaatttgactttttcttagattttttttgttaattgatgttcattctgtttattgtaatttttaacaatttacaatttaatatcttgcatggacctcctgttactcttattttttagtgcccgtcatttcagctaattatgttaagtttagaagccaatgatatatttaagtattatatttaactactgtgcttaaacttatccaaaacataatatacttttcaaaaaaatataacagaaagatatttattaatcgaaaaatggacatatacagtatacatatgttgaaactagttgtttctatttatgccagagattctgagccaatttgtgatttgtaaacaattttactctattagttttacattcttgtttcttaaccacatttttctttatctattatatggtataaaatggttttacatgtacattatcttgtacaagtctgtctcttgatcttttatatggtaatataaagattgcacattttgccgataagtgtttgataggtgatcaaactaaaataaattataatatacagtaagcaccacgctactagatacatagggtaggtacctaattcctatgattatgggctaatccggtccgttctcagatgtgactttcatctctgtcatgttactgtcaataaactattcaaaataattgtttttatatacaaaaaatacattaattaatggtattgttactctgctttaaaataactttattcaaacaccaattcaagaatattacaatactttaaaactttttacagctttaatgacaactataagcgtcaaatacagctgatctattaataattgcaactttctatgttaatattcagtctctctgacgttctaaacgtcactagac

SEQ ID NO: 4939 - DNA, 1177 bp, Diabrotica virgifera
taagtttctatgtattttgactgtttcttgctgaagttttagtacaaacattaaagcttatgatttatttcgaaaactacataagtccacataattaaaaacttaaagccgcgtcctcattggtaaatttttcgtgtgtattgaactaattgttcgtcgtaaatcttactagtgaggacggacaatcgatggagcgtgtgcgtcgaaaattcttacgaacacatccacattagcacatttacctcgagcatccaaatatttgcgacgaaaagctggttcgacgctttataccagtgaggacgcgtcataatacaaaaaactaagtaacattttttagtcttttaattgtctttcagaaacatgcatttctaacaatgcttctactaatgctacaacaaattttaccttaagtgggcagaattagagaaaatcaatgtaaatgcagtacgaaatttgtatttgcccatttcagtcaattttttgtggtacattgtgggtactgtcgcccctgaaagagttttacttttcctgaaaaatttatatattaataacatgtattgttttcgaaatgagactattcaattataacaaacacaaaaatgacttatgtactctattctaaaggttgtatacagcatttttagcgtattgtagctaataaaatatgtacacgattcgcaaaaagtatctgaatataataggagactacttatttacatatacatacatattattttggttttctaattggtagcgtttgattttgatccagcttgcattctatatatttacaaattggtcattttaatacacattttatagtatattccatctgaaaacaaaaatttcaataaatattttattttctgcacttgcagtataattttttatataacagattggaaaactacaagtcactgaattataatttcatatttctctggtactatttctactttttctctgtactatttctcgtataataagcaataactccttacacaaaacaaagatcacaattttcatatttcatagaaaagttttatgtttctcttagatggatatttgcattaacatgttgtatattagcttctgctttgatttactatctgtgaacaacattagatccaattcattgtaaaaatttagttaaagtgtttatctcattcttgtatgt

SEQ ID NO: 4940 - DNA, 1179 bp, Diabrotica virgifera
aagagcactgtatatctaaatttctatgtattttaactgtttcttgttgaagttttagtacaaacaataaagcttatgatttatttcgaaaactacataagtccacataattaaaaacttaaagccgcgttctcattggtaaatttttcgtgaggactagtgaggacgtggctaaaagccgacaaccgatggagcgtgtgcgtcgaaaattcttacgaacacatccacattagcacatttacctcgagcatccaaatatttgcgacgaacagctggttcgacgctttataccagtgaggacgcgtcataatacaaaaaactaagtaacattttttagtcttttttttttgtctttcagatacatgcatttctaacaatgcttctactaatgctacaacaaattttaccttaagtgggcagaattagagaaaatcaatgtaaatgcagtacgaaatttgtatttgcccatttcagtcaattttttgtggtacattgtgggtactgtcgcccctgaaagagttttacttttcctgaaaaatttatatattaataacatgtattgttttcgaaatgagactattcaattataacaaacacaaaaatgacttatgtactctattctaaaggttgtatacagcatttttagcgtattgtagctaataaaatatgtacacgattcgcaaaaagtatctgaatataataggagactacttatttacatatacatacatattattttggttttctaattggtagcgtttgattttgatccagcttgcattctatatatttacaaattggtcattttaatacacattttatagtatattccatctgaaaacaaaaatttcaataaatattttattttctgcacttgcagtataattttttatataacagattggaaaactacaagtcactgaattataatttcatatttctctggtactatttctactttttctctgtactatttctcgtataataagcaataactccttacacaaaacaaagatcacaattttcatatttcatagaaaagttttatgtttctcttagatggatatttgcattaacatgttgtatattagcttctgctttgatttactatctgtgaacaacattagatccaattcattgtaaaaatttagttaaagtgtttatctcattcttgtatgt

SEQ ID NO: 4941 - DNA, 1294 bp, Diabrotica virgifera
caggaaaatgtgagtaagaaacaaaatgtacaacaaaatcatcattcactatttttaaatatttcaatatttaaaacccacttttcaccaatatgtatattacgaaaatcaatgtgttcaatccaaacaaacaaatataaatttaacgaagttgttacagtaatataattaagaccaaaagacaataaagaacttttatcaataaaaaacaaaaaaaaataatagcataagaccgttcgtgatttagaaacaattttatgagaagtgattcttcacttgtcatcgacatattattactgctctccggcatgttggatccgtgacactcgaggccttttgagaaatatattactattattttgcattttgtgccaagagctggattggaggacaaacagggctggaccttcgagaaacgaacatacatcttgcaatagtgcaaagtattcaaagcgtctttctaacacagtttatagtccgagagctagactagaagtatattatgagtatgtatttgaacagtatgaaactattatgtaatccccattcaggaatgaatacaaattcgaatacctggcatatcgtggagaagagttttggctttattgtcccttgaattttttaagttctattatttaggtagttcttgaggtattttaatatcttctaatttaaccactactctcttaggtgtgttcgttcatttctattcgttctttatgcatccattcgtgaacagtcgttcgcttgatgttatcagtacgtctggtttgtggtctgcacctacttctcttattttctcttggtcccaattcaacaattcgcttcgtccaacggttatcttccattcttcctatgtgacctgccataacttgcggcatcggctactgtattacgtgacataaaatagcgctgttgccgatgaacgataaaacttctgtatgtaccattatttaaaaaataggtattcaatcccttgttaacaatcccagtctataataatgtatacttaaatttacaatttggtatacagcttggttgatacacgttgatacgtgcatgatgcattgatgcctgattgtggaaaaaaagatatttttaagtttctgcactgtattttcttaaacatttaataaaactattaaaaattctgaaactattttagtgtattaggtattaggttttaatattaggtataaaaatccacttagagtggccatattgctgacactatgtttagtgcagtcactgaaggttttcacctccgatttcgttgaacctccatcaattttca

SEQ ID NO: 4942 - DNA, 1052 bp, Diabrotica virgifera
caggaaaatgtgagtaagaaacaaaatgtacaacaaaatcatcattcactatttttaaatatttcaatatttaaaacccacttttcaccaatatgtatattacgaaaatcaatgtgttcaatccaaacaaacaaatataaatttaacgaagttgttacagtaatataattaagaccaaaagacaataaagaacttttatcaataaaaaacaaaaaaaaataatagcataagaccgttcgtgatttagaaacaattttatgagaagtgattcttcacttgtcatcgacatattatgtaatccccattcaggaatgaatacaaattcgaatacctggcatatcgtggagaagagttttggctttattgtcccttgaattttttaagttctattatttaggtagttcttgaggtattttaatatcttctaatttaaccactactctcttaggtgtgttcgttcatttctattcgttctttatgcatccattcgtgaacagtcgttcgcttgatgttatcagtacgtctggtttgtggtctgcacctacttctcttattttctcttggtcccaattcaacaattcgcttcgtccaacggttatcttccattcttcctatgtgacctgccataacttgcggcatcggctactgtattacgtgacataaaatagcgctgttgccgatgaacgataaaacttctgtatgtaccattatttaaaaaataggtattcaatcccttgttaacaatcccagtctataataatgtatacttaaatttacaatttggtatacagcttggttgatacacgttgatacgtgcatgatgcattgatgcctgattgtggaaaaaaagatatttttaagtttctgcactgtattttcttaaacatttaataaaactattaaaaattctgaaactattttagtgtattaggtattaggttttaatattaggtataaaaatccacttagagtggccatattgctgacactatgtttagtgcagtcactgaaggttttcacctccgatttcgttgaacctccatcaattttca

SEQ ID NO: 4943 - DNA, 1953 bp, Diabrotica virgifera
  SmartBlast Evalue=0; Info=Arginyl-tRNA synthetase n=1 Tax=Culex quinquefasciatus RepID=B0W0R1_CULQU
ggttctttgagcctatgtagtttcaatttatttattaatttatttttgtctactaagaatcaatataggtattatggatcaagatctcgttagatataatcttgaggcagatactgctctggaacaaattaatttgatgaaagaaagtttaaaaggcatcaaaagtagtatcgacggagtgtctcttcaacctactaccagtgacgggcagttgaacaaacttattactgaaaatattaagcttaaacatcgtttgtcaattttaaacagggctattgcagctcaatcagcgaagaaagctccgaatctaccaatggatcaaaccagactgcagagcattactgacatactcacttacatcttttcaaatgctatttcaactgcatttccagatattacagatgccccagttgtaattgctttatccggcgcaaaccccaaatttggagactaccagtgcaactcagcaatgcctatagcgaacatctacaaacaactaggaaagaaagttgtgccaagagatatcggccaaaagattgtagaaaatgtgccttcccatgaccttatcgccaaaatggaagtagccggtccaggctttattaatatatttttgaacaagagctttgcagttaagaacttatctcgtatttttgaacatggagtcaaatctcccgaagttcctaaaaaaatgagggttttagtcgatttttctgcacccaacattgcgaaggagatgcatgtaggtcatttgaggtcaaccatcattggagaaagctattgcagattattggaatacctcggtcatgatgttataagaataaaccacgtcggcgactggggtacacagtttgggatgctgatcgcacatttggaagataaatttcccgatttttatattaaatcacctccaatctctgatttacaagagttctacaaggagtccaagttaaggttcgattctgatgaggactttaagaagagagcttatgccagtgttgtcaagttgcagtcttttgaaccaaaacataaaaaagcttgggaattaatttgtgatgtttcacgacaagagtttcaaaagatatatgacaggctggatgtttcaataatcgagagaggcgaatcattctaccaaagccgtatggaaaaagtagtaaaggagctagacgaaagaggcctacttgagttagacgaagggcgtaaagtaatgtggggtggcacaaccatcccacttacagtcgtgaaaagtgacgggggcttcacatacgatacctcagacatggcttgtataaaacaacgtctcgaagaagaaaaggctgaatgggtaatatatgttacggatgccggccaagccacacactttgaaactctgtttggctgtgccgaaaaagccggaattttgaaccgagctgttcatcgtgtggatcatgttggttttggagttgtgttgggtgaagataagaagaagtttaaaactagatcaggtgataccgttaagttgtcggccttgctagatgaaggattgagtcgagcgttggataagctaaaagagaaggaaagagataaggtattaactcctgaagaattaaggaaagctcaagaatccgtagcatacggatgcataaagtacgctgacttgtcgcacaacagaaaccatgaatacgtattctctttcgacaagatgttggacgataagggtaacactgccgtctatcttctgtacgcattcacccgcatcgggaaaccgcattaggactttcgcaagcttccattccttttcgtggtccaacgtgatactgtttgttttactcagttctttgatcttctctgatgtgaagttggcagttcgagcgatagacttgatgcgggtgaatgcgtacagaagatagacggcagtgttaccaaaagcttaagctatggctagattacattcatttaccacggtagtgcttttac

SEQ ID NO: 4944 - DNA, 388 bp, Diabrotica virgifera
  SmartBlast Evalue=2E-37; Info="Arginyl-tRNA synthetase, cytoplasmic n=1 Tax=Harpegnathos saltator RepID=E2C789_9HYME"
gcttccgcaagtaatattctgccaacgttcactttaataatatccccagaagagtctttttcaacgcaataacaattatcataaaactcactaaacgtagtggacacttcgtatacatattcacacaagggatgaagaaacagatcctttgtgatttttaggagaacatcgggaaaccgcattaggactttcgcaagcttccattccttttcgtggtccaacgtgatactgtttgttttactcagttctttgatcttctctgatgtgaagttggcagttcgagcgatagacttgatgcgggtgaatgcgtacagaagatagacggcagtgttaccaaaagcttaagctatggctagattacattcatttaccacggtagtgcttttac

SEQ ID NO: 4945 - DNA, 1251 bp, Diabrotica virgifera
  SmartBlast Evalue=5E-56; Info=Lipase 3 n=1 Tax=Harpegnathos saltator RepID=E2B370_9HYME
acagtgactacgtattgaacatgtatatacaattagtgttggtgttgtgtcttattttgcctttctcaaaatgtgaggactccacgtgcaaccttttccagaagtatgtgctttttaaggatgaatgtcccactgaagagacaaatgaggtccaacaaaacagttgtagctattttcagaaatatgtattatggaggaaagaatgtaatgaggtaccgcaggccgatagtacctttacaaaatgtaatcgagttcaacaaaaattgttaggacaagattattgtacatacatcccggatcagtatttagatgtgcctcaaataattgccagacatggatatccttctgaaactcatatcgttgagaccgaggacggatatttactacaagttcatcggatcccaagaccaaaattgggtgcttctattggacagcctatatttttacaacatggtttattaggaagcagtgccgattggataattaatggaaataatactttagcatttgtattggcagacaaaggttatgatgtttggttaggaaatgcacgaggaaatgtttattcgagatcacatatctccctaccaaatgattactcagctttttggaattttagctttcacgaaatgggaaccaaagatttaccatcggttataacgtatattaccagagttacaaagaagccaggtgaacttatttatgttggccattcgatgggaactactatgttttatgtattcgcatcggagaatgcacgagtagccaaaaatattaaagtaatggttggaatgggatccgctgcttatatgacacatataacatccccaattagatattttgcaccacttacgaaggatctagagtggttacgaaaatacttgggatttaatcaatttttaccaaataataaactgatgatgctctttttagagtgcgaaggcgttctgtgatatttgttggcctttttaggttttttactaataatataatttttataagaaaaattgttcatagaatttttttgtaataaatggtaggtatacctacagctagttacagggaattcttccttgttgatacttatgtttaactttttagtatagtgggaatattgtgatcttatattatttaaaaaggaggtgagatttattatataaaatagaagataatgaaatcaatatttatttaaaaataattgtaaatattgactatttaaattagaaaatcaagagaaacttgaggatatta

SEQ ID NO: 4946 - DNA, 1069 bp, Diabrotica virgifera
  SmartBlast Evalue=2E-65; Info="Lysosomal acid lipase, putative n=1 Tax=Aedes aegypti RepID=Q16MC7_AEDAE"
acagtgactacgtattgaacatgtatatacaattagtgttggtgttgtgtcttattttgcctttctcaaaatgtgaggactccacgtgcaaccttttccagaagtatgtgctttttaaggatgaatgtcccactgaagagacaaatgaggtccaacaaaacagttgtagctattttcagaaatatgtattatggaggaaagaatgtaatgaggtaccgcaggccgatagtacctttacaaaatgtaatcgagttcaacaaaaattgttaggacaagattattgtacatacatcccggatcagtatttagatgtgcctcaaataattgccagacatggatatccttctgaaactcatatcgttgagaccgaggacggatatttactacaagttcatcggatcccaagaccaaaattgggtgcttctattggacagcctatatttttacaacatggtttattaggaagcagtgccgattggataattaatggaaataatactttagcatttgtattggcagacaaaggttatgatgtttggttaggaaatgcacgaggaaatgtttattcgagatcacatatctccctaccaaatgattactcagctttttggaattttagctttcacgaaatgggaaccaaagatttaccatcggttataacgtatattaccagagttacaaagaagccaggtgaacttatttatgttggccattcgatgggaactactatgttttatgtattcgcatcggagaatgcacgagtagccaaaaatattaaagtaatggttggaatgggatccgctgcttatatgacacatataacatccccaattagatattttgcaccacttacgaaggatctagagtggttacgaaaatacttgggatttaatcaatttttaccaaataataaactgatgatgctcttagttatcaatgcgaactatttagaatagatgcgaaaatgtgcgaaaatcttatttttgctgtatgtggatttaacaaggaagaatttaacacggaaattcttccaatattattagcaaaggacccagctggagcttctacc

SEQ ID NO: 4947 - DNA, 1547 bp, Diabrotica virgifera
  SmartBlast Evalue=2E-72; Info=Endonuclease-reverse transcriptase n=1 Tax=Bombyx mori RepID=D7F170_BOMMO
aaaatttctaccaagaagtaaaaaaatcccgaggaacttcaaagagtaaaacaagttattgtagagtaagacggtgtgcttttaggagaaacaacagaaaaattgaacagatgggcggagtattttgaagaactatttaaatgaaaataaacaagcagaaccccaggaaataaaacaacatgaacaggataacacagaacaacaacgtgaagaagaacctacactacaagaagtaaaagaagcaatattgaagcaaaaaaataacaaaagcgcaggagaaagcggaattccggcagagatttttaaagtaggaggagaaaagctgcaagaaaaaattttccgactaatattaacagtctggcaaaaagaggaaatgccgcaacaatggaacaatgcactcatctgtccaatctacaaaaaaggtgatgaaacaagttgcgaaaattatagaggaatatcgctattagaagtggcctataaaatacttgcaaaaatcatccgaaatagattgcaaaaggaggtaaataagatcattggagaataccaaggaggttttagaccaggaagatcaacaacagatcaaatatgtttattaaaactaatacagaacaacagctacgaacaaaatttgggactacacatgttgttcattgactttaaacaggcttacgactcagtagaccgagatatgctatatgaagcaatgagatccttgggtatttcaggaaagctggttaaattagtgagaatgacgctcaacaatacaaaaaacaggataacactggaaggaaattttcaaaacaattcacagtgaataaaggactgaaacagggtgaccctctatctacagacttatttaacttggtactagaacacatagtaagaaggataaaaattaatacaagcggtaccatatttaacaacagacagcagtttatagcttacgctgatgatctagtcatcctaacaagaacaaaggaacatctccaaaaaatcttccaaaagttcgaagcgaaagcaaaaaggtatggattaagaatcaaccaaggaaaaacacaatacatggtaatgaaaggagatataaataaagaggataactatataaaaatgaaaggagaaggagatgaatataaatttaaggaagtagcagaattcgaatacctgggagtgactgtaaccagtactggaagggaagaaaaagaaatagataaaagattattgaagggaagtcgagttgtgggtgccttaaacacgatattaaaagcaaaaaatgtatcaatgaaacgcgaaaatcagaatgtatgaaacgataatacggcccacagtgttgtatgcgagcgaaacgtgggtaatgaatcaacagatagcggagaaaacctggaggagacgaacaaatgaagaagtaatgaggatgtatgggagaccaaaataacgacaaaaatacgagcccaaagagttagatggctgggacatattactcgaatgccagaaactagaaacgtcaaacgaatattgaatgacagagcattgggaaaaaggagacgagg

SEQ ID NO: 4948 - DNA, 757 bp, Diabrotica virgifera
taactttagttaccaatcagttgcgtattagttactgtccatgattttaataagtatccgcacaaagcgctagtagttattaaccggtctgtaattcgtcagtgatcagtcggtagtgactggacgtgcaggtcgcttagcgactagtttctagtttgttttaatattattattttattagttaaaattaccacctccaaaaaatcttccaaaagttcgaagcgaaagcaaaaaggtatggattaagaatcaaccaaggaaaaacacaatacatggtaatgaaaggagatataaataaagaggataactatataaaaatgaaaggagaaggagatgaatataaatttaaggaagtagcagaattcgaatacctgggagtgactgtaaccagtactggaagggaagaaaaagaaatagataaaagattattgaagggaagtcgagttgtgggtgccttaaacacgatattaaaagcaaaaaatgtatcaatgaaacgcgaaaatcagaatgtatgaaacgataatacggcccacagtgttgtatgcgagcgaaacgtgggtaatgaatcaacagatagcggagaaaacctggaggagacgaacaaatgaagaagtaatgaggatgtatgggagaccaaaataacgacaaaaatacgagcccaaagagttagatggctgggacatattactcgaatgccagaaactagaaacgtcaaacgaatattgaatgacagagcattgggaaaaaggagacgagg

SEQ ID NO: 4949 - DNA, 1555 bp, Diabrotica virgifera
gttttgtgtacacatatatcctgctgagcatattatactttcttaatgtgtttggacagtgagtctacaaaaaatcgggatggaaaaacagccttctgtttttggttcttagtatgaatgttactttttcttacagacccattaccgtacaagtgttcacgttgttggcgaagttattcagtatcatatacattagaaagacatctacggtacgaatgtggagtcgctaaacaatttacttgttccatttgctcaaagaaattttctcgtagagatattttaagagtacatcagaaaaatttcaggcatgacataaatcatggtatggttcaacctttagagccaaatcaagatttaagtcaaatgcagggatcataatttgtcttgatcccccaatatattttagtaagtaggccgaatatttctcctcaagaaatattcggactgggtggaggtgggttaagtaacttcccttcaggaagttgcctttttaaggtgaattttgccatcaccttattttttaatatccatagtccttcgtttccaaatccacattcctatcacatctcatctggttcatatcatgtttcattttcaccttcattaaattctttctctttcatcaactattccaaggatgggtggctgcaaccttttcatgtaagtataaaacattttattaaagagctatttaaagattttgttcctaattactaaggcttttggagcctcactactgtgcaatttgtcaatatttgtgcctgttttgtccatcagctattaaaaactacttctttttaatagtctgcaagaacaaaccagggaatttttgttttactagttactagtcgttttacattgtgcagtgaacatttgtctttaaaaaagcgaagcaatggttaacacaaatccaaggcactaagtatctcatttcttctgatcattgcttataatttaatctcgagtatttaaattcaaatgtattgtcagatacatatttaatgacgagacttacattattcaaaaccatgtatagaaataataccataaaaccccatgactataaccatgtcaccatccccacatatgactgacatgattttgaggaatgtaagccttcacggctggtgttctgtaatggtaaattctttttgggctttataattggtcgtgatgtggatctatttctttcttgtgcctttcaactgtgacagacatcgaagactatgcaacataggtcataactgtcgggtagaagaccgttatgaactgtcttctactcattgatagtttccacgctgcctttgacatctcatggaagttgcaggccaggaagaaataattccagctcggtctataaaccccaagaacaatgtaaccatgagataaccactttagttttccactgatctgaagaaattttaagatatgccgattatacaaatatttaacgaaactttttctctgttgttacagactaacctgttccattcccgtggccaaagaagacttacgtttttattataacaaaagtcgttaatatattgattttgtt

SEQ ID NO: 4950 - DNA, 739 bp, Diabrotica virgifera
gttttgtgtacacatatatcctgctgagcatattatactttcttaatgtgtttggacagtgagtctacaaaaaatcgggatggaaaaacagccttctgtttttggttcttagtatgaatgttactttttcttacagacccattaccgtacaagtgttcacgttgttggcgaagttattcagtatcatatacattagaaagacatctacggtacgaatgtggagtcgctaaacaatttacttgttccatttgctcaaagaaattttctcgtagagatattttaagagtacatcagaaaaatttcaggcatgacataaatcatggtatggttcaacctttagagccaaatcaagatttaagtcaaatgcagggatcataatttgtcttgatcccccaatatattttagtaagtaggccgaatatttctcctcaagaaatattcggactgggtggaggtgggttaagtaacttcccttcaggaagttgcctttttaaggtgaattttgccatcaccttattttttaatatccatagtccttcgtttccaaatccacattcctatcacatctcatctggttcatatcatgtttcattttcaccttcattaaattctttctctttcatcaactattccaaggatgggtggctgcaaccttttcatactaacctgttccattcccgtggccaaagaagacttacgtttttattataacaaaagtcgttaatatattgattttgtt

SEQ ID NO: 4951 - DNA, 1259 bp, Diabrotica virgifera
acgggggcgacgatacaacctgaactataattaatatgaaaatttttttcaggacacctacaaaaaaacacaaaaaaacacaaaaaactgcttcggccaccaaaaaaacaaaaaaaataactaaaaaatcggcgcaagccaaaaaaaaaataacaaaaaaacaaaaaaacccgggaatgtaggtcccaacctttgagctccaagtctctgaaccgatcccaacccagaggcgattttacaaaatatgcccactgtcagcacaacctccgccttctacacatacgtcattcagaactgtaagtgtccgtacccactgtcaacacatcttgggaaatatgcccgattcaaacacatgtggtgtaatttgaatccactgtattttgtattttcactaaagttttatatccatttattgaattgcacattataatctatctcggtattatttcggtttagatttatattcgtacgcacacgttaagataagcattatcagaacatgattcaatctctaatacatcttcatcgtgcagttttaaatattttcttaaatataattcagatattctttctacgtatttagatgaaacgatgaccaccaacaaactgacgaccacactcaagattactgcataatagttcgttaaaaggttcaaatgacaacatctgtgctggaatcggatatattttgtgggatgtgttgatggcgggtacaggatacttcttttctggatgacatattcgtggaggacggagcttgtgctgagagcgggtatattttgtaaaattgcggcccggagcagtggcttggagcccaagcaagcaattttagttacgcggacaagtcactagaggataacaggtctaaagcgcctcacgctagcctgaatttacaatcgattagggcatcacgttggagttctattacccagaactcccacgtgaagagcatttggctcatagttgtgcccctatcgcgcatcagagtgctagtaggggggaaagggatggtctggagcattggaacgtggtggagtgacttctgtttttacttgagttaatacacctcgctccaatgaattgttacactcgaatgtctttctaaggagtgaacaagtctcgcagactgggttaaattaaattgcttgcttgctggcttacatcgcaagtcatcgcaaacttcgtcgtcatcaccatggaagaaagtatgttcgtccttgttgggtggattgttccgattcgatttttttgcacaaact

SEQ ID NO: 4952 - DNA, 1017 bp, Diabrotica virgifera
aaaatgtacccgctttcagcgcaacttccgccttctacacatacgtcatccagaaatgtaagtgtgtttgcccactatcagcacatcttacggaatatacccgattcaagtaaatgttcttaaatccactgtgtttttttattttcactaaagttttctatacatttattgcattgcacactttaatatatctcggtagatattatttaggttcacattggttcgtacgcacacgttaaaattttcattatcagaacatgattcaatccctaataaatcttcatcgtgcagttttaaatattttcttaaatataattcagatattctttctacgtatttagatgaaacgatgaccaccaacaaactgacgaccacactcaagattactgcataatagttcgttaaaaggttcaaatgacaacatctgtgctggaatcggatatattttgtgggatgtgttgatggcgggtacaggatacttcttttctggatgacatattcgtggaggacggagcttgtgctgagagcgggtatattttgtaaaattgcggcccggagcagtggcttggagcccaagcaagcaattttagttacgcggacaagtcactagaggataacaggtctaaagcgcctcacgctagcctgaatttacaatcgattagggcatcacgttggagttctattacccagaactcccacgtgaagagcatttggctcatagttgtgcccctatcgcgcatcagagtgctagtaggggggaaagggatggtctggagcattggaacgtggtggagtgacttctgtttttacttgagttaatacacctcgctccaatgaattgttacactcgaatgtctttctaaggagtgaacaagtctcgcagactgggttaaattaaattgcttgcttgctggcttacatcgcaagtcatcgcaaacttcgtcgtcatcaccatggaagaaagtatgttcgtccttgttgggtggattgttccgattcgatttttttgcacaaact

SEQ ID NO: 4953 - DNA, 1597 bp, Diabrotica virgifera
  SmartBlast Evalue=3E-15; Info=Gag protein (Fragment) n=1 Tax= Drosophila buzzatii RepID=Q9XZR6_DROBU
ctcccagtgcatagagtctaatcctaaggtattcatgtctaagcatgttaataagctcattaaatgacaactgaagtctatcacttcagtatataaagagaaaacattgcacgaagaaaggttatttactacacacagaataatgccattgactacagttcatggttcttcaaatatagtaaattatccgttttattgattatacactatgacaatatgttgttaagtaatatatttcggtaagtaatgaaaactgtgacgataatataattttatctactgcagaaaagtatcggcgttgaacggcatgtattacggttgtggcccctctttccacatttccagcagcatgttcgtctatcgaagtttaatagtttgtttgttgatgtttcctgggacattctattaaaacgggagcttcttctttgtgaagtgttgtctacctctattttacttatgttactttgaatagtttcgtgttcttcagtctggcgtataaggtctttcacggacgtaacatctttttccttgatgtataatttgtaatttgggtgcatgtttttgtaaattctttttaattcttgtgttttgtctattttgccttaccttctgattagcgtttgaaactctaatagaaaatctttaaaccgttcgtttgttttctgcgttctcgttctgatttggtcttccaaatcgtctaaccagtttgctgatttaaaagccaagttaaaatcctcagtaaaattgttccagttttcccaggagtcgacgtttttttggaaccatagtatcgcttttcccctaaatactcctggtagtgctttcaataaagcatcgtctcgaatccggtaaagctttttagttcgtatagcctcttcaaaaattctgtggggtctttgcattcgtcaaaatgtaagccccattttctaaccgtgtccattatttgactgtgttcattttccgtttgtgtgtcgtctgttttaggatcgtctaatttacctgtcatatctaagttaaattctgccataacattgcttaattcctctttctttaatttatatacccagcctaccgtctcatccgctatttctaagcctaacgtaccttctgattcctccatatttataatatatttgtttaagtgtcttaaatcctgttaaaataaatactcgggcgccaatgtaacgaaggtcgttgcgttgttgctccaggtaactaaatcagtcgaagaaaagagttcgctttttaagacatttttatttggaatcaaaacatacaaaagataagataattagccttaattactcgttaatttcgttaataaaatatatttataatctacgcattgagctttctgttcgggccgatgtgacgatattttgtacatgaatgaatgattttgactatcgcgtgaaataggaattgcttttattaatacgacatgaatgcataaggaaagggaataaagggaatctcgctcagctcgccagatgaaaagacatattagggatatacgatcaccgctcgtataaggataggtaaaggaaaactgtcggattcgctcagctcgccaaaatgacagcggaaaatggtcggg

SEQ ID NO: 4954 - DNA, 659 bp, Diabrotica virgifera
ccatatttactttcggcgatagaaaatttccatttttgagtgaaaatttttgacgaaaataagttacttatttcgatccataaacttttaaaaaggagagaatgatgatttttttggcaattgcttattacagtgtctatgagtctctttcgacaattccacttttgtttatggataatataagaggtacctaattcttaatctatctattcaaagcgaaattcaaattatagtggatcaaatgtaacgaaggtcgttgcgttgttgctccaggtaactaaatcagtcgaagaaaagagttcgctttttaagacatttttatttggaatcaaaacatacaaaagataagataattagccttaattactcgttaatttcgttaataaaatatatttataatctacgcattgagctttctgttcgggccgatgtgacgatattttgtacatgaatgaatgattttgactatcgcgtgaaataggaattgcttttattaatacgacatgaatgcataaggaaagggaataaagggaatctcgctcagctcgccagatgaaaagacatattagggatatacgatcaccgctcgtataaggataggtaaaggaaaactgtcggattcgctcagctcgccaaaatgacagcggaaaatggtcggg

SEQ ID NO: 4955 - DNA, 1142 bp, Diabrotica virgifera
  SmartBlast Evalue=1E-120; Info=Inorganic pyrophosphatase n=1 Tax=Harpegnathos saltator RepID=E2BJX8_9HYME
aatcgattacactatttgggaatttcagttgttgaagttgaaggtgtgatgtcatgcttccgagaatttcaatttcatcatttgtgcggttaggtcgcataggaaaaagtttgtgtgacaattctcatattttatttagtcttagtcctagtcctagacttcaaatcttaagaaaaatgtcttattccatagtagagagaggatctccgttctcacccgattatagggtttatatcgaaaatcaaaatggtccaatctcacctcttcatgacattcctttgttagtggatggaaaccctaaggttttcaatatggttgtagaagttcccaggtggacaaatgcaaaaatggagataacgatgaaagaaattcttaacccaatcaaacaagatatcaaaaaaggcaaacctagattcgtttcaaattgtttcccccaccatggatatatctggaactacggtgctctaccccaaacttgggaaaatcccgaacatcttgatgatggcacaggttgcaaaggtgacaacgatcccattgatgtcatagaaattggatacagagttgcaaaacgtggggaaatcttaaatgtaaagattttaggaactctggctttaattgatgaaggtgaaactgattggaaactcattgccattgatgtaaacgatccattggcagatcaaatcaatgatattccagacgtagaaaaacatttcccaggtcttctgaaggcttctgtggaatggttcaaaatatacaagattccagatggcaagccagaaaatcaatttgcatttaacggagaagctaaaccagctgcatttgcgcttaagattgtagatgaggtacataaattctggaaaggccttgttgcaaaagaagtcgacgctaaaggaatttcatgtgtaaatacaacactagaaggaaactcgtttaatattagctacaatgacgccaaagaagttattgaaaagactccagaatatggcccagcacaacctactgacccaattgtcgacaaatggcactatattcatctaaagtaaacaaatggaacacaactgaacaatgttgcatttaggttatggatggagataggcacacaactttcctatgttttattaaataaatagataaaagaatat

SEQ ID NO: 4956 - DNA, 1130 bp, Diabrotica virgifera
  SmartBlast Evalue=1E-120; Info=Inorganic pyrophosphatase n=1 Tax=Harpegnathos saltator RepID=E2BJX8_9HYME
tttgaagtagtcggtgtgatgtgtgatgtcatggatgtcatcctgtcatgcttcagagaatttcatcatttgtgcggttaggtcgcataggaaaaagtttgtgtgacaattctcatattttatttagtcttagtacaagtcctagacttcaagtcttaagaaaaatgtcttattccatagtagagagaggatctccgttctcacccgattatagggtttatatcgaaaatcaaaatggtccaatctcacctcttcatgacattcctttgttagtggatggaaaccctaaggttttcaatatggttgtagaagttcccaggtggacaaatgcaaaaatggagataacgatgaaagaaattcttaacccaatcaaacaagatatcaaaaaaggcaaacctagattcgtttcaaattgtttcccccaccatggatatatctggaactacggtgctctaccccaaacttgggaaaatcccgaacatcttgatgatggcacaggttgcaaaggtgacaacgatcccattgatgtcatagaaattggatacagagttgcaaaacgtggggaaatcttaaatgtaaagattttaggaactctggctttaattgatgaaggtgaaactgattggaaactcattgccattgatgtaaacgatccattggcagatcaaatcaatgatattccagacgtagaaaaacatttcccaggtcttctgaaggcttctgtggaatggttcaaaatatacaagattccagatggcaagccagaaaatcaatttgcatttaacggagaagctaaaccagctgcatttgcgcttaagattgtagatgaggtacataaattctggaaaggccttgttgcaaaagaagtcgacgctaaaggaatttcatgtgtaaatacaacactagaaggaaactcgtttaatattagctacaatgacgccaaagaagttattgaaaagactccagaatatggcccagcacaacctactgacccaattgtcgacaaatggcactatattcatctaaagtaaacaaatggaacacaactgaacaatgttgcatttaggttatggatggagataggcacacaactttcctatgttttattaaataaatagataaaagaatat

SEQ ID NO: 4957 - DNA, 1334 bp, Diabrotica virgifera
aaatttaatttgaaaaaacatttatatagcctaaaaatggggctataccaagaatattatcgtttttcagaaaaagttatgggttgcctatatttaaggagtcaaaatttgacataaatttgaactagattttctcaaaaatggctccaaggaatttgtttattctttgatatatttttgatatcctatcggctaaattgaatgacattagtcagatttcttaactccctataggaggggagttatgaattttttataaaaaaatattcgagtgcccgtaacttcctctgtaatagaaactaaaatttgaaatttggcagacatatatggtactttattatctattatcacaataaattttaccaaaaatatggcttccggttgaaccggaaatgaaaaaaaatcttaattttttacgatactgccctgtatattttaacatattttgaaagaatgcaaaattacctttccaatgacataaaactcgttgctgtagctcaaaaactcgaaaagttacggtaaatagaaattttgctataatcttgtgtgtgtcctctctcacgcgatcatagcagagcattattatagggcagtcaatgagggtatttggctccgaattcatcctactacatcgatgtacttgatattttcacagtaagtagggaatagctcaagaaacaaaatctaccctatatactatggcgcctttatcctggggcggttcccacttcttcaagggggtggaaaatttgttggtcaaaataagcacggaagtggctaaagaacctatttctaagcaaaactggtctatactttttttttgagaactcaatactttttgagttatgcgtagttgaaaattggccattttcattgaaaaatgacaccttttcggacggattttttgtgaataccttaaaaactatgcatcgaactaaaaacactatataaaacattatttagattataaataataaagagattcgttccttcgtaaatgttctatttataatacaaaagagatatggtaggtgaaaagagtttgttttttggtgcatgctcaaattggtgtattcaacttgaaataacagaggaacggtaggttttaggtgtataatgctaccaacaccttttgtagtgtttgaaaaggcctttaaaacgagcaccgttaaatgtcggttacattacaaactaagcgagatatggtgcaaaaaaatatatgactaatgtactttaaggaaaaatgaaaagtatatacatttaactccccatccaccataatttaaatgcattgtttttcttctcaataccttttaatatagtgttatttctac

SEQ ID NO: 4958 - DNA, 895 bp, Diabrotica virgifera
aaatttaatttgaaaaaacatttatatagcctaaaaatggggctataccaagaatattatcgtttttcagaaaaagttatgggttgcctatatttaaggagtcaaaatttgacataaatttgaactagattttctcaaaaatggctccaaggaatttgtttattctttgatatatttttgatatcctatcggctaaattgaatgacattagtcagatttcttaactccctataggaggggagttatgaattttttataaaaaaatattcgagtgcccgtaacttcctctgtaatagaaactaaaatttgaaatttggcagacatatatggtactttattatctattatcacaataaattttaccaaaaatatggcttccggttgaaccggaaatgaaaaaaaatcttaattttttacgatactgccctgtatattttaacatattttgaaagaatgcaaaattacctttccaatgacataaaactcgttgctgtagctcaaaaactcgaaaagttacggtaaatagaaattttgctataatcttgtgtgtgtcctctctcacgcgatcatagcagagcattattatagggcagtcaatgagggtatttggctccgaattcatcctactacatcgatgtacttgatattttcacagtaagtagggaatagctcaagaaacaaaatctaccctatataccatggcgcttttatcttggggcggttcccaccccttcaagggaatagaaaatttgttgatcaaaataaggacggaagtggctagacaacctatttctaagcaaaaactggtctatactttttttgagaactcaatactttttgagttatgcgtagttgaaaattggccattttcattgaaaaatgacacctcttcgga

SEQ ID NO: 4959 - DNA, 1400 bp, Diabrotica virgifera
cccttcattccaatcgcaggaaaaacgttaagggcaagaatgcagcaacggattgtgataagaaacatgcaaaacataccatcaaaccactgaaatttataacttaatgaaagaaatgtgcaggaaataaagtttaatacacgaacctatttcttttgagtggtttaagccttttcaagatagccgaaaagacgtcacaaaagattaaatcccatcaacgtcaaaaatataacaatacctgagggctttggaagcgaacacgtcagctctaagctggttcttgagtgcaagagagcaataactgtatgatgttgctgtcacaacagagttacctaccgggtcacccaggtggagagagaaacgaacgggctgacgatgacgctttggcaagacgggactgatccactctccctgtgggacccgaacctgtaattggggtacccttcagtactggtcggggtaatctcaaggagctttttctgtggaggttccaggacttctgagctagttgtggaggtttgaaacaggctagactccacatagtgggaccatccaaaaatctcacagcccaacttcttctaggccgtagaagatgctccctggtggtcaatatgctctcaccgaccactgtagacaccgacggcaccttcatctgcttggattggcggatggctcacgatgccgtctatgtgatgaggaagaaacctcctcacatgtcctctggaagcgcctggtgctggtctatcagaggtgacagattctggtttgggccttgatgcaaaaaggattagatattcggaaaggcaggagctcagatttgaagccccttctgttctagtagatatgaaagcccagagaagcctggaccccagaaacaccgaagatcagatccttatggacctagtccatatgataaagatgatacaatgaacccgccttaggacgtcaaagtgtctgcagggctggctcacaagtgggccctgtcccgatttaccataacgataacaatgcctacaatctgattgataacatgtaattcaaggatttaccaaattacaatgaaattaaaaatcatatacaaaaaattaaaagcggttttaccatatggctgtgatacatagaagatataagtatcagtacaccaaataaaagttttaatcaatagatagtgttacgaaatatccttcgtgtattttggccttaacatccaacaatagagccagaaacatcggtcaccaatttactgttgataactctgcctttgaagtggtggacaaattcacatacttaggctccctgatcaccaaggagaacgtcatgacggaagaaatcaagagaaagataatcctagcgaacaaatgctattttggactgagtagacatatgagaagcagaaactt

SEQ ID NO: 4960 - DNA, 861 bp, Diabrotica virgifera
cccttcattccaatcgcaggaaaaacgttaagggcaagaatgcagcaacggattgtgataagaaacatgcaaaacataccatcaaaccactgaaatttataacttaatgaaagaaatgtgcaggaaataaagtttaatacacgaacctatttcttttgagtggtttaagccttttcaagatagccgaaaagacgtcacaaaagattaaatcccatcaacgtcaaaaatataacaatacctgagggctttggaagcgaacacgtcagctctaagctggttcttgagtgcaagagagcaataactgtatgatgttgctgtcacaacagagttacctaccgggtcacccaggtggagagagaaacgaacgggctgacgatgacgctttggcaagacgggactgatccactctccctgtgggacccgaacctgtaattggggtacccttcagtactggtcggggtaatctcaaggagctttttctgtggaggttccaggacttctgagctagttgtggaggtttgaaacaggctagactccacatagtgggaccatccaaaaatctcacagcccaacttcttctaggccgtagaagatgctccctggtggtcaatatgctctcaccgaccactgtagacaccgacggcaccttcatctgcttggattggcggatggctcacgatgccgtctatgtgatgaggaggatgaaacctcctcacatgtcctctggaagtgtccggcattggactatcagaggtggcagatcctgggatcggcctttatgcagccgagccaggtgagggagttaccgttagtgatgttgattataaatactttcgagtattcgttacaaatcgttacttt

SEQ ID NO: 4961 - DNA, 1792 bp, Diabrotica virgifera
  SmartBlast Evalue=6E-32; Info=Cyclic AMP-dependent transcription factor ATF-4 n=1 Tax=Camponotus floridanus RepID= E2APP4_9HYME
ccacctaagataaccttttattagtgattcgattatatctatgttataagtgaaacaatgattatgtatgaaattataattaataaaaaattattgagatggcatcttacaagtggaatcaatccacatgttagacgccaaacctcctaagcctaataaaatctttcctaagacaactacctacaatacgatcatcattgatacccaagttgacgagaacacaacaataaggcgtgatatcaaggaatctcaagcatctctctcaaatgagcaagcattttgatgattctccctccaggcgtccaatttaaatgcaacatataaaaacaattgtgccgtcaaaaacacgctataaattgccaaaactatataagagaatcaacaaaatcctcgaagttgtatgtttatccctatttactgtaaaaaagatataaaaaatccaaaattaattatcttctgtgtttgttagttgatgagacccttggccttgaagagatcacgcatgagccccttaaggtacttaatttcgcgatttagatcagctatttgacttcccaaatcaacgttcttgtccagaagacccttttcttcactaagaattacctcaatctcggccttcttcttttggcgatacctggtagcagcgttcttgttttgctccttcttgcgaaccttcttgtcctcggtaccgcttttagagtaaggtctggtccttttgcgggatgacttaacaggaagttcgtcgttgtactgttcaattggctctggcatccattccggatcagaagagcagtcgccaaagttgctgctactgctactactgctcggggatccaggactgctgcttccgctactgctccattgcatgtcttccacacgagttctgactagctcgtccacgacggccagctccatagcaatatcgggctgaggagtattaacgggcaaggaatagttgatctcgtagttctctggcagaaattgcttctccggttggacgtaaacatgcttggtttccactggatactgtagaagtggctcgagattggtgagcattggttggctcgggggagactgaggtggagtgagcgtgccatgggagaattccacgacttcgtacacgttctggaattccttgaggaaatattgggtgtcattggagttgacaaactcattcttcaagttttgaacaggtactggaatggcacgcggaggttccacttcgtccaggattggtagtattttttcatcgagaaggaagggttcatctttgatcagttcatctagatccataagattctccagattctcgagtatgtgggaagcgacttccgccttcgactcgaattctgccagattgtcgagttcattgttgagtttgatgtctaattcaaatggggtcgcattatagatagtggcgtcgagaagagcggcctcgtcatagtctgacgacggcgaggccggctcctgtttccataccagcacagaactcattgtggaagaggacggtgctgcttatggtacttgcttcggaaagactttccaataaaagtaaagatagcgattgtgccggaacggcgataaacgaaaaaggcgccatattggctgtcatatttactaggttgtaaggcacacttgcgtgtgcaaggtttttcgcaactagaatcccatggcggctagggtgagcaagagaaaaatcacaacatacacttttacctacccatagagaacttaaaatggccgaaattaaacggacgaggtgtatattctcggtcaacaggtcgaaatgcgc

SEQ ID NO: 4962 - DNA, 1442 bp, Diabrotica virgifera
tacctaaataaataatttttaattcgaaattcatatttttttaactcaaaatctggtatgttttacaatattggttcgtttatatacatattttaaaatattcattacaatatttctactgatttttttcatacatataaaggatggttcatctgtgttacgttaaaacgttctttacgtattttattaaaaactgtaataaattaaataagtaaatatacttattcatatattgaatagattaaaaaatatataaaataatccagtggcgtattttcaaaaggaaaatattcgaataacaaaaagttttaaaacaaaactggaaatactgtaaaatcctttttagctacaccatcaagttaagtcttagtatctatttagcagaaaaaactaaatctataaacgttatctgtttttaagatgaactaaacggtatctggtcttttgggccactgttttttatcatttttatatgtttatacgcttttgtagtcattattaaaggggttaaatagacggttgctgttaaaatagctcaaaaagtgttttttttttaatttttcacatgtgaaaataatattatatttttccctgtatcatttcgataagtttcacactcagttttaaataattacttagaccaactctgaataataattcctattactccccatcctgccccacttcgttagaaatacagacgttttcttagacactgtaaacgaaaaactccctctctttggtctccgaagggaacataagtgttgttctcctgagtttagagcgagaaacctatttatctgagtatttcgagtgaaataactgctatatggttaagccttttttatgaacatgatatgctattttctgtataacatttaattacctctcccaattttttttggaccacgccctcgaatacagtccacaaactctgaaattactataataatttcacatatgtacatgtaattgtacagaacgtttttgataacgtttattctatcttaaaaacaaataatctctattactagttactaggaatagaaggcagatatgtacaattcggggttgatggcaatacggaaaatattaaccatcgtgtattcattacaatttctgcagcgcccttctgatgtcttcggtggctttgttcatattcgccggtgaacctttgtatttgaagtcgtctctggcgtcttcgttgatgtagtcttttggaggttctgtggggtaactgtagccacagcgggagccgctgccgaattttggtcgggggatgtggactctcttaacatcgactaaccaggattccattttgtcttctttgtaatcttccattttcaagtgttcggtaagaaacaaataatgctactatttagatagaacacaatacagtggctattaaaattttcgacaatgttactgctgctgtagatatt

SEQ ID NO: 4963 - DNA, 800 bp, Diabrotica virgifera
tctgaataataatttctattactccccatcctaccccactcctttagaaatacagacgtttttatagacactgcaaacgaaaaaactccctctctctctggttttaactcccgaaggggacatacgtgttgttcttctgagtttagagcgagaaacctatttatctgagtattgcgagtgaaataactgatatatggttaagcattttttatgaacttatatgctattttctgtataacatttaattacctctcccaatttttttggaccacgccctcgaatacagtccacaaactctgaaattactataataatttcacataatatgtacatgtaattgtacagaatgcttttgatgccgtttgttctatcttaaaaacaaatactttctattattacgaatagaaggcagatatgtacaattcggggttgatggcaatatggaaaatattaaccatcctgtgttcattacaatttctgcagcgcccttctgatatcttcggtggctttgttcatattcgccggtgaacctttgtatttgaagtcgtctctggcgtcttcgttgatgtagtcttttggaggttctgtggggtaactgtagccacagcgggagccgctgccgaattttggtcgggggatgtggactctcttaacatcgactaaccaggattccattttgtcttctttgtaatcttccattttcaagtgttcggtaagaaacaaataatgctactatttaggtagaacacaatacagtgactattaaaattttcgacaatgttactgctgctgtagatatt

SEQ ID NO: 4964 - DNA, 1185 bp, Diabrotica virgifera
  SmartBlast Evalue=4E-26; Info=Sorting nexin-16 n=2 Tax= Formicidae RepID=E2AWL8_9HYME
ttttatatgtacctatgttaattactattgtcttgtggcatcttaatggaatgtactattttcattggaaataagacaaaattttactttaaaataagtttatttgacatttagattttcacttcggaaatcgttctcaaaatgcaaaacatcaataaaaatcttgtttttttttttcttgggagatcctcatattatttttagtatataaattaataaaacatctcataaaaaaatttcaaattagccgactttgattacataaaattcatttctaacaataggagaaaagaattggtatcattttggcagtttttggatattttcacactcctgacatttttgacaactcattgaactactaacaagttttcttaaattttcattataaggaatgtaattaattaacttctaaggatcctagggaaacatatttttcacggacttgtttgagataactggtggtttcttcttaggcctcgaatcttgctttggtttgcatatgcactagtttccgaatacacaggaggttaggataggtttagacaaaagaggtccggtatagaaacataggacttgttttgtctaaacgaacgaacctcctgtgtattcagaaactaatgaaaaaaccaaagcagtgttcgagccctaagaggaaaccattagttatcctaaacaataagtctatgagaaatatgtttcccttgattcgttagaagtaaagttgcattccttatcgacgtaaaatgaagatttaaaaaaactcaagaatgagacgcagtcaaaggcgtgacgatcctgccaggatatacttacacccgagagggtagaaggtctaaagattatatataagaatgagacgcgatgaggtcaggtacacttaagataacattaacgagagtctggagaccgttgactctctcctctaaaaaaataggatcgaagttgttctttaaccatctcttccttggtaaatgttgtactatgttaggatgattggttcttaatctagtacacagacgaacgaagtcagtgtaacgccggaagacgtaccaaaagtcaccagtttctttgttttctacttttagtttatatactgtaaatctagcacgttcttccataatctcatatcctacaatgggaatctgtatattattaaatgatataggtccattgggaatctgt

SEQ ID NO: 4965 - DNA, 1040 bp, Diabrotica virgifera
ttttatatgtacctatgttaattactattgtcttgtggcatcttaatggaatgtactattttcattggaaataagacaaaattttactttaaaataagtttatttgacatttagattttcacttcggaaatcgttctcaaaatgcaaaacatcaataaaaatcttgtttttttttttcttgggagatcctcatattatttttagtatataaattaataaaacatctcataaaaaaatttcaaattagccgactttgattacataaaattcatttctaacaataggagaaaagaattggtatcattttggcagtttttggatattttcacactcctgacatttttgacaactcattgaactactaacaagttttcttaaattttcattataaggaatgtaattaattaacttctaaggatcctagggaaacatatttttcacggacttgtttgagataactggtggtttcttcttaggcctcgaatcttgctttggtttgcatatgcactagtttccgaatacacaggaggttaggataggtttagacaaaagaggtccggtatagaaacataggacttgttttgtctaaacgaacgaacctcctgtgtattcagaaactaatgaaaaaaccaaagcagtgttcgagccctaagaggaaaccattagttatcctaaacaataagtctatgagaaatatgtttcccttgattcgttagaagtaaagttgcattccttatcgacgtaaaatgaagatttaaaaaaactcaagaatgagacgcagtcaaaggcgtgacgatcctgccaggatatacttacacccgagagggtagaaggtctaaagattatatataagaatgagacgcgatgaggtcaggtacacttaagataacattaacgagagtctggagaccgttgactctctcctctaaaaaaatagaaattttaaagtaaaattgtgatttattcttaaaaatagtaaatgatattgtttatatattggttttaaacgctttaaaattgttggtgctacttgcgaaatt

SEQ ID NO: 4966 - DNA, 1743 bp, Diabrotica virgifera
  SmartBlast Evalue=2E-20; Info=Transposable element Tc3 transposase (Fragment) n=2 Tax=Camponotus floridanus RepID= E2AKN2_9HYME
cttatcatttatatgcgtagcaactgaaaaacatagaacagcgtttatttgatgtttataacgataataagaaatttgtgaaaatttgttattattgcctttgcaactaacaatggcatattgtttgcttttcataattagtaggtgttcaggtgtgtgtaagtttaatggacactacaccagagaaagttattgcattgaagaaaatgcacttagccacagatatgttgctgtacaactggatatgacactcgccgcggttcgaagagcgttacaactttatgaggagactggatccttttgtagacgacctggaactagtagaaagcgactttacaattattgctcgtgatgatcactttactgtgtcgacaatattaagatcatcaccttaatgtctttcaagtgcaaaaacagctccgtgaagtaataggaatggttattagtcagtggaaacctgacgaaatggctctccacaacaactaatatatttaaagcatcagttaataaaataattatagccagaatgatcgccaatattcgaaacgaatagccaccaaaagaagattagtcagtggagagtaagacgaagaccggatgaaaataatttgactcctcgagtatttgcaattggtcaaaaacttactgcaggtcatcgtcaaacacgcatgcgatttgcacaggatcatctgaactgacgttgggacaatggagttctgctctgttctcagatgaggccagaatatttctctacagtagcgaccgaagaaactctaccgaagacgaggagagcaatttgtagtatgctgcattgaagtgcgaggtccttatggaggtggttcctgcatgatctggggtgcaatttctgtgggggtacgaaccgaccttgttttcattcgtagggtaaccgtcttctcgggcgaggaggtttaacgggtgttagatacatcgaggagattttagcaatgcatgtggtaccttacgttgactactttggaaactaatttatttttatgcaggacaatgcaaggccacatacctcaaaaatcgtgcaagagtacattagcaaagtaggttttctgatcatggaatgaccaacgtgcagtccagatctcaatccattagaacattatgcaatagagcttattgtcgcaatagaagaagagtggcttaacatccctcacgaaacaatagggaacttaattagatatatgcctaatagtatcagcagttattaatgcaagaggaggtcatacgcattattataccgggcgtccacttatattttcccccattttaactgcctacaacttctaaacgactccagacagaaatatgcggttttcgctgaaatgttttatccagtaaaagtccttgtttgaaaggattgaatttttttatatcgcttttaaataaaaaatggaggatttttgaaaaaaaaaaacgttgttgactttttttattaaaacacccagtatattttttgttgtcttgaaagaacggtcatttacctatacagcgatataaaattttttaagatcggttgccaaatgggtgagcaattaatttttaaaatgagagatgcaatgtggaaatcacataacataatatcattttgctcagttatgttatttaggttatgtgatatccacgttgcagcactcattttaaggattgattgctcagtgttttgacaacctattttgaagaacttcatatcgctggataggtgactgacctttc

SEQ ID NO: 4967 - DNA, 477 bp, Diabrotica virgifera
tgtgatttccacatttcatctctcattttaaaaattaactgctcggtcatttgaaaaccagttttggaggtttttatatcgctggagagataaatgaccgttttttcaagtttttaggtaaatgaccattttttatatcgcttttaaataaaaaatggaggatttttgaaaaaaaaaaacgttgttgactttttttattaaaacacccagtatattttttgcgtcttgaaagaacggtcatttacctatacagcgatataaaattttttaagatcggttgccaaatgggtgagcaattaatttttaaaatgagagatgcaatgtggaaatcacataacataatatcattttgctcagttatgttatttaggttatgtgatatccacgttgcagcactcattttaaggattgattgctcagtgttttgacaacctattttgaagaacttcatatcgctggataggtgactgacctttc

SEQ ID NO: 4968 - DNA, 1442 bp, Diabrotica virgifera
agatctgatattaagtctttagcactctttaattaggttttgcgctatcatacttgagaatatcttctaatacagtttttgttcgttcaatttccttatctttgactgatttaacaacatcgtcaaatgtatattcttcttcatcagaatctactgttacctttttaacctgtttatctgattctttttcttttctttcctcgtcttcattttcctcctcagaatcaatgttaacaagattactattattaattgaaccgggactcttttggccgtgtttcgagttcggcttatcttcatcatcgtcgttttctgtttctttttgatcatctttatctttagaatttgaatctaaactgacaaatttccttaatttttccactcggtcaggttcttggagctctagcttttttaaataatttattagattctgttgttcttcagtcgaaagatctttgaaattctgtaaaagtgtctgtaaatctgaatctgataggttttccatattacttgtagtatttttccccggactttgatctaagttagcgttttctttattttgagatcctggaccggtcatcatttgtaggaatcctgcagttgttacaggcttagttgtaactttcgatgcttctgccatggcaaccactgcatttataagttgttccaattcagcttgtgttacatctgtttttccttgagctacaagcgcgttggcgatttgtctagcaatagcagctttatctacgccaccactagagttttgtccgaaatcctccctagaaagaagtttttctcggtttttctttctttgaccagcctcgtgcattaaagccgctatcttctttatagcttttttgaatgctcgttgttgaatatggtctactagcccagcaatcatttgacctttcaattttccttcactgtttcaaataaaacacaatttatatcattgtcaagtaactgatccgagctattggcctcatttttttccaaagccaatgcttgcgctaaaagatcaataactttagggcctaaggatcctaaacgatcttcgagtgcagtaagaatacgaagaactacgaccacattaatttctgtattgtcatcctcttcttctggagaaggaagcctcacatccatgggaattctttcacgcataattggcatatggtaaggatgtggtctaacattccaaggtaaatcagctacagttcttattctatcttttcctttcaaatctctttcaaacgaggtttccctcaccggtttctttctttcccaactcctctctctggatttggatcttcgacgtactggtgaatttttaggaagagatcgatttctggaaagtgatcgatttttggaacgaggatttctggaacgggagcgatttctggaacgggagcgatttctggaaagggagtgattcctggaacgag

SEQ ID NO: 4969 - DNA, 732 bp, Diabrotica virgifera
agatctgatattaagtctttagcactctttaattaggttttgcgctatcatacttgagaatatcttctaatacagtttttgttcgttcaatttccttatctttgactgatttaacaacatcgtcaaatgtatattcttcttcatcagaatctactgttacctttttaacctgtttatctgattctttttcttttctttcctcgtcttcattttcctcctcagaatcaatgttaacaagattactattattaattgaaccgggactcttttggccgtgtttcgagttcggcttatcttcatcatcgtcgttttctgtttctttttgatcatctttatctttagaatttgaatctaaactgacaaatttccttaatttttccactcggtcaggttcttggagctctagcttttttaaataatttattagattctgttgttcttcagtcgaaagatctttgaaattctgtaaaagtgtctgtaaatctgaatctgataggttttccatattacttgtagaatttttccctggacttggagttaaaggctctgtcagttgatctaagttagcgttttctttattttgagatccagaaccggtcatcatttgtaggaatcctgcagttgttacaggtttagttgtaactttggatgcttctgccatagcaaccactgcattaataagttgttccaattcagcttgtgttacatctgtttttccttgagctacaagcg

SEQ ID NO: 4970 - DNA, 1393 bp, Diabrotica virgifera
ttataaagtaatcctgggtgccataccttatcaaatgcttggctgatgtccagaaaggctgctgtaaaacttagtttgtagttaacgtaataaaatcttaacaaacattcacctaatctagctccctcttctcttaccacgaaccttagcttttttatggataaatctagtattattatcgatatctcgaaaccttttttattattgaggttgaaaggttctaaccgactagggaagatgtaactatactaatgtcacaatcaggatgcactagaggtgagcaagctaagacacgttgactgttataaggaactcttgaatcatgatttacaatgtataaactctgtaaatcatcatttgggatttacaatgtatatacattgtaaatcatgatttaggagggctccttgtaacagttgatgtgtcttggtttgtttactcctggtgcatcctgattgtgattgtagtatagcactgttgcattcgattcggaaagaaacacatgcaagaagataacatccaaggtatggattatagggcttttcattcacagtcatttgtttcgagcttctgtcatgtgtcacataatattaatatatctacgtcatacgttattggtatataccttgacacaaaccaaagacgtatgacgtggatatattgatattacgtgacacatgacaggaggctcgaaacaaatgacaatcgatgaaaagccctatatgcgccgcatgcaaccctgatcagttgcctaccaactgaaaccacccattcttcggacaaggcaccctctaacgaattttatcggtgactgcacaaagcattgggatgctttgtgtagtctgaaaatttgagaaaaaactggaaaaagatttttaattaaaagataaaaaccacttaaaataacatacaaagagatgaatgggaaacgtatccgttatgacctgtagggcagtagcagaagtagtccggtacgcgttggccaccttagtaggggatttttttcgtgcttttgtaagcagttctttatgtttaggtttagccattctcaaaactgtgtaccatatggaggtaagagagtggatactacaaactgaaggtacattcttcttttgagggcagtaggaccgcggatgtttggcataatttttatgaatttcgcggttctctctcagtacataggctttatccttgtattacctattacaaaagtcagatttgaacgggctcttgggcctttcaagataaagaatatctgtttttttctgttgccaactctagatcttattttaccatccaactgttgacttttctgaagcttctgttgactagcctttctaattccaatatatctcgaagcctagagctaaattgaaacaaaaaaacaaacttt

SEQ ID NO: 4971 - DNA, 809 bp, Diabrotica virgifera
ttaacgtaataaaatcttaacaaacattcacctaatctagctccctcttctcttaccacgaaccttagcttttttatggataaatctagtattattatcgatatctcgaaacaaatgacaatcgatgaaaagccctatatgcgccgcatgcaaccctgatcagttgcctaccaactgaaaccacccattcttcggacaaggcaccctctaacgaattttatcggtgactgcacaaagcattgggatgctttgtgtagtctgaaaatttgagaaaaaactggaaaaagatttttaattaaaagataaaaaccacttaaaataacatacaaagagatgaatgggaaacgtatccgttatgacctgtagggcagtagcagaagtagtccggtacgcgttggccaccttagtaggggatttttttcgtgcttttgtaagcagttctttatgtttaggtttagccattctcaaaactgtgtaccatatggaggtaagagagtggatactacaaactgaaggtacattcttcttttgagggcagtaggaccgcggatgtttggcataatttttatgaatttcgcggttctctctcagtacataggctttatccttgtattacctattacaaaagtcagatttgaacgggctcttgggcctttcaagataaagaatatctgtttttttctgttgccaactctagatcttattttaccatccaactgttgacttttctgaagcttctgttgactagcctttctaattccaatatatctcgaagcctagagctaaattgaaacaaaaaaacaaacttt

SEQ ID NO: 4972 - DNA, 1338 bp, Diabrotica virgifera
cttattacatcattcttaaggttatcgatggttagcagcttttttattatcgtgctgaatccattaattgcagaataatataacataaaatacttttcgttacctagattagaaaaatctactgccatatatattatattataacttagcaccttttcgatatttattaaagttcctgccaaaattgcgtattccattgcggattttccaagaacattatcactttcattcaacaacaatttgtgaacagtagatgtatcagaagaatgatggttatcactatcatcaaaatactggaaaaattttacaggctgtttatttttgctgtagtttctattatgaaaatgttgaaaggtaaggtatatgttaatatcgtagctctcaatgggaattccaagtacattgttagcagaaaaaagtgcatttggttcatcttgattgagtttagttggttctatttgggatacctttagaagaattgtattatctctgcgagtaatagtagtatcttccggtttttcagttttagtatgaatatcaaatgtcttcccgtagctcatagtatagtgtaattgatttcttccaattaaatcggaccaatacgtgcaataaccattcgtaggtaacaaaatatgtttaggatattttaaattttttaacaaaatcgtatcaaggaaccatcttgttgttactagtcgttctgtgtatatttttgtgtacatggttttaacgtcaacccgcgtattcatattaaaatgctcacttagccactttgcagccagaaattcagcgtaagttttgtggctgaatactggaagagacacttcgagggactctgtaagtaaatttctcttatttgctttttctaacattttaacatgtactttaaattcactccactcaattgctattttaactacattttctgtaaaaatatttgctaatgctaatttgcaaacagtatcatacacgaattgaggctctagattagttaatttctttaaaacggtattgatatattgttcatacaaatcaattgtagattttacttgagcgtctttgttatcttcaaagattttggcaagcatcatagtttgttggcataatccaatatttgacgtttcaaatagactaacattgcttttaatatcatctaaccttttggaggcatctttaattttatactccctaaaaaaattcacaaaaaagctatcttggtctttagccgtgaactcagttaactcaaatgaaattactccaaaaatattttcgtaccttttttatgatgcgatcttgcaacaatcgataatcgtaatccaaggtatatcgccgttttaa

SEQ ID NO: 4973 - DNA, 869 bp, Diabrotica virgifera
tttaaaagcagttcattacttcggcgaataatagtagtttgttctggattttcaatttgagtgtgaatatcaaatgtcttcccgtagctcatggtataatgtatctgatttcgtccaatattatcggacaaatacgtgcaacaaccaatggtaggtaactgaatattttagtatggtttaaattttttattaacatcgtatcaaggaaccatcttgccgttaccaattgctctgtatataaatttttataaatgattttaacgtcaacccgcgtattcatattaaaatgctcacttagccactttgcagccagaaattcagcgtaagttttgtggctgaatactggaagagacacttcgagggactctgtaagtaaatttctcttatttgctttttctaacattttaacatgtactttaaattcactccactcaattgctattttaactacattttctgtaaaaatatttgctaatgctaatttgcaaacagtatcatacacgaattgaggctctagattagttaatttctttaaaacggtattgatatattgttcatacaaatcaattgtagattttacttgagcgtctttgttatcttcaaagattttggcaagcatcatagtttgttggcataatccaatatttgacgtttcaaatagactaacattgcttttaatatcatctaaccttttggaggcatctttaattttatactccctaaaaaaattcacaaaaaagctatcttggtctttagccgtgaactcagttaactcaaatgaaattactccaaaaatattttcgtaccttttttatgatgcgatcttgcaacaatcgataatcgtaatccaaggtatatcgccgttttaa

SEQ ID NO: 4974 - DNA, 1143 bp, Diabrotica virgifera
aatttcagcaagtgagtcgattgttttgctctcgagtgtattataaatgggaaataatttattgtttatagtttaattgtggtttatttcccatttagaatagttgattacaaaaataccacaaggaaatagcttcagaacattttctcatactatcgtagagtcgtaaataaagtcttaccataccaagttgtgaaatcttgtccggaacactgaagccggtcacatacgagatgactgtttccgtaccacgtgcctcgcgttttgactgttgcgaaatcgtgtatggcgtcactcccgaattactgttcgtgcacgtattgctattgttcgtttcagcccaaaaaaaaaggctggaccgtcaagagatgagcggtaccgacttgatacgtcgaaagatcgtggcgaagagattgcaccctcacgtgtgagtgctacttgttgaccgtcgaacggctgatgagagagagaagatttcttctgtcccgaatccaaaattgtctgtctgtaggggtaaaggtaaaattaggaggagatgaaatggtactattgaaagggctggcttaagatttatttaaattgagagttgtaataagagatttaatgcagtaaaaaatataagaatattttttgcatgtgaaaattgaacacatgcattcgaactctgctgttactgtaaaatactcagcatatcctacatgaaccataccacaaatgcggaagtattgcggaggttgaacaaggaaagagagcttatgcttataataaaagaacagaaaacgcaatattttttcacatcgtgagaaatgaacagtatgaactgctctaacttcgaaggtaaaatcattagcaaaacgggaccaggaagaagacgcaactcttgtttaaaaacctatgacaatagatgaatgtgacttccatagaactattcagggccgctgccaataagattaaatgtgcaaatgtaatggccaacgtccttaaggacaatgcatcgtatgaagaagattaaactaatatcaatataaacaacacaaaggtattaatacacagaaaaatgttttctgtggttaaagaatacattttttgctcataggcatgacatatcctgagagagttcatgtgtcttagtgcgcgtgatga

SEQ ID NO: 4975 - DNA, 1064 bp, Diabrotica virgifera
aatttcagcaagtgagtcgattgttttgctctcgagtgtattataaatgggaaataatttattgtttatagtttaattgtggtttatttcccatttagaatagttgattacaaaaataccacaaggaaatagcttcagaacattttctcatactatcgtagagtcgtaaataaagtcttaccataccaagttgtgaaatcttgtccggaacactgaagccggtcacatacgagatgactgtttccgtaccacgtgcctcgcgttttgactgttgcgaaatcgtgtatggcgtcactcccgaattactgttcgtgcacgtattgctattgttcgtttcagcccaaaaaaaaaggctggaccgtcaagagatgagcggtaccgacttgatacgtcgaaagatcgtggcgaagagattgcaccctcacgtgtgagtgctacttgttgaccgtcgaacggctgatgagagagagcggttcacgctttggcgggtgtacgagaagagaggttcttaatcccaaaattgtccaaatattgtctattggaagggattgaaaaatataaaaatataaagccagtaaaaaatataatatttttgacatgtgaaaattgaataccatgcatgaccttattttggccggcagtgaaagtcggaaggaacgtgtatattgaaaacgctgtaaaacgttttgtagtttatcaattttattgctgtaaagcagattcttctttttcaattacgtattaatgtaagataaaagttgactaaagatttaataacaataaatgcataaaatttgttaattgcataaaaattaatatacttaaaatattcaaaatttcgtaaaaatacattcaaaaagtacttaattctgcataattctgcgattaatgttattaatgcgattaatctcaaaatgtacagtcagaagatacagaaccacattggtttagctgcctttaactgcctatgcattgcttgcagttgtttgaatacaaaagtgtgaaatgaagcatatatattacatgattctggcgattgttacttatgtatgggccgttgtacc

SEQ ID NO: 4976 - DNA, 1216 bp, Diabrotica virgifera
  SmartBlast Evalue=1E-24; Info=Reverse transcriptase n=2 Tax= Ostrinia nubilalis RepID=A4KWG0_OSTNU
atggacgtcgaaacgttagtagaatcatttttttggtaaaactgtggcttatttaacattaaaaatagttcattgcaaaaatgccacaagaaaatagcttcagaacaacattaagaactagtatttaatcggtgtttatagatttgcatgctaaaaaaataatagatggcgatgtacggttgaaaacgtttttagggttgaagagaagcataagagaggagaagtaatttgtttcctaagttaaccctgttgcgaatctcagctgtttgaatgtagtaaatctaggtagctgtatgattactttaagtaggagcaaaatttcgcaccgatgtgttttaatatgtacatacatacataatcgaaaacctcttatacccgtaggtgtccaggctttcttaaattttgtcgacaaatttacgccactcttttctgtctctagctagttccttcgcctcactccatgtcttccctctttcttcgagaatctcatttatgcttctgttccatgtttttcttggtcgtcctctacaatttttccctattcttctcgcctcccatatcttcttcacctgtctagtttcgttcattctgatcatgtgtccccaccatttcaatttcttttcttctgcttttacctttagtgttttcgttcctagttcttgtctaatgtcttcgtttcttcttctgtctgttcttctaacactcagcactttcctcaagtatttaatttcacttgcttgcagtcgctttgtttgtccttcgtcaagtacccagttttctgccccataggttaatacaggttggtttagtttttgttgttatttcttttctgttcaagaagtttttgtatagtgcatgatatattcaagtgactcagagagctatggaacggagaatgctcaacattaagctcagtgatcgcaagtccaataaagagataacaagacgatcaaaagtaacagatgtgatccagaaggttgccatgttaaaatggaactgggcaggacacataggaagaatggaagacaaccgctggacaaagcgaattctcgagtagcgaccaagggcaagcaaaagaggtagacctcagacaaaatggactgatgatatctcaagagaatggctgacaacgaatggatgcaaaaaacagaaatcagatacgaatggacacacctaagggaggcttacatccgacgatggatgatgatgatgactg

SEQ ID NO: 4977 - DNA, 974 bp, Diabrotica virgifera
  SmartBlast Evalue=2E-12; Info=Putative uncharacterized transposon-derived protein F52C9.6 (Fragment) n=2 Tax= Camponotus floridanus RepID=E2ALS0_9HYME
atggacgtcgaaacgttagtagaatcatttttttggtaaaactgtggcttatttaacattaaaaatagttcattgcaaaaatgccacaagaaaatagcttcagaacaacattaagaactagtatttaatcggtgtttatagatttgcatgctaaaaaaataatagatggcgatgtacggttgaaaacgtttttagggttgaagagaagcataagagaggagaagtaatttgtttcctaagttaaccctgttgcgaatctcagctgtttgaatgtagtaaatctaggtagctgtatgattactttaagtaggagcaaaatttcgcaccgatgtgttttaatatgtacatacatacataatcgaaaacctcttatacccgtaggtgtccaggctttcttaaattttgtcgacaaatttacgccactcttttctgtctctagctagttccttcgcctcactccatgtcttccctctttcttcgagaatctcatttatgcttctgttccatgtttttcttggtcgtcctctacaatttttccctattcttctcgcctcccatatcttcttcacctgtctagtttcgttcattctgatcatgtgtccccaccatttcaatttcttttcttctgcttttacctttagtgttttcgttcctagttcttgtctaatgtcttcgtttcttcttctgtctgttcttctaacactcagcactttcctcaagtatttaatttcacttgcttgcagtcgctttgtttgtccttcgtcaagtacccagttttctgacccgtatgttaatacaggttggtaccctgtttggtatacgatgtgttttaaattaattcatttttttcgaatcctgaaaaaataataagtatttttgaaaaatttgagctcagaatgaaagattacattattaccgagggccgaaaatcccttggaataactaaaaagtttctttgaatgcgatatttgaaa

SEQ ID NO: 4978 - DNA, 1111 bp, Diabrotica virgifera
  SmartBlast Evalue=3E-51; Info=Thioredoxin domain-containing protein 9 n=4 Tax=Lepeophtheirus salmonis RepID=C1BUE4_9MAXI
tgtttctttacttaaatcagtataaaaaaattaaaaagcatatgtgttacatgtgtacgtaatattaggcatccaaaacttaaagttaaacaaacactggttggaatcaataaagtggagatctaataaatattaaggaataaacattgtaacaaaatatcaacattatttcaattatagtttcagtattataaaatactttatataaatatactctaggcaccttatccattagcatattcactccactttaatctatacccaactcagctgcctcttctggcgttaactctggaatatcatttttgagtctggtttcagatttggcagattccctcattatgccatactcttctatatctaaatcgtcatcatcatcatcatttctgctcctaattgttttgaaaattttctttttctcttcagtatgatctgggggtatcgataggtctccttcatactttattacaccattttgggctattctccattcaagtatgtctgttgtaaattcgtctgtgttgcccaactggctgaaacctacaatcttgtctaccataacaccattttgaataagaacaatggtgggtaacgttttcactttcaatttttcaactaaaaacggacatttttcggcatctaatttagtaaacctggtttcgatgtgcttgggagcaagaatctttagatgtttgtctacaattttgcatctgagggttgaatctctatagaaatgtatgataacattttcagacttcttgatgaggtcgaaaaacattttctcctctgccaattcttcgtatttcccatggtcacgacttaaccatatctttttctgttcttctagcttcttcagttcttttattctatttatttttagctgttccaggtcattggtgtccaaattgtctatttggtctattactgcatcaacttgcttttcgatagcttgcgttactctcaataaattattttcaacggcgtccattttttggttgatttagtaacgatttactttaaatttacttgttttaaaaggtaaatttggaccgggtgtttatttatggatgcatggatacaaagaggttaccacagtacatgacgaggttac

SEQ ID NO: 4979 - DNA, 1075 bp, Diabrotica virgifera
  SmartBlast Evalue=3E-51; Info=Thioredoxin domain-containing protein 9 n=4 Tax=Lepeophtheirus salmonis RepID=C1BUE4_9MAXI
tgtttctttacttaaatcagtataaaaaaattaaaaagcatatgtgttacatgtgtacgtaatattaggcatccaaaacttaaagttaaacaaacactggttggaatcaataaagtggagatctaataaatattaaggaataaacattgtaacaaaatatcaacattatttcaattatagtttcagtattataaaatactttatataaatatactctaggcaccttatccattagcatattcactccactttaatctatacccaactcagctgcctcttctggcgttaactctggaatatcatttttgagtctggtttcagatttggcagattccctcattatgccatactcttctatatctaaatcgtcatcatcatcatcatttctgctcctaattgttttgaaaattttctttttctcttcagtatgatctgggggtatcgataggtctccttcatactttattacaccattttgggctattctccattcaagtatgtctgttgtaaattcgtctgtgttgcccaactggctgaaacctacaatcttgtctaccataacaccattttgaataagaacaatggtgggtaacgttttcactttcaatttttcaactaaaaacggacatttttcggcatctaatttagtaaacctggtttcgatgtgcttgggagcaagaatctttagatgtttgtctacaattttgcatctgagggttgaatctctatagaaatgtatgataacattttcagacttcttgatgaggtcgaaaaacattttctcctctgccaattcttcgtatttcccatggtcacgacttaaccatatctttttctgttcttctagcttcttcagttcttttattctatttatttttagctgttccaggtcattggtgtccaaattgtctatttggtctattactgcatcaacttgcttttcgatagcttgcgttactctcaatagattattttcgacagcgtccatttttttgatgatttagtaacgatttactttaaatttacttgttttaaaaggtaaatttggaccgagtgtttatttatggatgcatgg

SEQ ID NO: 4980 - DNA, 1346 bp, Diabrotica virgifera
  SmartBlast Evalue=1E-101; Info=Probable Xaa-Pro aminopeptidase 3 n=1 Tax=Harpegnathos saltator RepID=E2BM74_9HYME
tgtgatggaaactgtcacaaaatacctaacctaaaatgtataaatcctaaacataaattttcttttctaaaactactgtgatattaaattaaagtatgtgtgtattgctttcattatcatctctgtccataaaaaacggtcttagaagcttctgcaaccaagcttcaagattaggtaaagatgttaataaatgtgccaaaaaagtactgggacaaccaacatttgatacccatccacatattatgaatgaaggagaagtaactccaatgatcaccaaatatgagtaccaaactagaagatcgaagttgatagattctcttacaaagttttcgttaaacaataatttaaaaacaaagaatcatatggtgattataccagctgcttcaaaacagtacatgtctgataaaatcccatatgttttccgtcaaaacacagaattcctctatttgactggctgcttggaacccgactgttgtttagtaatcactattgatgaaagagggaaattttccacagtactgtttaccagggacaaagatgatcacgcagaactctgggatgggcctaggacacatccagaagatgctacgatttttttggtgtgagcgaaagtctacccattagtgaatttgaaaagtatatatattcctaccaaaaatctcagaaacagctaaatttatggtatgattttctaacaccagtacagaaaaatattcattcttatataaaaaatttcatgcaagatacaagtaataaacaatgggaaaatcctaaaccacttctacaaaaattgaggttgtataagagtcctgcagaaatagctctgatgcagaaggcatgtgacatcaccgcagatgcttttatggacacgatatcactttcaaagccaggtatcggtgaaaaccatctgtttgccaaatttgactatgaatgtcgtgccagaggagccgattatctagcttatcccccctgttatagcggggggtaatagagctacaactattcactatatcaataacaatcaaatagtagatgcgggtgagatggtacttatggacggaggttgtgaatatcatggatactctagcgacgttacgagaacttggccagtcagtggaaaattttcaaaagaacagcgacagatatacgaagtggtctatgatgtaaataatgaactgatagcaatgtgcaataagtttccatccctcgatacattgtttgaaagtatgtgttatttattgggaaaacgattacaagaagtaggattattaggagctcagccatcaaataactttttgatgaaggccgcgtaccagttgtgtcctcatcacgtctcccatttattt

SEQ ID NO: 4981 - DNA, 824 bp, Diabrotica virgifera
  SmartBlast Evalue=4E-57; Info=Probable Xaa-Pro aminopeptidase 3 n=1 Tax=Harpegnathos saltator RepID=E2BM74_9HYME
cctaaatatacaaaaaaatatataaaacaaaaaatagtaggtactttggtaccccccaaaaaaatttttttttcagcttttccactttccagatcggccggcatcctaggccgatcatttctttttgaaggcactttttaatatattggttgtttttaggtatgattttctaacaccagtacagaaaaatattcattcttatataaaaaatttcatgcaagatacaagtaataaacaatgggaaaatcctaaaccacttctacaaaaattgaggttgtataagagtcctgcagaaatagctctgatgcagaaggcatgtgacatcaccgcagatgcttttatggacacgatatcactttcaaagccaggtatcggtgaaaaccatctgtttgccaaatttgactatgaatgtcgtgccagaggagccgattatctagcttatcccccctgttatagcggggggtaatagagctacaactattcactatatcaataacaatcaaatagtagatgcgggtgagatggtacttatggacggaggttgtgaatatcatggatactctagcgacgttacgagaacttggccagtcagtggaaaattttcaaaagaacagcgacagatatacgaagtggtctatgatgtaaataatgaactgatagcaatgtgcaataagtttccatccctcgatacattgtttgaaagtatgtgttatttattgggaaaacgattacaagaagtaggattattaggagctcagccatcaaataactttttgatgaaggccgcgtaccagttgtgtcctcatcacgtctcccatttattt

SEQ ID NO: 4982 - DNA, 1265 bp, Diabrotica virgifera
  SmartBlast Evalue=1E-44; Info="Cytospin-A, putative n=1 Tax= Pediculus humanus corporis RepID=E0VU96_PEDHC"
agtctgaagttgctcatttaaaggagcaactagctataagcaagaacgaaatagagaaattaagagagcaagtgtcgattttgcaagaagagtgcaaggtcactcgaaataacgcaaaaaccacacagtctgatttggagtacaaatgcgagaagttggtgaaggagaagaatgggttaaatgagcaactacaagaatttcaagaggctttgaacgaagtgcaggttcaaagccagtgccagcttgaggataagaggcaactttcagctgtattgtctgagactcagagaaatctcagcgaagcggagaggaagaatattatattggaaagcgaagtggacgaactgaaaaaacaaagagctgacgagaatgaagagtgggagaaattccaagatgaccttctgacttcagttagagttgccaatgatttcaaaactgaagcccaacaagaattgcagcgcatgattctggaaaataaacaatacagagacagagaaagacaactaaaagctgaaatagacaaactaaagggtggaacgttagattcgaccaacaaagagaacttagaaatggatctgcttgtaaagcggcctaataggcgcggccgagaacggcccaggcaaaattctggaaatgcttcttccagttcaaagtcagataaaacaacgcctccaccgtcccaagctaatactgttcgaagaagagaaaacagatcgttaaaggcgaagcgattaaagactctatcggtggaagaagaaatgttgctgaaatcactcaacagttaccatgccgatatagacaaaaccataccagatgagtttctcacagaggaacagaaagtcatcagaaaactaaaaataatatacgaagatgactacttaaaagttaaaccggtggctccgaagccaaagaaccagctagcgatcagtaaaccactacttgattcagttctgactaatcccaaactaatggcaatcttgaaaaatccaaaagtaaagaccatagaagacatggcgtcgtttgagaaagaagccccagaaatcagacacattatcagagacatagatagagccgcgagaggaaagagcgaagattttaccagatcagaaaaaagaatttctcttgttggtaggagtatgagtatggatcaagtacatgagatggaaaaccttaacaaaaatttaagattatataggacagtggaaactgaagatctaacagaagaaaatagtcctactattgaacaccgagtatcaagcttagta

SEQ ID NO: 4983 - DNA, 905 bp, Diabrotica virgifera
  SmartBlast Evalue=7E-52; Info="Cytospin-A, putative n=1 Tax= Pediculus humanus corporis RepID=E0VU96_PEDHC"
agtctgaagttgctcatttaaaggagcaactagctataagcaagaacgaaatagagaaattaagagagcaagtgtcgattttgcaagaagagtgcaaggtcactcgaaataacgcaaaaaccacacagtctgatttggagtacaaatgcgagaagttggtgaaggagaagaatgggttaaatgagcaactacaagaatttcaagaggctttgaacgaagtgcaggttcaaagccagtgccagcttgaggataagaggcaactttcagctgtattgtctgagactcagagaaatctcagcgaagcggagaggaagaatattatattggaaagcgaagtggacgaactgaaaaaacaaagagctgacgagaatgaagagtgggagaaattccaagatgaccttctgacttcagttagagttgccaatgatttcaaaactgaagcccaacaagaattgcagcgcatgattctggaaaataaacaatacagagacagagaaagacaactaaaagctgaaatagacaaactaaaggtaaccactgagccagtacctctgagaccatcgagttttcccggtgaagaagtggctttgagaagaaagaatattgtactgagcagacaaaacagtagacagtccgtgaagtcgctgatcgagagtatagagagccaagggaagccagtttcttccaagacagcaatcaccagtgtttcgagaagcagttccacttcatctgtcaactcagtgacgtctgatatcagaagtccttccagcccctccatattgccgacgccttctccagcgtcgccaatgaggacgcccgaatggtcggagataaatacgaatgtgactcaagttaaaacgcctttgaaggaacaacaaccgaataagttgaatagagaatggagc

SEQ ID NO: 4984 - DNA, 1139 bp, Diabrotica virgifera
  SmartBlast Evalue=1E-65; Info="Aquaporin AQPAe.a, putative n=1 Tax=Pediculus humanus corporis RepID=E0VGZ9_PEDHC"
aaagttttgttaggtatatttaaataaaataaaattatttataattaacaaaaaattacgtagttaagaactaaaattattgatgagtattaaatttataagtcgtatgattcgtcttttcgtactttaaataagatcttgtagataaccccagcgagacctcctccaagcagaggaccaacccagtagatccagtgatgatgccaatggttcatgattacagctggtccaaaggaacgagcggggttgatacttgatcccgtgtatggaattccagtcaaatggcaagcgactgcagctaatccaatagccaaaggaccagatcccttcaagtcttttcggtaggcatcgcaaactccttggatgacaagtaggaacatgaacgtcaaagcagcttccataaccattccttgtacgtcagataagctatcgtgggtatcggtgagtccaaaggctccaactttagagtcaggaacaaccaacttcaataaaccagatcctccaatagctccaatacattgaacaactaagtaacacaagcctttaacgatcttaacatctccagtacaaacaaagctgaaagtgacggcaggattaatgtggcctccactaacatgagctatcgcctgaacaacagtggctatcgtcagaccaaacgcgaaggaaattttaataattgccccaccatctccttcgatcatatttatacaggaaccgcatcctatgaataccaggaggaatgttcctaggcattcggcgagaagtgccttccagatgttcttgttttttgtgaactcgctcacaccaagaattccatcgtcagattcatctggtagttcgtgcctccgagttggcacaatcataggagttctgttactcatttttgcagaaactaaaccacaactgcttcgaccgatcgaaagtgaatgtttaaatcgacactataattctataatccaccggtacagaaacttgtaacattaaaataataaaggctagagatgacatcaatcaggtatgtatcatttcattaatatcggcaatgattgttttctgaagtggtcgatatgatgtttgttattaacgacgcgctgctaataattttctactactttttgaaggaaatacggtattttgat

SEQ ID NO: 4985 - DNA, 1040 bp, Diabrotica virgifera
  SmartBlast Evalue=9E-66; Info="Aquaporin AQPAe.a, putative n=1 Tax=Pediculus humanus corporis RepID=E0VGZ9_PEDHC"
aaagttttgttaggtatatttaaataaaataaaattatttataattaacaaaaaattacgtagttaagaactaaaattattgatgagtattaaatttataagtcgtatgattcgtcttttcgtactttaaataagatcttgtagataaccccagcgagacctcctccaagcagaggaccaacccagtagatccagtgatgatgccaatggttcatgattacagctggtccaaaggaacgagcggggttgatacttgatcccgtgtatggaattccagtcaaatggcaagcgactgcagctaatccaatagccaaaggaccagatcccttcaagtcttttcggtaggcatcgcaaactccttggatgacaagtaggaacatgaacgtcaaagcagcttccataaccattccttgtacgtcagataagctatcgtgggtatcggtgagtccaaaggctccaactttagagtcaggaacaaccaacttcaataaaccagatcctccaatagctccaatacattgaacaactaagtaacacaagcctttaacgatcttaacatctccagtacaaacaaagctgaaagtgacggcaggattaatgtggcctccactaacatgagctatcgcctgaacaacagtggctatcgtcagaccaaacgcgaaggaaattttaataattgccccaccatctccttcgatcatatttatacaggaaccgcatcctatgaataccaggaggaatgttcctaggcattcggcgagaagtgccttccagatgttcttgttttttgtgaactcgctcacaccaagaattccatcgtcagattcatcccctgttctacccatttttgtaattacagaacactctagaggtaacacagactaaagcgcgaaaaacgtgtctaaagcgccggctgtatggctccaacctccaacagaaaacttcaggaaaatcaagtgcgcccgacttcgcgaaacagttgaatgaagataacgcttttattacgatcagtggtacttgtcaagtacgtatatgttgcc

SEQ ID NO: 4986 - DNA, 1145 bp, Diabrotica virgifera
tgtagggaggacaaggtataaatgttgatatacatcgaaatcgtattgtagtcttatgttttgtgaacattttgttttttgaatgtccctgatatctttagaaacatagaaaatggacggtttatttctttagcatgacatgttttagctgaaacaaaactaaattaacaataaaaaataagagctaacaaacctttaaaaacagagaggcatataacgttaacaattctggtcgaaaccttaagatatatttgtcgaacaagtaagcggtattcacagcgcaacataagagagacgagattgtttaatagaggctctgtgatgttttggggtggactttccttgagagtgagtacggatttggtgtctacgtggaggctctttaaatagcgagaggtacattgcacagattttctttatttgaacactttgttcctttcgcactatatatagaaaataatttcatcttagtgtatgataagacataacctcctcacgtatcgcatgtcatctgttaaaacacatattaaagagtaaaaccgtctagtttctttgttattaaagatatcagagaaactaaaaaaaaatgttcacaaaatatgggagtacaacataacttcaatgtatccacctttgtacgttttccttcctacagggtgtctcaaacttttgtttcagttaaaacacatgttaaagaataataccgtctatgctccttgttgctaaagatatcagtggtattgaaaaaacaaaatgtttttgaaatattttcttaatatcattcgattagaaattaaaaaaaatgtttgttatatctatgtttttgggaaattcttatttgaccggcctcaagaggccgcagcctctcggtgattgccccgattcatttatatggccagcacgccattgtttctactcaataatgcgcgcaataatcaggctaaatttgaccgatggttttgaggattctatagtttatgcaaggttcacaccaactcgacttgagataatcatgcgctaaaattccttgtgcagaatatccaatgtatcataataagcagtatggaaaatagctaaacgcggaccctacaaaactaatattttttatttttattttaaatacttcttcactcaaataataataa

SEQ ID NO: 4987 - DNA, 1031 bp, Diabrotica virgifera
tgtagggaggacaaggtataaatgttgatatacatcgaaatcgtattgtagtcttatgttttgtgaacattttgttttttgaatgtccctgatatctttagaaacatagaaaatggacggtttatttctttagcatgacatgttttagctgaaacaaaactaaattaacaataaaaaataagagctaacaaacctttaaaaacagagaggcatataacgttaacaattctggtcgaaaccttaagatatatttgtcgaacaagtaagcggtattcacagcgcaacataagagagacgagattgtttaatagaggctctgtgatgttttggggtggactttccttgagaataagtacggatttggtgtccacgtggaggctctttaaatagtgagaggtacattacacattttttttctttaaacactctgttcctttcgcactatatgtagaaaataattttatcttagtggcatgacaagacatggcctcttcacgtatcgcatgtcgtcagttaaaacacataccaaagaataaaaccgtctagtttctttgttattaaagatatgagcgaaattaaaaaataaaatattcgcaaaatatgagactacaacataatatcgaaagatatttctttgtttccacctttgtttctttttcctccctacaaggcttctcaaacttttgtttcggttaaaatacatgttaaactacaaaaccgtctattttatttgtttctaaagatatcagggacattcaaaaaacaaaatatttacaaaacataaggctacaatacgattctgatgaatactcacacttgtacctcgtcctctatacagggcgcctcaaacttaccattcaacaaacaaaaacatgttttttcttccacctgatataagtacaaaaaagaagtttgagcaaacttttacaaaataccaaaataataaataaatagagattaatctgttctcgaaaaaacagctatgaaaatgagcataattttctataggtatccctaacttttgacgagca

SEQ ID NO: 4988 - DNA, 1146 bp, Diabrotica virgifera
attattcaaaaggcataataattttacgctttataaactacacaatattttcggtgtatatttaataatgatggtgtatattcacactttaattagtataaatgacagaattgtacaaaaaactaaacaaaactgtggaatttattatgcacacaacttatttatttattaactttttataaaatcagaggatttgcatttagaaaaagaagtagaattctatgtatataaacctttgtattagcttgtttttgtcttggtattaaactatagtctacgggcaattttacccccgaattcaatatagcatagttgtcaacagagtgtagatcttcatactgtttcctaaagagtgtccaaaacctatcccaaatgttgccaaatgggagtgcccttgcgtgatgatcctgccttctggatatattcacaaattatctacggttaaacaagcacaggtagaattttagttctatatctatcctatctacgtagtttcctatagagcgtttcacattaagaatggaactttttgtagatagggatacgtatttcttatggacgatagacgcgcgccgatgaaacgccgtctgatccagatataacaagcgtctatatacgcaatgttttacgctactttatactattttgtgcttagatattcctgtagggaacatccatcgtctttgcacccttcgttatcctatccattagaatgcttttcaagcttttgtgatcagagtttgcccagtgttcttatttcttcattggatttgcgatcgctgatcttgatgttgagctttctccgttccatagctctctaagtcacttaaagtttgtggactatgttgttgttaaaagccatttcagttccatgatcactagtttttgcctttgaagtgtttggtgagtttgatttaaatcttcctaaggctgcccacgctaaagcacatctattgaaatcagcctttaggttaagctgtgatagtttgattttttatcctaagtatatataggtactatacaattgaacctttttttctatattattgtccagtgtattgtatattatcaattatatctggagattcttttgtggaaaattttatttttaatcttatttcttttgatttaggtctaataatattt

SEQ ID NO: 4989 - DNA, 1019 bp, Diabrotica virgifera
attattcaaaaggcataataattttacgctttataaactacacaatattttcggtgtatatttaataatgatggtgtatattcacactttaattagtataaatgacagaattgtacaaaaaactaaacaaaactgtggaatttattatgcacacaacttatttatttattaactttttataaaatcagaggatttgcatttagaaaaagaagtagaattctatgtatataaacctttgtattagcttgtttttgtcttggtattaaactatagtctacgggcaattttacccccgaattcaatatagcatagttgtcaacagagtgtagatcttcatactgtttcctaaagagtgtccaaaacctatcccaaatgttgccaaatgggagtgcccttgcgtgatgatcctgccttctggatatattcacaaattatctacggttaaacaagcacaggtagaattttagttctatatctatcctatctacgtagtttcctatagagcgtttcacattaagaatggaactttttgtagatagggatacgtatttcttatggacgatagacgcgcgccgatgaaacgccgtctgatccagatataacaagcgtctatatacgcaatgttttacgctactttatactattttgtgcttagatattcctgtagggaacatccatcgtctttgcacccttcgttatcctatccattagaatgcttttcaagcttttgtgatcagagtttgcccagtgttcttatttcttcattggatttgcgatcgctgatcttgatgttgagctttctccgttccatagctctctaagtcacttaaagtttgccgactatgctgttgttaaaagccaatgtttcatatgccagaaccgacaatctgtactgatcaaagctttgcaggtatacagttaccgaaaatatttctcatcttttgacagaaagtcagaaaacatgttatgcactctgtattagtctcgaagtatatattaactacttacgcttcatcagt

SEQ ID NO: 4990 - DNA, 1167 bp, Diabrotica virgifera
ttagtttatatacatgttaaagtaaaaaagctctactcgcagatttggccgctaattgtttattaattgtttaaacaataacaattgttttgtataaataattttaaaaatatcgttaaattcatcattttactttgatcaaatatgtttctattttgtttttgattatgctgaatccgaatatggcattgcaatttgaaaattcttatacagaagctcttatacagtatgtccgcgtagctaggaaccacatggaaaactttttattatcaattttacgaaaaaaagttattcttcataaaatgctctggatagtcaaaaatctaaaactcaaccatcagatatcaaattttatcaattttatacgagttatgtcaaaaatatgaatttcgttaaagagtaaagtacctttatattccagaatatcaaaaatgctattatgaaaagttgtttgaaattagaaacatgtctaaatatacaattacatcattctaatcgaaaaaattttttcaattttttctcaaattacggatactcgtcatcattttattacaattatgataactattttattatcacttttacgaaggaaaagttattctttataaaatgctctccctggtctaaaatctaagatacaaccatcagatatcaaacttttttaattttatacgaggtatgtagaaaatatgaatttttcttaagagttaagtgcctttattattcacaatattttaattagaaggatgtaattgaacactaaaacaaattttttaattccaaacaacttttcttaataacaattttcgatattgtgaaatgtaaaggtactttactcttgagtgaaattcatattttttgacatacctcgcataacactaattaaatttgatacttgtagattgcatcttagattatatatgatgcagagtattttataaaggataactttttttcgtaaaactgataataaaaaagttgtcaataggttccaagttacgcagacacactaactatatagagttaaaaaaattttttgcttaacaattattattgttgaagcttattattaaatgtattttaggtaagttttaccgaaaaagttttgatcacttagtataaccttttttttagctggtaattttcggtttttgtattacatttttg

SEQ ID NO: 4991 - DNA, 991 bp, Diabrotica virgifera
ttagtttatatacatgttaaagtaaaaaagctctactcgcagatttggccgctaattgtttattaattgtttaaacaataacaattgttttgtataaataattttaaaaatatcgttaaattcatcattttactttgatcaaatatgtttctattttgtttttgattatgctgaatccgaatatggcattgcaatttgaaaattcttatacagaagctcttatacagtatgtccgcgtagctaggaaccacatggaaaactttttattatcaattttacgaaaaaaagttattcttcataaaatgctctggatagtcaaaaatctaaaactcaaccatcagatatcaaattttatcaattttatacgagttatgtcaaaaatatgaatttcgttaaagagtaaagtacctttatattccagaatatcaaaaatgctattatgaaaagttgtttgaaattagaaacatgtctaaatatacaattacatcattctaatcgaaaaaattttttcaattttttctcaaattacggatactcgtcatcattttattacaattatgataactattttattatcacttttacgaaggaaaagttattctttataaaatgctctccctggtctaaaatctaagatacaaccatcagatatcaaacttttttaattttatacgaggtatgtagaaaatatgaatttttcttaagagttaagtgcctttattattcacaatattttaattagaaggatgtaattgaacactaaaacaaattttttaattccaaacaacttttcttaataacaattttcgatattgtgaaatgtaaaggtactttactcttgagtgaaattcatattttttgacatacctcgtataacattaattaaatttgatatttgatgattgcatcttagattatatacgatgcagagtattttataaagaataactttttctcgtaaaactgataataaaaaagttatcaataggtt

SEQ ID NO: 4992 - DNA, 1489 bp, Diabrotica virgifera
  SmartBlast Evalue=3E-78; Info=Calmodulin n=48 Tax=Coelomata RepID=CALM_DROME
tcctaaacaaaacgagaaaagacagttggctggtgcactttgacgagaggcgttgttagttacttcgttgtgtcgacatttttctgtttagtgtaccgattaatcttcaaatattacaatggctgaccaactcaccgaagaacaaattgctgaattcaaagaagctttctcactattcgataaagatggtgatggtacaattacgactaaagaattaggaacagtaatgagatctctaggacaaaatccaacagaggctgaattacaggatatgatcaatgaagtagatgccgatggtaacggcacgatcgatttcccagaatttttaacgatgatggcacgtaaaatgaaagataccgatagtgaggaagaaattcgtgaagcattccgagtgttcgacaaagacggcaatggtttcatctcagcagcagaattgcgccacgtcatgaccaacttgggtgaaaaattgacagacgaagaagtcgatgaaatgattcgggaggccgatatcgatggtgatggtcaagtcaattacgaagagttcgtcaccatgatgacttcaaagtgaggaaaccagagttgcattttcagctttccattgtttcatcccggctcattgtctacatttttcaacacctcgaactttttgctttgtggccgggtccactaaagtgaataacttaaccgttatttgatttacaagacaaatttaattaataaatatatttataaattaatataattgtgtaaatttttgtaatatatttgtttttctttcgcaggagtcgttggcgagatctagtcgctggcgattcttgtactgtatcaaattctgtgctacatgtctagttgaagtttaaaaagagttacaaagtcacaaagtatgaaaacacgtatatataatgaagataaaaaaatcgttctatttgatgttagtttaggggatacagcattagacactttcaatttttttcatactttgtgatgtaaattacatctgatctgtgcacttactatatagtatgtatccccttttttgacatgttcattcatttttcccctttcttgtactgtaggttttacatttttagtctaggatttgaatttgctggaaagtaagcacatttttattgtcatcctgtgatgcgtatggaaatgttaatattttttggctcttactgtatcacaggaaatggtctttagaaattgatcgaaattttttacaacaaaaattttattctaatttcttaagaccactccctttcttattgtaagatttcgtttttattcaagcctgttaatttttttatttattcttactatttaagatccagtaacgcatccgttacaatgtgaaattattagatgtttaaatttgaaataaatgtgactaaaatattttcctgtgacttactggtacccaatatattattactataaagtttttatgttagaatttttttctttatttaaaataaaatatttgaat

SEQ ID NO: 4993 - DNA, 678 bp, Diabrotica virgifera
  SmartBlast Evalue=3E-75; Info=Calmodulin n=48 Tax=Coelomata RepID=CALM_DROME
tcctaaacaaaacgagaaaagacagttggctggtgcactttgacgagaggcgttgttagttacttcgttgtgtcgacatttttctgtttagtgtaccgattaatcttcaaatattacaatggctgaccaactcaccgaagaacaaattgctgaattcaaagaagctttctcactattcgataaagatggtgatggtacaattacgactaaagaattaggaacagtaatgagatctctaggacaaaatccaacagaggctgaattacaggatatgatcaatgaagtagatgccgatggtaacggcacgatcgatttcccagaatttttaacgatgatggcacgtaaaatgaaagataccgatagtgaggaagaaattcgtgaagcattccgagtgttcgacaaagacggcaatggtttcatctcagcagcagaattgcgccacgtcatgaccaacttgggtgaaaaattgacagacgaagaagtcgatgaaatgattcgggaggccgatatcgatggtgatggtcaagtcaattacgaagagtttattagaagtcacctcttggccaactaagatattattgattacaaagaaaaatagaagaatatattataatttacagatactatattaatgataatagaataagaataaaatgtaaataaatagttttgctcatt

SEQ ID NO: 4994 - DNA, 1093 bp, Diabrotica virgifera
  SmartBlast Evalue=8E-92; Info=Cathepsin L-like proteinase n=1 Tax=Diabrotica virgifera virgifera RepID=Q70EW8_DIAVI
caaataagacgaactaaaattctaagtaaataaccatcatcattgaatttaaaaactacaagcgtttttttttgcaaattgttgttaaaataacgatacaggtatttttaggaaaattattttattttgctatttattgtattcaagatgaaactgttggttgctatctacttaattatacatatagtcactgctttgagtgacaaggaagcctggaaaacatttaaggatacatatggtaaatcttacaccttattagaagaaccgaatcgttttagaatttttcaagttaatttacagagaatccaatgtcacaataagagattcgaagctgggcaatcatcttatcagctcggtgtcacagaatttaccgatttaacatcactagagtttttgaataagtttaaaccaattcaaattaacgcatctaacaagcaaagcaatattcaacaacacactattggtgattcaccagatgaaattgactggagagaaaagggtgctgtaactgaagtaaaagatcaaggagctttaggttcatgtggagcttttagtgtaactggtgcagtagagggtgctaaccttatatcaactggcacattaatttctcttagtgaaaaaaatctagtagattgtataaaaactaattcctgtgatgcggattggataacaagagcttttgagtatatagaaaataagggaataatgtcggaagatgattatcctgcgacttctgatgatacctgcaaatataatgcttcgcaagttgctgccaaaataaaaagatttacgtatattaaacaagatgacgaattagaactacagaaggccgttgcatctaatggaccaatttctgtcattattaatgtcactcctaatttccagttttatgtatcaggtatatttgatgacgagaattgcattccagaccaattaaatcacagtgctctcgtggtaggatatggaatttctaatggtaaatattattggatagttaaaaattcgtggggggccagctggggtatggatggttacatactaatgtccagaaataagaataatcaatgtggaattgctaggagtgcagtgtatg

SEQ ID NO: 4995 - DNA, 1068 bp, Diabrotica virgifera
  SmartBlast Evalue=1E-91; Info=Cathepsin L-like proteinase n=1 Tax=Diabrotica virgifera virgifera RepID=Q70EW8_DIAVI
taaataaccatcatcattgaatttaaaaactacaagcgtttttttttttgcaaattgttgttaaataacgatacaggtatttttaggaaaattattttattttgcgctttattgtgttcaagatgaaactgtttgttgctatctacttaattatacatatagtcactgccttgagtgacaaggaagcctggaaaatatttaaggatacatatggtaaatcttacaccttattagaagaaccaaatcgttttagagtttttcaagttaatttacaaagaattcaatgtcacaataaaagatttgaagctgggcaatcatcttataaactcggtgtcacagaatttaccgatttaacatcattagagtttttagctaagtttaagccaattaaaattaatgcatctaataacgaaagcaatattcaacaacacactattggtgatttaccagatgaaattgactggagagaaaagggtgctgtaactgaagtaaaagatcaaggagctttaggtgcatgtggagcttttagtgtaactggtgcagtagagggtgctaaccttatatcaactggcacattaatttctcttagtgaaaaaaatctagtagattgtataaaaacgaattcctgtgatgcggattggataacaagagcttttgagtatatagaaaataagggaattatgtcggaagatgattatcctgcgacttctgatgatacctgcaaatataatgcttctcaagttgctgccaaaataaaaagttttacgtatattaaacaagatgacgaattagaactacagaaggccgttgcatctaatggaccaatttctgtcattattaatgtcactcctaatttccagttttatgtatcaggtatatttgatgacgagaattgcattccagaccaattaaatcacagtgctctcgtggtaggatatggaatttctaatggtaaatattattggatagttaaaaattcgtggggggccagctggggtatggatggttacatactaatgtccagaaataagaataatcaatgtggaattgctaggagtgcagtgtatg

SEQ ID NO: 4996 - DNA, 1089 bp, Diabrotica virgifera
  SmartBlast Evalue=6E-15; Info=Ataxin-2-like protein n=1 Tax= Harpegnathos saltator RepID=E2BCC4_9HYME
ccattaccgcccctgccataaccgtcttcgccattaccgcctccgccgcctctgctgtaaccgtctccgccattacctcctacgccgcctctgctataaccgtctccgccattaccgcctacgccgcctctgccataactgtctctgtcattaccgcctctgccataaccggctctgccattaccgcctccgccgcctatgcgataactgtctctgccattaccgcctccgccgcctatgccataaccgcctgtaccattaccacctccgtctcctcctatataacctattggtttaatcacgattttttttggttctccttcccgtcccaaagaatgatccggctcaggtgctgcggatatagtttggattatcaaaagaacgacgcagaagaatgccactattacaggcacacccctcatcttgaaataatcttcaaaataaaatatttagtatttattcgttgagtagtaatttatcgataaacttaaaaagaagtctacattgaatccaaacgcaaaggaattcgttttgaatccttctgctaaaccatttcaaccaaggtctccaagtactccatcagctagcaggcctcatactccacagactccaagccatagcccgtatatcccagccacagttggcgggcccgctgtgcagccacctatgcaggttatgatgccattgcactacgtaatgaccagccagccgcagtatcaaccgccaccacaaggcaataagattagacgtttaccaatgaggacggacatggcgtcacagatgcaagtagccgcagccactgggcagccgctcctagctccggcccccattcaacccttcatttatccaccggcaatgaaccaggcttatcaaccgatgcatatggttagaacttacgaaacgtctccccaaatccagtatattcctcccaatccgcatccctcgcaaactccttcacctgcgcaaccgcctcagtataatcctgcacagggacctcaggcgccacctcagcagtgccaggcagcacctcctccaccacagagtcatcaccagtttcctctaatgtaccatccgattattcccgcgcag

SEQ ID NO: 4997 - DNA, 1050 bp, Diabrotica virgifera
  SmartBlast Evalue=5E-15; Info=Ataxin-2-like protein n=1 Tax= Harpegnathos saltator RepID=E2BCC4_9HYME
ccattaccgcccctgccataaccgtcttcgccattaccgcctccgccgcctctgctataaccgtctccgccattaccgcctacgccgcctctgccataactgtctctgtcattaccgcctctgccataaccggctctgccattaccgcctccgccgcctatgcgataactgtctctgccattaccgcctccgccgcctatgccataaccgcctgtaccattaccacctccgtctcctcctatataacctattggtttaatcacgattttttttggttctccttcccgtcccaaagaatgatccggctcaggtgctgcggatatagtttggattatcaaaagaacgacgcagaagaatgccactattacaggcacacccctcatcttgaaataatcttcaaaataaaatatttagtatttattcgttgagtagtaatttatcgataaacttaaaaagaagtctacattgaatccaaacgcaaaggaattcgttttgaatccttctgctaaaccatttcaaccaaggtctccaagtactccatcagctagcaggcctcatactccacagactccaagccatagcccgtatatcccagccacagttggcgggcccgctgtgcagccacctatgcaggttatgatgccattgcactacgtaatgaccagccagccgcagtatcaaccgccaccacaaggcaataagattagacgtttaccaatgaggacggacatggcgtcacagatgcaagtagccgcagccactgggcagccgctcctagctccggcccccattcaacccttcatttatccaccggcaatgaaccaggcttatcaaccgatgcatatggttagaacttacgaaacgtctccccaaatccagtatattcctcccaatccgcatccctcgcaaactccttcacctgcgcaaccgcctcagtataatcctgcacagggacctcaggcgccacctcagcagtgccaggcagcacctcctccaccacagagtcatcaccagtttcctctaatgtaccatccgattattcccgcgcag

SEQ ID NO: 4998 - DNA, 1157 bp, Diabrotica virgifera
  SmartBlast Evalue=1E-105; Info=Protein tyrosine phosphatase- like protein ptplad1 n=1 Tax=Camponotus floridanus RepID=E2AFV5_ 9HYME
gattgaattattttagttaagttatgtttaagtatttatcacagaaaagttttaacaaattgtagtcgtctacaataattacaatacttaattgtttcaaatcatggtggccttaagccccttcgtgtattgggctcaaaacgagagtaatctctttttgaaagtcgacttgaaagatgtaaaggaaccagagattcttttaaacaacagacaattgcaattccatacacaggggcgaggagctcagggtttgaaggactacgaatttgttattgattttcattccaatgtagatcatcatacgaagaatataaaaataactgaccacaagatagatttgactctattcaaagcagacaaaggttggtggccgagattgacttcgaaacctacgaagccagcttggttgaaaatcgactttgacaagtggcagagcgaagatgatcttatcgacgaagaaactagggatattcgggaagactatcccgatatataccagcagctacaaaaagacgagttgggttttacaaaggaagacttcaagaaggtgtacctgaccttctacaatttgttcatgtacatagcctttatgtacatatcgacggtgatgtgcatccgctacgtcaaagacggatccgacttcttcccacacgtgtacgacaccatagggcctgtgatatgtttcgcgcagctgatgcaatgtctggagatcctccatcccgtattcgggtacgtcaaaggaggcatagtgatgccgtggctgcagatccaaggacggttgttcgttctgttggtcaatttggatcaggagaggcggatacaggtgatgcctgtcactttctatctgtttttgacctggagtgccatagaaatcatcaggtatccgtactacatgtctcaattatacaaaaaagaaaacaaaatcctaacgtgggtgcgctacactgcctggatcgtcctctacccaataggcttcagttgcgaaagcatcatcctcttcagaaacctgatcttcatggaacaaagtggcagatggtcgatgtccatgcctaacgctttcaatttcacattccactacgcgactttcctcaggctctacttactcctaggtgtgataccagccatgtatttcttgatgaagcacatgcacaaagcca

SEQ ID NO: 4999 - DNA, 983 bp, Diabrotica virgifera
  SmartBlast Evalue=3E-88; Info=Protein tyrosine phosphatase-like protein ptplad1 n=1 Tax=Camponotus floridanus RepID=E2AFV5_9HYME
gactatacatgtaataggcgatatccgaaaagtggatgtagttgcaggtgtactttatgtggttcggaaagttctatatacaattttttaaatcaacccgtccattatgggcttcgtcgaatccaagacgaagaatataaaaataactgaccacaagatagatttgactctattcaaagcagacaaaggttggtggccgagattgacttcgaaacctacgaagccagcttggttgaaaatcgactttgacaagtggcagagcgaagatgatcttatcgacgaagaaactagggatattcgggaagactatcccgatatataccagcagctacaaaaagacgagttgggttttacaaaggaagacttcaagaaggtgtacctgaccttctacaatttgttcatgtacatagcctttatgtacatatcgacggtgatgtgcatccgctacgtcaaagacggatccgacttcttcccacacgtgtacgacaccatagggcctgtgatatgtttcgcgcagctgatgcaatgtctggagatcctccatcccgtattcgggtacgtcaaaggaggcatagtgatgccgtggctgcagatccaaggacggttgttcgttctgttggtcaatttggatcaggagaggcggatacaggtgatgcctgtcactttctatctgtttttgacctggagtgccatagaaatcatcaggtatccgtactacatgtctcaattatacaaaaaagaaaacaaaatcctaacgtgggtgcgctacactgcctggatcgtcctctacccaataggcttcagttgcgaaagcatcatcctcttcagaaacctgatcttcatggaacaaagtggcagatggtcgatgtccatgcctaacgctttcaatttcacattccactacgcgactttcctcaggctctacttactcctaggtgtgataccagccatgtatttcttgatgaagcacatgcacaaagcca

SEQ ID NO: 5000 - DNA, 1205 bp, Diabrotica virgifera
gacgtaatcaacttgacgacgggaaattatcaaaaattatcagtttaattttatttctgaagctttctattggtcaggatctcctatgaatgaaataatcgcgctaatttcattaaaacctgaacacgataagataaatttgaaataaattagtaaataatatctaaatattagttcattgcatgtattataatatgttataatgccatattacaaggtattttactttcacgcacgccgtgtgggaaagtgcaactttcgaaacgaaatgcgtgcgtgaaagtggctcttttagcacggccgtagaaaaactatttttatggcactgaattcagtttttatgaagtttttgcagaatctgaatctgcgataaaaatggttcctgtttaagatttcaaaattgctcccctcaactgcagggggtggagtggggaacatgcttggtgtcattcactagagttttgaaagatgttgaacccatgtttttcagttttttgattcgatgtaaatttcgtaaaatattcgactgtcccacttatgttggcatcatggtatatcaacaggtttttccaaagtattgctagcacatttaattgtaagacaccctgtatgactgaccatactttggcaaaaatgcattaatatgttgttatacaaaactactattgaccatacacatattttgtattggacgggagaaataattgtggctagttatattattttactattttatcacattaataagtttcatttactccagaagcctctattactcttacttactccgtggcgttacaaccttcacgggttttagccaactcgacaacatgccttcactcttctctgtctagagcaacctctatccaattctccacgcccatagctttcaggtgtcctgctatattatctcgccaccggagtcgaggacgtcttctttcagttgggacttcccccacaccagcctcactcttctttggtcagaatgtcttctgaggtgtcctctctattggagtttttggactttatttattttatgatgttggcgtctgtgtaaagttcttcgagctctttgttagttcttatcctatataatataatatgcttcatccagcacaggcccaaaagtcccgcagcgaaagtgttaagcaacagagaaccacccttttataaaaaatatatggaaaacaggattgggttagcta

SEQ ID NO: 5001 - DNA, 919 bp, Diabrotica virgifera
gacgtaatcaacttgacgacgggaaattatcaaaaattatcagtttaattttatttctgaagctttctattggtcaggatctcctatgaatgaaataatcgcgctaatttcattaaaacctgaacacgataagataaatttgaaataaattagtaaataatatctaaatattagttcattgcatgtattataatatgttataatgccatattacaaggtattttactttcacgcacgccgtgtgggaaaatttactttcacgcacgcagtgcggtaaagtgcaactttcggaaatgaaatgcgtgcgtgaaagtggctcttttagaacggccgtagaaaaataatttaatatacacatctaatagaattaataaaggaaactgtaaaagtagaaattaaaatccgaatacaaaacgaattaacggaaacaatagatgtaaaaatagtaagagacgcaacagtcaattaaaaaaaagtggccttaaaattatcaggccaaaacaaaatatgtatatgcatgcaaataaaaacaaaaatttaccaatatgagaatttgagaaagctaaataatttaccaatatgagaataccacataggtagtaagaactttacatacttaggatccctggctacctctgataacaacattgcagaggaagtgaaaaggctaatatgcatggccaataaatattaccatagcttaattaggcgactaagatcaaataatatcacaaaaaaaaacaaagtgcaaatatacacaaccttaataaaaccagtactcacaaatgacaacggaaaatgcaaaggaaaagactggaagaaagcgaaataccaaacaaaataagaaaacaagtaacagtagaaaaataacaaaatgaagactgaaactatgatacatcaaacaaatatataatgataa

SEQ ID NO: 5002 - DNA, 1270 bp, Diabrotica virgifera
  SmartBlast Evalue=1E-71; Info=Outer dense fiber protein 3 n=1 Tax=Harpegnathos saltator RepID=E2BX94_9HYME
caaacaagttatcctttgcacgagtgactacgcatcgtcctggtggggactcaagtcgcgagtttcgtccttacaccgccaaattcaaccagtattcgattgattttgcacgaggttgtacatagtgctcatactttaatttttatttttggaatatacatcactaaaacaaatcattaataatgggtggaatgacacagcgaccttggaccccaacaaagcgtcgtggccccatcgctgctgaattcaaaggtcctggaccagcatgcgtggcgttaccgtcctatataggaagaagaactaccgaatcaagatctgaacgagctccagcgtttagtttcggatcaaggcaaaatggaaaattagaaagcatcggcccaggtccgggtcaatataacataacaggaatgagtgcaaaaggtaaagacacacccccagcattaagcttacacagcaggccaaaagaccaaaagcctgaaaattttccggctcccggagactataatccagataaggctgaaaaagtgatacacgacagtgctccaaaatatacatttgggctaaagactaacgtagataaaccactagacactccagctcccaatgtctacaaaatagccgagactctaacagccgatgctccaaaatacacgtttggaaccaaggtcaacgtagaaaaaccagatattgtgcctgcaccaaacgtatataatatcccatcggctgtgggtgacagaggatcaccggcttataccatatctggtcggactaaggaacttttagacgaacgtgttaaaaatcctgctccagggcagtacaataatgtagatccggagttctataaaagccattctccagcatacacgatgagcggacgaattaacgttcccaaagatgataaaattcctggacctggtgtttattctcctgaaaaagttactttagatgctccgccagcacatagttttggaataagacattccccattctctgaacactattgatcaacaccgtcaaaccgaaaacaccgaccgactgtgtaacttccatccgaaggacacagaaatcatcaaagaacaactatatcggttcttaaaatattataaacttattgaaagcgtttgaacgggtttagaatcttttaaaaactgtctcaagagtagcatttatatacctcaacgtgaatattatttaaattaaatattttaggtttattattgcaggtttgctttttttctaatacgttgctattaatacatgctttgaaaag

SEQ ID NO: 5003 - DNA, 852 bp, Diabrotica virgifera
  SmartBlast Evalue=3E-62; Info=Outer dense fiber protein 3 n=1 Tax=Harpegnathos saltator RepID=E2BX94_9HYME
caaacaagttatcctttgcacgagtgactacgcatcgtcctggtggggactcaagtcgcgagtttcgtccttacaccgccaaattcaaccagtattcgattgattttgcacgaggttgtacatagtgctcatactttaatttttatttttggaatatacatcactaaaacaaatcattaataatgggtggaatgacacagcgaccttggaccccaacaaagcgtcgtggccccatcgctgctgaattcaaaggtcctggaccagcatgcgtggcgttaccgtcctatataggaagaagaactaccgaatcaagatctgaacgagctccagcgtttagtttcggatcaaggcaaaatggaaaattagaaagcatcggcccaggtccgggtcaatataacataacaggaatgagtgcaaaaggtaaagacacacccccagcattaagcttacacagcaggccaaaagaccaaaagcctgaaaattttccggctcccggagactataatccagataaggctgaaaaagtgatacacgacagtgctccaaaatatacatttgggctaaagactaacgtagataaaccactagacactccagctcccaatgtctacaaaatagccgagactctaacagccgatgctccaaaatacacgtttggaaccaaggtcaacgtagaaaaaccagatattgtgcctgctccaaacagttacaacgttcctagagcagataatgttttaagaaggtctctaaggtatagctttggacgtaaaactaatagtaaaaattatagtgtaactcctgcaccaaacgtatataatatcccatcggctgtgggtgacagaggatcaccgg

SEQ ID NO: 5004 - DNA, 1405 bp, Diabrotica virgifera
acatgaaagagcagcaaaaggagttcaatatcaataaaaaattaatggagaaaacacataccagattaccagcaaacaaatgaacgaataatggaaattaggatgaacatatttggacaatcaacaataatcgccgaagtatatgtaatgaatgacaatgtgaccataagggaaaaatatattgtattaattggaaattttaacagccacattggaaagaaagataaaacagccacattcggataaaacgaaattagaaacaataatggaaatcggcaaattgaaatatgccaataatacgatttggccataaccaacacaagatttcagcataaaaatatactgtaacaaaagaatgaatcaccgaccgcaagtaacagctccaaacggttccatctcgagaacattctggcgaaagcacgatatacgtggaatcggtggagaaagacgtgcggtatatggaaggtcacacgatatctagaggtggcgaagtctggaatgatcgagaataacgttatttgctatttaagcggagcgcgcttttattcgagtttagtttaagctagagatttgtaaagaaaacttgtataaataaattaataaagtcgtacataaatacgaacgctcgtttgaatattacagtacgatacaaaggccttacagccaagtggcagagattaataagtcttgcctgatttgagaagaacaagaagaagtaccgtctacttcatttgattatccaggaaaaaataaggagcaggggaggatcaggctggagaagacactcgtattattatatggtgcgactttagaaatagttttaaatatcagggactttaattattacaattttaatgtaaaagggataccatatattaagtgaagtgtcgtatttcaaataatctgtataccaattaagatttcatagaaattaatcagaaacaaatagatccaatctttgtaagttttaatactgtgcaaaaggcgatactaaaacgtaaaaatattaaattatataggtttgacaaattatgataaatttttaacaaattctcattaaaaaacccaacacgaacaagaaaactgtttttttatatacaaaaacattaatttttatgtcaaatttattttaaataagtgtttaagtactgtgtaatacctttcagttttagtcttaaaagtctatacattagccataagtaacagaacattattttttcatactaattcagttacacgacatcggtgacaatactaggcctacctgaaacctgtttactatactttatttcacgttgagaacggaacgtttggcttatgcagatcagtgttgccaaaactcttagcacgggttgctactagtttgccgatatacgattcattctcgatacgatagaagcggcat

SEQ ID NO: 5005 - DNA, 710 bp, Diabrotica virgifera
acatgaaagagcagcaaaaggagttcaatatcaataaaaaattaatggagaaaacacataccagattaccagcaaacaaatgaacgaataatggaaattaggatgaacatatttggacaatcaacaataatcgccgaagtatatgtaatgaatgacaatgtgaccataagggaaaaatatattgtattaattggaaattttaacagccacattggaaagaaagataaaacagccacattcggataaaacgaaattagaaacaataatggaaatcggcaaattgaaatatgccaataatacgatttggccataaccaacacaagatttcagcataaaaatatactgtaacaaaagaatgaatcaccgaccgcaagtaacagctccaaacggttccatctcgagaacattctggcgaaagcacgatatacgtggaatcggtggagaaagacgtgcggtatatggaaggtcacacaataactagaggtggcgaagtctgaaattatcgagaataacgttattttgtatttaagcaaattgcggtattaggagagttagtttaagctagaaatttgcaaagaaaacttgtataaataaattaataaagtatataaatacgaacgctcgttattattacaatataataattttatctaatgaaggaaatttaagatctatgtttttctaaaactagattttaaaactaagagttg

SEQ ID NO: 5006 - DNA, 1111 bp, Diabrotica virgifera
  SmartBlast Evalue=1E-113; Info="S-formylglutathione hydrolase, putative n=1 Tax=Aedes aegypti RepID=Q17MG9_AEDAE"
atattattgataacttataattttttcgacaatagatgttcagcatgatattttatgtgttccccaataaatgatgctatataaaagtaactatgattgtatccttccctcttctttaaaatcactggtactccggaagatttacatgcttggactagattctctggtaaaagttgttcgctcttaaggaaattgtcttctaaaccctgatctaacagtagctctagaggaggcccattgtactttttaactaattctgtagcatcccagtccgtccaagaacacccttcttcaggtcccatatatcctgaaaatgctttaacaccccatgggcatttggtcggattagaaatagcagcaaacgacgatacagatttatacaatccaggattctttaacgcacttattaaagctccatggcctcccatactgtgacccattatcgactgctggccttcggctactggaaagttttcgttcactagttttggtaactctgaagtaacataactgaacatcctgtagttggttttccatggttcttgtgtggcatcaacgtagaaacctgctgcaactccaaagtcccagctgtcggaatcgccaggaaggttaaggcctctgggtgaagtgtctggatttacgattattatgccatactctgcagcatacctttgtgcccctgctttctcaatgaagttgttttcggaacaagtaagaccagatagccaatatataaccggaagctttttgccctcttccacctgagggggtaggtagactccaaacctcattttagttccaacctccttggatgtatgggaaaatattttttggtatccaccaaatattttatttgaagcttcctctgttaaaggcattatgaagcaggtatttcaacagtgatggagtggtgataggtaattattttctggttgtaagtcggcacaatgattgttgatcaagtagtatcacaggtcaaaatatctaaccccttttttgttaatcctcaaggtcaaactgtagataacttttataagtgttcaaatcaaaatcaactttattcaagtgcagttgcagtttgcaggtggtttgcagttttgctaatatttac

SEQ ID NO: 5007 - DNA, 997 bp, Diabrotica virgifera
  SmartBlast Evalue=1E-101; Info=S-formylglutathione hydrolase n= 1 Tax=Harpegnathos saltator RepID=E2BUY0_9HYME
tttaaaatcactggtactccggaagatttacatgcttggactagattctctggtaaaagttgttcgctcttaaggaaattgtcttctaaaccctgatctaatagtaactctagaggaggcccattgtactttttaactaattctgtagcatcccagtccgtccacgaagacccttcttctggtcccatatatcccgaaaatgctttaacaccccatgggcatttggttggattagaaatagcagcaaatgacgaaacagatttatacaatccagggttctttaatgcacttattaaagccccatggcctcccatactgtgacccattatcgactgctggccttcggctactggaaagttttcgttcactagttttggtaactctgaagtaacataactgaacatcctgtagttggttttccatggttcttgtgtggcatcaacgtagaaacctgctgcaactccaaagtcccagctgtcggaatcgccaggaaggttaaggcctctgggtgaagtgtctggatttacgattattatgccatactctgcagcatacctttgtgcccctgctttctcaatgaagttgttttcggaacaagtaagaccagatagccaatatataaccggaagctttttgccctcttccacctgagggggtaggtagactccaaacctcattttagttccaacctccttggatgtatgggaaaatattttttggtatccaccaaatattttatttgaagcttcctctgttaaaggcattatgaagcaggtatttcaacagtgatggagtggtgataggtaattattttctggttgtaagtcggcacaatgattgttgatcaagtagtatcacaggtcaaaatatctaaccccttttttgttaatcctcaaggtcaaactgtagataacttttataagtgttcaaatcaaaatcaactttattcaagtgcagttgcagtttgcaggtggtttgcagttttgctaatatttac

SEQ ID NO: 5008 - DNA, 1078 bp, Diabrotica virgifera
agacgatattttgccggaagttgtagacgcaactgacagatttgaacgatttttctcgcttttacccgtattcactgtgttaccattcacgcgcgcgataaccgctcagattcgcgcggtttgtccgtaagcggaaaccgcttgcactatgtgtgtacccttacccaattgaacacatttgggaatttgggacaatctcaaaaaacggttaagtgcaagagtaccagcccctacatcattcggaaagctcaagacggctgtggaggagaagtggcacaatatctcccaatcggatgtccaggatattgtaaatagattggcgaacaggctccaagaagtccttaaccccttcggtacggtgatgcacccgtgtgcatcatgcttgactgtccggtcagtacggtgatgcacatgggagcatcatgagttttcgttcgccataagtcggtgacaccatcttcatcatatttcaggtatttttgttccgtccgaattaccttattcaaatctaaaagtggggaaaccacgcccaaaagtgggtgatgtccagaaggagattagatttagttaatttgattggtgataaggttgtttggatgtttgactgatgggattgtgtgggaggtgaagttactgtgctgctgtttacaacttaccttactatcccttgcaagataattcggatggaatttcccagattaggagactgggacgatatcaagcacaaaataatctggggaattccatccgaattatcttgtttatcttttttaataatttttgtttaaaatggtattttatggataaaatttaatttaactcacatactatgtagaataataaatttaataaaaatagttttatttctaaaattagtgttattattacattaactttaattagttgtagtgtgatactgtgcgatgcgcgcgaagccgctcggtaaacggtcgaatccgtatataggagccgacttgccgaatgacggtccgaaggggttaagggccagaggtggcaataccccttattaatactcacaattctttcaattggactatgattttcaaaatcatgtttg

SEQ ID NO: 5009 - DNA, 1022 bp, Diabrotica virgifera
agacgatattttgccggaagttgtagacgcaactgacagatttgaacgatttttctcgcttttacccgtattcactgtgttaccattcacgcgcgcgataaccgctcagattcgcgcggtttgtccgtaagcggaaaccgcttgcactatgtgtgtacccttacccaattgaacacatttgggaatttgggacaatctcaaaaaacggttaagtgcaagagtaccagcccctacatcattcggaaagctcaagacggctgtggaggagaagtggcacaatatctcccaatcggatgtccaggatattgtaaatagattggcgaacaggctccaagaagtccttaaccccttcggtacggtgatgcacccgtgtgcatcatgcttgactgtccggtcagtacggtgatgcacatgggagcatcatgagttttcgttcgccataagtcggtgacaccatcttcatcatatttcaggtatttttgttccgtccgaattaccttattcaaatctaaaagtggggaaaccacgcccaaaagtgggtgatgtccagaaggagattagatttagttaatttgattggtgataaggttgtttggatgtttgactgatgggattgtgtgggaggtgaagttactgtgctgctgtttacaacttaccttactatcccttgcaagataattcggatggaatttcccagattaggagactgggacgatatcaagcacaaaataatctggggaattccatccgaattatcttgtttatcttttttaataatttttgtttaaaatggtattttatggataaaatttaatttaactcacatactatgtagaataataaatttaataaaaatagttttatttctaaaattagtgttattattacattaactttaattagttgtagtgtgatactgtattttaaccgaccgcgcgaagtcgctcgaatccgtatataggagacgacttgccgaatgacgatccggcacgaaggggttaaagcatgaatttcacattggc

SEQ ID NO: 5010 - DNA, 1503 bp, Diabrotica virgifera
tatcatgtgaagtgaaatatcctatgctgaaattcctagccccctcccccttcggtatcatagaaatatagggtatttcttggaaaggacatatcaaacttgtggacatgattgggtgaatgacacccgacatcatgttttgtcatttgccagatatattaacgcacgtccttacgttgctttttgcttcttctttacgtgccatctccgcgacaaaggttggcaatcatcattgctattctcacttttcacactacagcccgaaagagttcagttgagctgcatccaaaccattctcggagatttctcagccaggacatttttctcctacctatgctgcgccttccttgaatgtttaatattttcttaaaattgtaattacttctgtaattactataatctgggtaaaacatggcaaggaaagtttaaacttatgctgttttcggcctaatttaaatttttgtctacctttttgggtgagatttccaaccacatggtcgaccatgtggaaactataaactgcagtagaaccaaactgctgcctgaaattacaatcatcacatacatgctaaccagtatatgaagcctacaattaatttcaactgtataaagccattaacaagttatccagtcaactacatgaaacaatacgccttactgccaggtcctttacatgtacagtaaatatgattagttaatataatgttttatttgttccttccaaaactcatttttcacttttgcaattaaggtaagatgtatctacacctgaaagacagctagcagaacgcagaacaattcacttctaacgttacttgaagttttattgatacacccgatgtataaagaaattatataaaacctgtcaaacccgaaaaaaagagtgatttggagaagaaatgttaactttgtcttttagagtattgtcctctatttgctttctcctattttcttcgtctcttgtgcttatatattgtaaaagccagagatacaggatgcagccagaaagaagtttattaacgaaaagtcttggatttaaaatattgtttattatatttttatttcaattattctaattgtttaaaaagtagtaaactttgtatctagggcttttcgttgttttcctcgtaatacgagagatgtcgctagattgcgtctcaaaaggtggaatcattgtatcgcgatggtttcccttaaataggcagattgttatattcccttcagagttgtgactgcatagcttcactgaagatgcatgggatgctgaaatagctatatggagatggtggtccaactctgatcgaatataaacaaaaactgcctttattctttgtcttttagtttgatatggcattactccaccaattcgactatttataagacttagatgtagattatttatattgttttgatttgattaaaaaaatatactattgatctttgccgtaacattcatgcgaacaatacaactgatcattccttaacaataacttcttaccagtc

SEQ ID NO: 5011 - DNA, 596 bp, Diabrotica virgifera
tgttgggtgttgatgccatcatcttagttttttcctcgtttacttgcaggcccatattttttgaggcatttggcagactcaacatgaataactgaataaaaaaaattttattcaattattctaattattttatctattctatttatttatttcattttaattattctaattgtttaaaaagtagtaaactttgtatctagggcttttcgttgttttcctcgtaatacgagagatgtcgctagattgcgtctcaaaaggtggaatcattgtatcgcgatggtttcccttaaataggcagattgttatattcccttcagagttgtgactgcatagcttcactgaagatgcatgggatgctgaaatagctatatggagatggtggtccaactctgatcgaatataaacaaaaactgcctttattctttgtcttttagtttgatatggcattactccaccaattcgactatttataagacttagatgtagattatttatattgttttgatttgattaaaaaaatatactattgatctttgccgtaacattcatgcgaacaatacaactgatcattccttaacaataacttcttaccagtc

SEQ ID NO: 5012 - DNA, 1398 bp, Diabrotica virgifera
  SmartBlast Evalue=5E-52; Info=Probable RNA-binding protein 25 n= 2 Tax=Formicidae RepID=E2ATS2_9HYME
gcgtcgttccctagtttcccaagctcttaaccgttcttgataggcagcttccttttctcttgctctcctttcggctttcttcttctccttggcctcttcttccatttctttttctttcaacatatctctactacttctacgatcgtctcggtctctttctcgatcgcggtccttttctcgctctctgtctctatcacgctctcgttccctatctctatcgcgttctctctcacgctcccgttctttttcacgttctcgctctctttctctatcacgatcacgttctctttccttttcacgttccctgtctctgtctctttcccgacttttttcatgtgacctggatcttgatcgtcttcttttcttctcatctttttctcttctcctcggactaggtgaatgggtatgagatctgtcccggtctcgagttgatttttctttctgttcttcctttttctttcggacttctttttcttcttcttgttttttcatgatttcacgaaacttccctatttctctggtgattagatctctcttttcttcctccacttctgcttcagctaaacttcttttttggactcataattggtcatttcttcctcatattccttcatgatttgtttgattctttctgatgctgttgcatcgagagcttgtgtttcttcatcaagttcttcttcttcaggttcatcctgaagtggagaagtggatcccgtttgcttttttcttctttcggctttatattcatctaaaactgtttttgttttagcatctacttttgctacaagacgtttgtctcctatcataagatcatgcagaagtctcacagccctcaaaccagcgtctggtccagctaattcacaaaatccgaatgccttgactttcttccaactaagtacatgtccacaagtagctagaatttgtctgatcataacatctggggctttctctgtaatgttacccacaaaaacagttacagctggaccttgattttgcttctgctgttctctattgggatttagcttgggaaaagccctaagaggtgcactagttacctgaatgggtaccatatgttgtataggcataacagctggcattagaggagccgttggcgcccccatgggcatatacatgggaagcccttgcataattggaggacgacctggataagacattcttgatattttattaaagaagcttcaaatttatcacaggattgacacgactttttaacggtatagcagttaatgtatctatatcgcttaaaattataaaacctaatgttttcactacagttaaattactacttaattgatcaacaagaaattgatttgatttacacggcaccgtccattttaacttcgcatcttttcagtaaaatcacaatgtatgtactcg

SEQ ID NO: 5013 - DNA, 696 bp, Diabrotica virgifera
gcgtcgttccctagtttcccaagctcttaaccgttcttgataggcagcttccttttctcttgctctcctttcggctttcttcttctccttggcctcttcttccatttctttttctttcaacatatctctactacttctacgatcgtctcggtctctttctcgatcgcggtccttttctcgctctctgtctctatcacgctctcgttccctatctctatcgcgttctctctcacgctcccgttctttttcacgttctcgctctctttctctatcacgatcacgttctctttccttttcacgttccctgtctctgtctctttcccgacttttttcatgtgacctggatcttgatcgtcttcttttcttctcatctttttctcttctcctcggactaggtgaatgggtatgagatctgtcccggtctcgagttgatttttctttctgttcttcctttttctttcggacttctttttcttcttcttgtttctaaaagaaatagcctcatttaccttttagcataacgagatttatataattaaaatgtcataccactcccattcgtaatatgtgcttttgactattaaggaaggtaacatttttgctgtaatggagctgagaataaatgattaacttaacagtttagtaaattaagtcagaaacaaaactagattaacaagcatgtctttttatacaatt

SEQ ID NO: 5014 - DNA, 1056 bp, Diabrotica virgifera
  SmartBlast Evalue=6E-57; Info=Aquaporin n=1 Tax=Culex quinquefasciatus RepID=B0WQA3_CULQU
tattaaatttatttataacaaaatacaataaacattagatcattcaaaaaagaataaacaactgtaaacaatgttgtagagtttcataaagtatccctaggaattagaactctcatgctttgggattgagcggaaacgattcgggcaaaggtaaggtttctttagaagaaggttcagtctttctgaagatcaaacggtagagaacagctccgacaaatccagccgacagtggacctagccagtaaacccagtgatggttccagtcgccattaaacaacgcaggtgcaaaacttcttgctgggttcatattagccccagtgtacggtcctcctgccattgccaatacagcaatgagaagaccaaatcgaatagctacggaatcgtgctttgtgctatttctggaatcccaaacaccacagcagaaaaggacgaggattaagcacaacataaattctacgaagagagcttgaggggcgcttattaagggattaatggctggcgagcatactcctgttccaattttggcaccagtgctgttgttgtatacgttgcccatgtaaacatcaggggttgcaaccaaaagaagagcatatcctaacaatcctccaatcatttgtccgacaaagtaaactggaacctgaattaaagctatatctcccaaagttgccgctgcgacagtcactattgggttaatgtgtgatcctgaaacgtgtccaaaagtctggactgctaccattacagctaatccgaaagtaaaggaaatttgttcgtggggaattacacctccggaagccaaggagctaacacagcccatgcaacccaaaaaaacgagcatggctgttcctccaatttctgcggcgcatattgttactctgtctttggtcgacatgttgtcggtaagttgtattacttttcctgagtaacttttgaataaaaattgtataataatatttatttttctcactattcgccactttaatccgtttattgttcacaccatgcattgtctacatttaacctaaactaaaataatttacactacacggtaaacaattc

SEQ ID NO: 5015 - DNA, 1037 bp, Diabrotica virgifera
  SmartBlast Evalue=6E-57; Info=Aquaporin n=1 Tax=Culex quinquefasciatus RepID=B0WQA3_CULQU
tattaaatttatttataacaaaatacaataaacattagatcattcaaaaaagaataaacaactgtaaacaatgttgtagagtttcataaagtatccctaggaattagaactctcatgctttgggattgagcggaaacgattcgggcaaaggtaaggtttctttagaagaaggttcagtctttctgaagatcaaacggtagagaacagctccgacaaatccagccgacagtggacctagccagtaaacccagtgatggttccagtcgccattaaacaacgcaggtgcaaaacttcttgctgggttcatattagccccagtgtacggtcctcctgccattgccaatacagcaatgagaagaccaaatcgaatagctacggaatcgtgctttgtgctatttctggaatcccaaacaccacagcagaaaaggacgaggattaagcacaacataaattctacgaagagagcttgaggggcgcttattaagggattaatggctggcgagcatactcctgttccaattttggcaccagtgctgttgttgtatacgttgcccatgtaaacatcaggggttgcaaccaaaagaagagcatatcctaacaatcctccaatcatttgtccgacaaagtaaactggaacctgaattaaagctatatctcccaaagttgccgctgcgacagtcactattgggttaatgtgtgatcctgaaacgtgtccaaaagtctggactgctaccattacagctaatccgaaagtaaaggaaatttgttcgtggggaattacacctccggaagccaaggagctaacacagcccatgcaacccaaaaaaacgagcatggctgttcctccaatttctgcggcgcatattgttactctgtctttggtcgacatgttgtcggtaagttgtattacttttcctttgaccattgttatctaaatccttttcgaaaacacactaaaaccaaaaacaatcaccacaatcactcgcgccgagtgcagaacttcaaaagccttgtgccggacgcaccgttcaaatgct

SEQ ID NO: 5016 - DNA, 1123 bp, Diabrotica virgifera
  SmartBlast Evalue=1E-45; Info=LZIC n=4 Tax=Percomorpha RepID= C3KK42_ANOFI
gtccctagtttttgcagaaatcatcgccatagattattttctggctttatggcaacttttagaaaatattaaatgtatagtggatcattaatattaaagtattatgactcatcaggtaaaactggacttttagtttaaagtatactcagaacttagctactatataactatatttgcatgtttatttctatttaaaaagtttttttcaaaaaaagctcatgccattttttacaatattttaatgacagtattgtaactgtgacaatagtgaattgtactggtaaatacgaaattattttgtaatcaggatttaaagacatcagtctaaattcagtcataagtgactcgaaaatttataattaatttggaagtggctggtagttactatccaaccaaataccgtacgtgtattttatatgctaattataaaccgttttaaacaaaaaatcaaattttaccaggtgactaataattggatcagtaccaccacatagtttcttatttatgattaaaaattcacttttcgtatttacttcctattctacccaatggcttatatatttggttacgtataaaagtacatatttaaacatcaaatccgtttattcgtcatctggcacttctataaagttaaaatctaaaaatgctttcgcaatgtggttatgttgttccaaaaatcttagttcctctgtggtcaattgttcgtttaattgtctcaatgcggttaaaatttcagccttctgactgtccctagcttctaaactgagcttatttagcttcacttcttcgtctattatacacaacctttctcgcaattgttgaggttcttttttgccaaaaagtcttatgacttctggcgtcttaaaggcctttgatatggcagcttgtgtagccagctgaacagcacttagtgcactaattagagaaatgtctccttttactaatttacttaaactatcattaagttccttaagttgatccatagtgtcattttttgtttcctcatattcctctttatccagttcatttttgcaattctccaaatcctgcagctgctccactaatctgtccaactgattctccaaattttgctttagtttttcagtttccgcttttccgtgag

SEQ ID NO: 5017 - DNA, 967 bp, Diabrotica virgifera
  SmartBlast Evalue=3E-21; Info=LZIC n=4 Tax=Percomorpha RepID= C3KK42_ANOFI
gtccctagtttttgcagaaatcatcgccatagattattttctggctttatggcaacttttagaaaatattaaatgtatagtggatcattaatattaaagtattatgactcatcaggtaaaactggacttttagtttaaagtatactcagaacttagctactatataactatatttgcatgtttatttctatttaaaaagtttttttcaaaaaaagctcatgccattttttacaatattttaatgacagtattgtaactgtgacaatagtgaattgtactggtaaatacgaaattattttgtaatcaggatttaaagacatcagtctaaattcagtcataagtgactcgaaaatttataattaatttggaagtggctggtagttactatccaaccaaataccgtacgtgtattttatatgctaattataaaccgttttaaacaaaaaatcaaattttaccaggtgactaataattggatcagtaccaccacatagtttcttatttatgattaaaaattcacttttcgtatttacttcctattctacccaatggcttatatatttggttacgtataaaagtacatatttaaacatcaaatccgtttattcgtcatctggcacttctataaagttaaaatctaaaaatgctttcgcaatgtggttatgttgttccaaaaatcttagttcctctgtggtcaattgttcgtttaattgtctcaatgcggttaaaatttcagccagctgaacagcacttagtgcactaattagagaaatgtctccttttactaatttacttaaactatcattaagttccttaagttgatccatagtgtcattttttgtttcctcatattcctctttatccagttcatttttgcaattctccaaatcctgcagctgctccactaatctgtccaactgattctccaaattttgctttagtttttcagtttccgcttttccgtgag

SEQ ID NO: 5018 - DNA, 1499 bp, Diabrotica virgifera
aggagatctagagctctttgaagatagcgccttgtaattagttttttttaatatctccagaacacttctatttagaaaacgaaaactgctatccctatttatcatctagatataagtttctagtgccggtcataagcgtccgttttggatagggcaaccgttattttatcgcatttttttttgtctttaacttttgagcgtttttgacacttgattgttacattgtgaggtattatagtactgaaaggtatgattaccgtagcgttttctagaaaaatagatttgaaaatttttcgttttttgaatatgaaaaaaatttaaaaaattttcaaaaaaagcggtgtattttaccgacttaaagcaagaataacttttagtactagaatacctcataatttaatagtctagtgtcaacaaagcttaaaattggagacaaaaaattatgcgataaaataaccgttgcaataacggacgccaatgatcagtactagaaattagcaattgatgaaatcgattcatctctggaagataaataggccagtactagttttcgttattctacatagaagcgttaatctttaaagagctctaactcccttgggaagcagtttcggactaggtaaattgggttaaattgtcttcaaattatctgaagaatatccggtctttagtttgtcaggagttacgggataccctgtataacctaaaaaaaaaagtggaacaaacaccattttacatcatattctctagtaaaatgtgtggtattgttaatttttttaattagaacaaaattctataaaacattttgaaatgagtacaaaattttgtatttttgtcaagtcttcaacagttctgtattgaaaaacgatagcatcccgagaaagcttatattttaagaggattttccatatattttagaagactgattatgaaaaactctacctatacggtataatgattttaatagctagtgaaatcgtttttccctgtgatagtttgatctgagatgaaagaaatatgacggctgtgagaggtttaagaactgttttatctaggtactctatctcattgttatgtacctataaatgtttagtttgtgaaaactgtcattatagatagcagtgcgtgaagggtttaaagtgtgcgtgaagtaacaatgtattttaaatgggatttactttttcgcactgtttttgacacactttcatataatcaaatatccttaactttcgcgttgtcatggtgatgacatgtgagcaataaattacaacaaaagtttgacagttttgtggtttgaaagaaataagaatttttaaatgtcaaagttctaaaaattgtagaatagaaatgaattccagtgacgaagagttacagtttttttatttgtttatcgtagataaaatattgtatgaagctgtgcgtgaggtgctttttgcgaacttacgcgatgtatagcactcgctccgttgtcgctcatgctctaaacatcgcgtgcgttc

SEQ ID NO: 5019 - DNA, 578 bp, Diabrotica virgifera
tcaatgtactataagttgctaaccgttgctaagggcacccgacacaataaatcacatttgcaaagaaaaataatctgcactacacttaaaaatcatttttaatatttaaatgtaattttcgtttataataattttatctactctatctcatattatgtgtataagtttttagtttgtgaaaactgtcattatagatagcagtgcgtgaagggtttaaagtgtgcgtgaagtaacaatgtattttaaatgggatttactttttcgcactgtttttgacacactttcatataatcaaatatccttaactttcgcgttgtcatggtgatgacatgtgagcaataaattacaacaaaagtttgacagttttgtggtttgaaagaaataagaatttttaaatgtcaaagttctaaaaattgtagaatagaaatgaattccagtgacgaagagttacagtttttttatttgtttatcgtagataaaatattgtatgaagctgtgcgtgaggtgctttttgcgaacttacgcgatgtatagcactcgctccgttgtcgctcatgctctaaacatcgcgtgcgttc

SEQ ID NO: 5020 - DNA, 1097 bp, Diabrotica virgifera
  SmartBlast Evalue=1E-48; Info=Thymosin isoform 1 n=1 Tax=Bombyx mori RepID=Q1HPK5_BOMMO
tagatgatttattgaagcaccataattcatgcaaaattaatttctttcataaactagatctagtgatataatgtctaaacagaataagtacaaatgattacaatatcaaagaaataaaaagctagaacaatttataaaacaacaacaattttctttaccaaactgcattcaaatgcattgatatctttggtaatccaaagctatcaatgatccaaaattgatatttttggatcattgatatctttggaaaaatccacgtgtgctgtaaatgtggaatttttttggttggtgattattgttgtttaataaaaattctcgaatctgtatctgaccttaaatagttatcttacaatataaataggtatcaaatattatataaaagtataaaataatacaaaaattggcattgagttgagccccaggaatataactatcttaagcgctcttttcctggtcgataatttccttagttggtaaggggttcttttccaaagtttctgcatgtctcagtttggagttgtcgaaattttcaatgccagagataaggttcatttgtcccttttcctgttcgataactgctttatcgggaagaactactttttcttctgtttctgtgtgcttcatggtagtcttatcgaaatgttcgacgccattaagtagtgtctggtgtgttttttcttgttgtacagcttctttgtctggcaacggattcttttcttgcgtcaaagtatgtttcaacttgctagtatcaaaacgttcaattccttcaataagagctttttcggttttctcagcagccacatcttcagctgatggtagaactactttttcgtgtgtatcagcgtttttaagattgcttgatttgaatgtttctaattcactcttgaggtcacctgctactttgggaaggtctttgagtgctggtggggctggggcagctggtactgtgcaagacatctttgatatgatgagtgtttccaaaaggtgaaatacgtaaaaagatttataaaaagtaactgtacaagactttaccggttatcacagctgatattattctcactcggtcaacttaccgctctcacgctggaagcagaaat

SEQ ID NO: 5021 - DNA, 982 bp, Diabrotica virgifera
  SmartBlast Evalue=4E-37; Info=Thymosin isoform 1 n=1 Tax=Bombyx mori RepID=Q1HPK5_BOMMO
tagatgatttattgaagcaccataattcatgcaaaattaatttctttcataaactagatctagtgatataatgtctaaacagaataagtacaaatgattacaatatcaaagaaataaaaagctagaacaatttataaaacaacaacaattttctttaccaaactgcattcaaatgcattgatatctttggtaatccaaagctatcaatgatccaaaattgatatttttggatcattgatatctttggaaaaatccacgtgtgctgtaaatgtggaatttttttggttggtgattattgttgtttaataaaaattctcgaatctgtatctgaccttaaatagttatcttacaatataaataggtatcaaatattatataaaagtataaaataatacaaaaattggcattgagttgagccccaggaatataactatcttaagcgctcttttcctggtcgataatttccttagttggtaaggggttcttttccaaagtttctgcatgtctcagtttggagttgtcgaaattttcaatgccagagataaggttcatttgtcccttttcctgttcgataactctttgtctggcaacggattcttttcttgcgtcaaagtatgtttcaacttgctagtatcaaaacgttcaattccttcaataagagctttttcggttttctcagcagccacatcttcagctgatggtagaactactttttcgtgtgtatcagcgtttttaagattgcttgatttgaatgtttctaattcactcttgaggtcacctgctactttgggaaggtctttgagtgctggtggggctggggcagctggtactgtgcaagacatctttgatatgatgagtgtttccaaaaggtgaaatacgtaaaaagatttataaaaagtaactgtacaagactttaccggttatcacagctgatattattctcactcggtcaacttaccgctctcacgctggaagcagaaat

SEQ ID NO: 5022 - DNA, 1767 bp, Diabrotica virgifera
ttttatagaaataaaattattaataataaataataagaaacatttcaaatataaattttataaattttgattatatttatagggaaatttttataatacttacagtacaggtacttttcgagttttttgattggcaaagatgtctataattttcgaaaaatcgcaagattttaccaaatcatcaatgtacaattgctaggccagttaaccgatcctatttcattgtatatctcatagcatttttaatgcgagaaagacaactaaaggatattttctcttcagcgggttaaattgcttaaaaaaaatctctgacaatattaaatacttcacagcaaaatatttcgtcggactcaaaattatcagtcacgtcactactaggcccagacaaatcatcaaaaaatctggcaagcttcttgcgccgtttttagaataaaacaataaaatatattttaaaatagaggtaaagctcatataaaatatagccgagtgttaattaaacgcattatgcacataaagtgaagagcaaaaaacgggaaaaattacgtctttggtctggtcgacgccgggccccttacatcgccgggcctcggtaaaatgtaccggctgtaccctcctcttggcgggcctgaatacaatttacattaatagatatttattttaagacataattttaaaaatatatttttccacgaaatatcaaatgtgttatcagtatattattcaacgagcatgtaatgataactattactcacgatgatgaagtttacgacgtcgtaattcatcagagtaattcattacatacgagtagaatactattctttttcttacgacctttttttaattttaattagtagaaaatataattatcagctactaacatttaaaatcgaaagattttattttcataagaaacatttatataactatggcaacactttagaattactttttgagcttatgaaacagttgtcattagtgtcatttcgtgttgtttcatggtatataatggagggtaatggaggtgacttttaaaaatgacaattttattttaaatggcaattacatgaaaaaagaacgtttgccccagataaaaatttattgtacaatcatcagtaagtaaaacagaattcattgatataaatttcatatctgtaaacagtctacccttttttatagtaacagtttacggaactagtactcattgtttacgtttatcttttaataacatccaatattcaaatgatgcaatttaaacataaaaaatgtactgacccattgttacagtgaaaaattctttaaaatttttttaagttattatcctttaaaaagttaattattgatataaattacaataattattgtaataataaacaagtttaagtaattttattttcatttgcagtttatataggactaatacattaaaattggcatgaccacttgaacctaacttcaatccgtgagtaatgacccgtgagtaatgaactattactcacgggtaaagtaataggtgttattatctattcaaaaatagtgaataaagagcatagtattaaacggtcgtagaaaaaaatgtttatcctgatgctggttcgttaaattgataaacgtaatttcaatagtaactctaataaaagttagtttccacgttcacaaaaagaatcagaataattccattttgatgttacgaattgacggcgttacgaattatccgttacgaaatgtcttgtcacgatctaaaacaactctgacaagatctaaacatcg

SEQ ID NO: 5023 - DNA, 296 bp, Diabrotica virgifera
ttttatagaaataaaattattaataataaataataagaaacatttcaaatataaattttataaattttgattatatttataatagtgaaaatatttataatacaggtgcttttcgagttttctgattggcaaaaatgtctctaactttttgaaaaatcgcatgatttttgccaaattattctcaattcacaaagttgctaagcagctaaccgatcctgtttcattgtagctatcattacctcatagcatttttttatgcgaaaaagaaaactaaaggatctttctgcttctgcgac

SEQ ID NO: 5024 - DNA, 1639 bp, Diabrotica virgifera
  SmartBlast Evalue=4E-14; Info=Endonuclease-reverse transcriptase n=1 Tax=Schistosoma japonicum RepID=C7C207_SCHJA
acagtaccggtttggagatctggcgagtatactataagcataaagatccgaatattccagtcaaacgtcatgtatgttctactctacggatgtaaaacctggaaagtgacaaactgtaggtctttgttaacaaatatctactaagaatcgttcatattttctgacctaacatcatcagaaacgaagatctactacaactgaccgaacaaaagaggatagagcatgaaataaagtccagaaagtggggttggatcggtcacacactccgaaaaaatagttccagtattgtaaagactgtcctagagtggaattaccaaggaaaaagaaaaatcgcccagcacaaatttgaagaaaatcatggacccagcaataagataccttaaacatacactgttttgaagcttcgatagaatgtgactctttctcaatgagcataagcgtgcttgaatttttactcgtggggataattattcagacgttaataattggaagtagtaataatttgtaaaaacacattcaaagaatttaatttaaaaaaaaaacagtataactatgtctacttacaatttaaaaatgtctatactaatttaatgtatgtactatttcattagtatgaaggaacccaatgatacgcatatgaaagacatattttaaaatgtaaacaaacttcctcatcctctataatataaataaacagtatgtatacttacaaatgaaatgttgcaaatgcaacactctagcaccattattatgataatttatttcacttttcacaaatatcactcaaaatagagccaaaatagcgaaaaacaactcttcctcatctaacttaaaaagtaaacaaacttttgacaacttacaagatgtttgtaaagacagagaaatgtaaacaccgttgccatttataaatagttttcagtgcttctacgtaatatacaataattggttgatatctattattcaatgatatgaacacttgctattttaattacaattcaatatgtaaattaatataactgaaaaattattattttagtttgatagcatattatgtagagtataaaataaggagtaacatttccagcgatacacgaataagaaattttaataaaaaaacgtgacatgtgaaggtgcttagattgtgaccttttcaaataatttcggcttcacaattttatgtaaataactgagtccatctgtgtttatacgcccatgaagaaaatccatcatggactagataagaggtcaaggaaagtcttgggatgaagtgaaggccttagcgcaaaatagaacccgattgcgtgatttcactgacgctctatgctccacttaggggttcaagaaccttcgcctgatagtgatcgtattcggggtagactgtgtgtccgacaagtcagtgagaaaatggagtgccagttttcgtacagaccgtaagagcttggttgatgaaccgagacacgtctccagggtgcatctaaacattccgtatatgtatctggcacctaggagccttccattggttccctgcgtcacgcggtcatacttcaaccaatacgcggcgaggcgccaaacgcatatacggaatgttactcggtgcgaaattcatatacggaatgttaaatattcgtagacggaaaaa

SEQ ID NO: 5025 - DNA, 401 bp, Diabrotica virgifera
  SmartBlast Evalue=3E-20; Info=Endonuclease-reverse transcriptase n=1 Tax=Bombyx mori RepID=D7F173_BOMMO
acagtaccggtttggagatctggcgagtatactacaaggacaaagatccgaatattccagtcaaatgtcatgtatgttctaatctacggatgtgaaacctggaaagtgacaaaaacctttacaggcaaactacaggtccttgttaacaaatgtctatgaagaattgttcgattttctgaccaaacatcatcaaaaacgaagatctattacacctgacccaacaaaagagggtagaaaatgaaacagtccagaaagtggtgttgaatcggttacacacttcgaaaaaatagttccagtcttacaaagactgccctagagtggaatctcgaaggaaaaagaaacagaggtcgccgagcacaaacttggagaacatccatcatggacgagataagaggtcaggg

SEQ ID NO: 5026 - DNA, 1182 bp, Diabrotica virgifera
tttaaaagaaagtttggaattttaatatctttgtttcaacccgagtaaatgttgtagggttccccgaaagtaattaggatggtcggaataattttgaaaatgactgtttgtttgtcgaatggaaaagagaaatgtttctgattcttggcaatttggaaggggaaaagtggtttgaatgattgagtgagtttgaaaagaagcattatgttattggcatcgctgaggagcagttcgacgttttcgtggatagatagttagcaagtaccagtggttgtttgatagtggagaatagtgctgaaaagtggaacgagagacagatcaaattgagacgaaatacctctttgattctgtattattgtgagaaggagagcagagaatttttggagttttgtttgaatcgagtacgtgtcaaaagaggcccggcttgttggagaattggtgctggtatgctgatagttttgaagctggagaacggagagggctttgatgagtagcctttaacatagtcaacgagggagagctgttttgggtcacgagaagacatcagagtgagtgaagcaaaaggtcagtcaatttatgtgaaagagatttttatgttcggaaactaaattttgagtaaaaagcatatgaattaaaattccaatatttcaaaatagtaaatagtaaatataggtaatcttgcgaatacataaatttgttttgtttagtttgttttaccaaagtcatcgggaacaaaccgataaattgtttttttttaactataataaatttaagtggtaaaaatttcattcggacatctgtgtccacaggttttagatttgatagattttagagtattgattttgataaataaaagacaattctgtatgtttattttaatattttgctttatttcttttccctattttatcccgattaggatcaactaagagatactgaacccacgagagaagataagtataacgtgagataatttagattttttttaatagtataaaaaggcaccctgagattttttattcatttttatgtatgatttgcgacaattaaataattaatcagataaataataattaatataaaattaataagaagcagatcataacaatatataaatagttggttttttaattcctgggtttgcggtctgttataaatcaaaacactgattttgctcagacg

SEQ ID NO: 5027 - DNA, 859 bp, Diabrotica virgifera
atcgagacgaaatacctctttgattctgtagtattgtgagaaggagagcagagaatttttggagttttgtttgaatcgagaacgtgtcaaagaaacacggtttgttggagaattggtgctggtatgctgatagttttgaagctggagaacggagagggctttgatgagtagcctttaacatagtcaacgagggagagctgttttgggtcacgagaagacatcagagtgagtgaagcaaaaggtcagtcaatttatgtgaaagagatttttatgttcggaaactaaattttgagtaaaaagcatatgaattaaaattccaatatttcaaaatagtaaatagtaaatataggtaatcttgcgaatacataaatttgttttgtttagtttgttttaccaaagtcatcgggaacaaaccgataaattgtttttttttaactataataaatttaagtggtaaaaatttcattcggacatctgtgtccacaggttttagatttgatagattttagagtattgattttgataaataaaagacaattctgtatgtttattttaatattttgctttatttcttttccctattttatcccgattaggatcaactaagagatactgaacccacgagagaagataagtataacgtgagataatttagattttttttaatagtataaaaaggcaccctgagattttttattcatttttatgtatgatttgcgacaattaaataattaatcagataaataataattaatataaaattaataagaagcagatcataacaatatataaatagttggttttttaattcctgggtttgcggtctgttataaatcaaaacactgattttgctcagacg

SEQ ID NO: 5028 - DNA, 1116 bp, Diabrotica virgifera
gacaaaaatatgggttactttattaagaaaaacaatttaaaacattatgttactttatatttacttggtttacatgcaagacttttattattttaaaaatataatttttaattcttttgaaactttgttgatactaaaatttaaaaaaaaaattgggtgaagtgactatagatggcaattgatttgataacttcgtatctaaaactactagtttaataatgaaagttatatcggcccttttttgtcgtttattggattattcttgttgagttgacttttaaccgttaaaatgatcttttaaggcttaaggtatattattttattatattttgatctaataaatgaagtctgaccactgtggagaaaatatagaggaacctgtgatatctaatcagcagctccttttaaaaaccttttacttgatcatgaattgggtgttgcttttgtaagcaaaaacaagtgtggcttatcacatcagactatttttataggttgtatgtaatttattaggccaaaaggcgcattttgttcgttggacactaatatttttgaaataaatattgtcaaatcaaactgaaatttagatttaatgtcgatgtaaggaattgtaatttacatgaccttgatttggttgtgataaaattctacctcttcgccttagccaaagtcccaaaccaaacacctagaataacttaatgtagatagaagtggacagagacagataaacaagctgaaaatgcgagcattatcataacgaaaactttgtttatatacgtattaaattcataatatggaaaattgctgttataaaaagttgtttagaattgaaactactcttgtactaagtactttacttttgagcgaaattcatatttttttgacgttcctcgtataaaattgatttatgatggttgcatcttagattttggatcagagctttttatgaagaataacttttcttcgtaaaattaataataaaagagttatcataaatgaaaatgatgttgggtatccgtaatttgagaaaatattttttacttctgagcgaaattcatatttttgacatatattatattatttcgtataatatagataaaatttgatatctgatgatcg

SEQ ID NO: 5029 - DNA, 911 bp, Diabrotica virgifera
gacaaaaatatgggttactttattaagaaaaacaatttaaaacattatgttactttatatttacttggtttacatgcaagacttttattattttaaaaatataatttttaattcttttgaaactttgttgatactaaaatttaaaaaaaaaattgggtgaagtgactatagatggcaattgatttgataacttcgtatctaaaactactagtttaataatgaaagttatatcggcccttttttgtcgtttattggattattcttgttgagttgacttttaaccgttaaaatgatcttttaaggcttaaggtatattattttattatattttgatctaataaatgaagtctgaccactgtggagaaaatatagaggaacctgtgatatctaatcagcagctccttttaaaaaccttttacttgatcatgaattgggtgttgcttttgtaagcaaaaacaagtgtggcttatcacatcagactatttttataggttgtatgtaatttattaggccaaaaggcgcattttgttcgttggacactaatatttttgaaataaatattgtcaaatcaaactgaaatttagatttaatgtcgatgtaaggaattgtaatttacatgaccttgatttggttgtgataaaattctacctcttcgccttagccaaagtcccaaaccaaacacctagaataacttaatgtagatagaagtggacagagacagataaacaagctgaaaatgcgagcattatcataacgaaaactttgtttatatacgtatttaaattcataatatagaaaattgccattacgaaaagctgtttagaattaaaaaattaatgttttaatgtgcaagtattaaaaattatgtttaatgtgcaagtatatcattctaatttaaatgttgtgaacta

SEQ ID NO: 5030 - DNA, 1050 bp, Diabrotica virgifera
ggctcagcaaagtataaaaaaatacaaatatgtgatattttcaaatgatttattgctgtttattattaagtgtattatatttaataataaacaccaattaaacattcaaaaatatcacatatttttatttgttcaatattttgctcggccccctttaacttcattaccgctagcagtggcggctcgtggtaatttaaggagggtgttcaattaaagaatgtaattatacaaacggtgaataagcgccgcaggcgaaaaatttttggggcctcgccaaaagatgttctgtaaaatgaaacctatctttgacccgattagtcaggatgtcacacactttttttgttttgtgcagaatatgatacctactgaatgatggcgcttcttcggtggtgaaggtggacgcagaagttacgaatattgaaatggctttgtcaaaactgtttaaaaatccgtttattttaacggcatccaaagaccgagattgaaattatagttttattctttgaaaacactaaacatggaaaacaaaataaagaatgtagtttatcacacccgcataatcacgaagtttttctatattgttcaactttaaaacaatgtttaaactttttgtttcttattgcacattcttgtaccaagtttatctccggccaagttagtccattctttttataagaagtcgattttcaaaactatttgcattttcttttataaacttcactgaataaggctccatcctaaaaaaactacctaccaatattgtatttaataaattcccataatagaaaatgccaaactgtgaatcgaaacgctccaccccggtctctgtgtgcagtgcacaaatcctcaatgttttaagataaaagaatcgctggttcacggatttaagagctctcgttcttctatagggttactgtatagtggctgggttcaatttgaattctgcacttaccacgtgcatctagcgtagcggtgttgtgcaaataaattatgtgattaataaatacagttatattttaatgatactatgatatttatgagatttaagaa

SEQ ID NO: 5031 - DNA, 984 bp, Diabrotica virgifera
aactatcgaatatgaacattttttcatttggttgactgcaaactgacgaaaatggtatattcgatacttttgttttgtataaatataactaaaggtataactataggcagtggcggctcgtggtaatttaaggagggtgttcaattaaagaatgtaattatacaaacggtgaataagcgccgcaggcgaaaaatttttggggcctcgccaaaagatgttctgtaaaatgaaacctatctttgacccgattagtcaggatgtcacacactttttttgttttgtgcagaatatgatacctactgaatgatggcgcttcttcggtggtgaaggtggacgcagaagttacgaatattgaaatggctttgtcaaaactgtttaaaaatccgtttattttaacggcatccaaagaccgagattgaaattatagttttattctttgaaaacactaaacatggaaaacaaaataaagaatgtagtttatcacacccgcataatcacgaagtttttctatattgttcaactttaaaacaatgtttaaactttttgtttcttattgcacattcttgtaccaagtttatctccggccaagttagtccattctttttataagaagtcgattttcaaaactatttgcattttcttttataaacttcactgaataaggctccatcctaaaaaaactacctaccaatattgtatttaataaattcccataatagaaaatgccaaactgtgaatcgaaacgctccaccccggtctctgtgtgcagtgcacaaatcctcaatgttttaagataaaagaatcgctggttcacggatttaagagctctcgttcttctatagggttactgtatagtggctgggttcaatttgaattctgcacttaccacgtgcatctagcgtagcggtgttgtgcaaataaattatgtgattaataaatacagttatattttaatgatactatgatatttatgagatttaagaa

SEQ ID NO: 5032 - DNA, 1286 bp, Diabrotica virgifera
  SmartBlast Evalue=9E-20; Info=Endonuclease-reverse transcriptase n=1 Tax=Bombyx mori RepID=D7F157_BOMMO
aggaaacgcgataacgatatctggaacaattgttttatctgataagaaacgaagaagagcagaaattgctatcaaaataaaaaattatagtaaataaagcagtgtggattgtttctgtgtttgaaaaaggttatgggtttttatgagcttctccggacgggtcagtaggtgacaataatattgtggaagttaagtgactgtattcatcccgagaatatacacctctagagacagccgaatccataaaaacatgtagcttgttaagtgaatgtccctaaagaaaacaataacttcttctttagcctgtttgcatccactcctggacaaaggcctcccatgagttctccactcttctctgttttgtgctatttggtaccagtttctccccacttttgctttgaagtcatctagccatcgtttttgtggtcttcctctgctactactatgctcgcgtggtctccaatgtacaatgttctcgtccacctttcgttgttttgccgtgcctcgtgtcctatccagttccatttcatttgcgcaattcttccaattacatattccaccttagttctgtttcgtacagagttaggagtatctctcagagatactcctaacatagctcgttcgatggccctctgtgttcttaatctactggctgataaccctgtaagtgtcacggtatccactccatcagtcataacgtagaatacgactgttgaatacccttttttctagatttattggtatctttttgtttttcaacacatcactgagtcttgcaactgctgatcaagtaattcggattcttctagttatctctgccgtttgattctgtttgcctagcttgatcgtgtgactcttcgacagtttagatctcacttgcatctaagtcgattctgatattttgatttgtaattacttttattttaaatgttgaatgggttgcatgtgacagttcattttaatgaagtaaaaaacagacgtactctcaatcatttattgtaacttccaacgaccggtttcgctctctataatatgcagagcatcttcaggtcaacggttacaagtcactaaatgctacaaataaaaaccagagttagaacaatgtctggttgtaaaagatgctaaagatccataagatcaagcctatattgaacaacataaataaaaagtagttaagacagcagacaaatacatatgcatgtacaatcggggacggcaacaaacgtccccaagcataacatgcacatgtatgccgtctgtaatcatgcaatgataacgtgtcgtac

SEQ ID NO: 5033 - DNA, 699 bp, Diabrotica virgifera
  SmartBlast Evalue=2E-21; Info=Putative uncharacterized transposon-derived protein F52C9.6 (Fragment) n=1 Tax= Camponotus floridanus RepID=E2AL50_9HYME
aggaaacgcgataacgatatctggaacaattgttttatctgataagaaacgaagaagagcagaaattgctatcaaaataaaaaattatagtaaataaagcagtgtggattgtttctgtgtttgaaaaaggttatgggtttttatgagcttctccggacgggtcagtaggtgacaataatattgtggaagttaagtgactgtattcatcccgagaatatacacctctagagacagccgaatccataaaaacatgtagcttgttaagtgaatgtccctaaagaaaacaataacttcttctttagcctgtttgcatccactcctggacaaaggcctcccatgagttctccactcttctctgttttgtgctatttggtaccagtttctccccacttttgctttgaagtcatctagccatcgtttttgtggtcttcctctgctactactatgctcgcgtggtctccaatgtacaatgttctcgtccacctttcgttgttttgccgtgcctcgtgtcctatccagttccatttcatttgcgcaattcttccaattacatattccaccttagttctgtttcgtacgtcccatttcgaaatatgttctctcagagatactcctaacatagctcgttcgatggccctctgtgttcttaatctattggctgataccctgtaagtgtcacggtatccactccatcagtca

SEQ ID NO: 5034 - DNA, 1022 bp, Diabrotica virgifera
  SmartBlast Evalue=2E-50; Info=Reverse transcriptase n=2 Tax= Ostrinia nubilalis RepID=A4KWG0_OSTNU
cgtctgtccatcttgtaggcagtcaaccgacgcttatcttgtcttttcttggcctccattccaataacctttttgtccatcgcccatctgtcattctggctatgtgtcctgcccatctccacttcaacctggctatccttttgatgacgtcagtcacctttgtccttctcccgatttcttcgtttttgattttgtctcgcagaattattcctaacattgagcgctccattcttctctgcgttactcttagtttggtagccgaggctttaggtaaggtaagtgtttctgatccgtacgtcaagactgggaggacgcactgatcaaatacctttctctttaggcatgtgggcaactcactcttaaaagtttctctcagttttccaaatgctgcccacccaagaacgattcttctttttagttcatgtgtctggttatccctgccatcgtaatttcatgtcccatgacatgaaatatgtccaaaacttagaataataatcttttattactaattttacatttacattttccctgcttggccccatccttacatacatttttggcttcatcctttattgttcttctcatgcatgcttctattttatctttttaataaaaacttaaaataaaataacatatttattattccaatattttattttgcttagtaaaaatttttgtataacaaataatatacgatgttgccagtagtttcgaaaaaatagtgaaaaaaatgtgtaaaactttttgttcttcaacgccctgtatcgtgaaaacgcatgccgttacaaaaatcttatactaagcaaaccccaattatttttcagtttttcacctatcttagagatcgtgttacctttttctgaaacaccctgtatatataagaaggcacttatggaataaaattatttctgtccatattttaatcaattttaaaaaacgctgagacccgtagagtttcatatataaaaacataaatttaaatgtacagggtgattcatgcaagactaccgtagtccataagc

SEQ ID NO: 5035 - DNA, 997 bp, Diabrotica virgifera
  SmartBlast Evalue=1E-14; Info=Endonuclease-reverse transcriptase n=1 Tax=Bombyx mori RepID=D7F164_BOMMO
atatatatatatatgtgtatatatatgtgtatatatatatatgtatatatatgtatatatataggtgtctatatatatatatatgtgtatatttaactttaatatatatatgtgtatatatgtatttgtttttatttaaatatttatcattaaatttgtaattaataatatattttaattaatatttaaatttattaaatatttatttagtaagtaaaaaaacttcagaacaaccgaggctttaggtaaggtaagtgtttctgatccgtacgtcaagactgggaggacgcactgatcaaatacctttctctttaggcatgtgggcaactcactcttaaaagtttctctcagttttccaaatgctgcccacccaagaacgattcttctttttagttcatgtgtctggttatccctgccatcgtaatttcatgtcccatgacatgaaatatgtccaaaacttagaataataatcttttattactaattttacatttacattttccctgcttggccccatccttacatacatttttggcttcatcctttattgttcttctcatgcatgcttctattttatctttttaataaaaacttaaaataaaataacatatttattattccaatattttattttgcttagtaaaaatttttgtataacaaataatatacgatgttgccagtagtttcgaaaaaatagtgaaaaaaatgtgtaaaactttttgttcttcaacgccctgtatcgtgaaaacgcatgccgttacaaaaatcttatactaagcaaaccccaattatttttcagtttttcacctatcttagagatcgtgttacctttttctgaaacaccctgtatatataagaaggcacttatggaataaaattatttctgtccatattttaatcaattttaaaaaacgctgagacccgtagagtttcatatataaaaacataaatttaaatgtacagggtgattcatgcaagactaccgtagtccataagc

SEQ ID NO: 5036 - DNA, 1076 bp, Diabrotica virgifera
  SmartBlast Evalue=8E-99; Info=Glyoxylase n=1 Tax=Glossina morsitans morsitans RepID=D3TNM7_GLOMM
acgaaattatctttttcttttctaatgcttttcatagcttcgattggtgatgtacagcccgcatgattttggatcacgcttgtagtcaccctcataaacggattgtaggtcttttcttctccaattgtagatggcaccgttggtagcccttttttcctctgcccttcagcccattctattttcttgagtacatcttggttgttttggtcgacagatttggcaaattttagattttgtaatgtgtattcatgaccgcagaagacccgtgtgttatcgggtaactttcccagtttttcaacaagtgcagaatacatctgttcagctgttccttcaaaaaatctaccacaaccagctatgaataacgtatcccctgtaaaaacagcaggatcttgtccaggtgcagttaaataataacatatgtgtccactggtgtggcatggtgtaaataagcattccactgcgatatctcctatttgaaacttgtctccttgttttacttcttgagtcaaaccaccaattctttgatctcctcccaaaacctgcaactttcctgaagctttattaataagttgttcattaccaccagcatggtcccaatgatgatgtgtagtcaaaatctttgtaagattgactccttctactttaactgcctccaacacagtatcaggttctactggatctattattgcggcttcttttgtattttcacatgaaatcaaatacatatagttatctgaaagggctggaaggatttttatcttcattttctcaaatgttattgtaagttgattactgtgatatcctttaaaaccgtttctccaatatgcttgtcctttaaaatatgctgctattgccccttgagtaatacagtttggaatgtgtgcatttaaaaaactcagcattataaatattcaaaaatgtcaaatcatttgagttttattttaattggattagctaaccttaattacaatgcctgatctttgtttttctgttctgattctggtgtgtgccacttttgctacacttttacaaattatatctaaaaattataaacttgtgctaaacccagttaaacc

SEQ ID NO: 5037 - DNA, 949 bp, Diabrotica virgifera
  SmartBlast Evalue=3E-95; Info=Glyoxylase n=1 Tax=Glossina morsitans morsitans RepID=D3TNM7_GLOMM
acgaaattatctttttcttttctaatgcttttcatagcttcgattggtgatgtacagcccgcatgattttggatcacgcttgtagtcaccctcataaacggattgtaggtcttttcttctccaattgtagatggcaccgttggtagcccttttttcctctgcccttcagcccattctattttcttgagtacatcttggttgttttggtcgacagatttggcaaattttagattttgtaatgtgtattcatgaccgcagaagacccgtgtgttatcgggtaactttcccagtttttcaacaagtgcagaatacatctgttcagctgttccttcaaaaaatctaccacaaccagctatgaataacgtatcccctgtaaaaacagcaggatcttgtccaggtgcagttaaataataacatatgtgtccactggtgtggcatggtgtaaataagcattccactgcgatatctcctatttgaaacttgtctccttgttttacttcttgagtcaaaccaccaattctttgatctcctcccaaaacctgcaactttcctgaagctttattaataagttgttcattaccaccagcatggtcccaatgatgatgtgtagtcaaaatctttgtaagattgactccttctactttaactgcctccaacacagtatcaggttctactggatctattattgcggcttcttttgtattttcacatgaaatcaaatacatatagttatctgaaagggctggaaggatttttatcttcattttctcaaatgttattgtaagttgattactgtgatatcctttaaaaccgtttctccaatatgcttgtccttaattacaatgcctgatctttgtttttctgttctgattctggtgtgtgccacttttgctacacttttacaaattatatctaaaaattataaacttgtgctaaacccagttaaacc

SEQ ID NO: 5038 - DNA, 1502 bp, Diabrotica virgifera
  SmartBlast Evalue=1E-160; Info=Mitogen-activated protein kinase 14B n=4 Tax=Apocrita RepID=E2AIS5_9HYME
atgtttcatttataaataaaaaatgtatttaataactatttctatactaaatccaattattaaatcaaatataattaaaaattaatgtaaatatattatacaatatactgcatttgaacactctctaacttagggtacatttggacgatctcagcagctggacagctgaggaagcggtagcattcacacgactcaatggaagtcagccactgtgagatttactaagcgatccatatttccgctggatacacacactaagccactttgtgcttatagtctgggcagattatcggagaataggccatttttgggaaaagttaatttaccagagtattatagtcagctgctgagtcgttcaaacttaccctgttttcaacttttcattcatcattctgtggagggatgtaaacaaacgaatccacctcttgaagtaccaactctctccatttctcaactggcaaattcatatcttcaatactttgatcataaggggctgaaataggctcgtcattggggtctgcataagctgtaagataagcgtgtgctaaagcctgttctgcagttatccgtttctcactgtcaagctccaacattagtcccagtaaatctatagctaaagggttagcaccggatatatatctttgtaagttcttttttaggcataggaggtaaagaacgcatataatttctagcactttcagatgtaattttctgcatgaagtcctcaggtggtgtacctagaacttccattattaaattgagttgatgaatgtgatctgtaccaggaaacaaagttttccccgttaataattctgccataatacatcccactgaccaaatatctacagtctggttatagtgcatccagttaagcataatttctggggctctataccacctagttgccacatatcctgtcatttcagtttcagtaggcctagctagaccaaaatccaaaatctttaattcacagtcttcatttacagctatattcgatggttttaagtctcgatgtattacgcctgcagaatgtatgtacttcaaacctcgcagtatctgataaactaaaaattgcacatggtcgtctgttaatttttgtgttctgattatattatttaaatcagctcccattaaatgagtaactaaatatatctggctgttgtcctctttggggtaaaatacatttaagagtcctatcacattttcatgtctcatatgttttagcagctttaactctctgtaagttctcttggcatgaacagctgtttgaaaaggacgggctaatttctttattgctatttttttatttgttagtgtatcttgtgctgaacaaacttggccgtatgcacctgatcccactgtagtgagcgattggtatctactcggcacctcccatacagttttatttacttcgactttatggaaattagacattttatgttgaaatatgggcttaaatttctttttaaagctttaacaaacatccaccattatagctgtca

SEQ ID NO: 5039 - DNA, 504 bp, Diabrotica virgifera
atgtttcatttataaataaaaaatgtatttaataactatttctatactaaatccaattattaaatcaaatataattaaaaattaatgtaaatatattatacaatatactgcatttgaacactctctaacttagggtacatttggacgatctcagcagctggacagctgaggaagcggtagcattcacacgactcaatggaagtcagccactgtgagatttactaagcgatccatatttccgctggatacacacactaagccactttgtgcttatagtctgggcagattatcggagaataggccatttttgggaaaagttattcaccagcaattccattgctggaatcgaatcccataactgcacgtattagtaatataggcatgcaaagtccgcagatagtgtgctacctttttacaaacaaaatggagcccgaaaatcgtgctttttccaattcctgctctacaactcctaagattccaacttcacaccaaaaacacccaaac

SEQ ID NO: 5040 - DNA, 1234 bp, Diabrotica virgifera
  SmartBlast Evalue=8E-74; Info=Endonuclease-reverse transcriptase n=1 Tax=Bombyx mori RepID=D7F170_BOMMO
taagtagtattgtcattcgtataccattcgtataccaagatagtatcgtcaactgaggcgagtaaactttgccaataaaaaaatgattattttagatgatgaaaagtatttcactttgagtacatcaaccaattcaaccgcgatgtacaccaaatcttcgtggaatttaaacaagcttacgattctgttagcagagatgcattgtgggagactatggtagaaatgggagtacctggaaagctggtacgattagcaaaggtgagcacggagaacgcttccgcacgaatcagaattggcagcaccacgtcggagaattcctcattgacacgggcttagacaaggagatcctctcgcccccctgctgtttaacttcgcactggaacatgcagtaaggaaagctcagccacaactgacaaacggatttgccgcccaaggatcaaaaatactattagcctttgcggatgacgtggacacaattgcacaatccaccagagatgcaaaagaagttttcaccctattcgagaacggagccaaggaagttggtcttaaggtcaacgaggacaagaccaagtacatggtggttacgaagaacccaagaccaagggttagacaaaacgtaacaattaatgaatacaattttgaagtcgtcaaagaatttaagtacctgggagcgatcataacatctgaaaataaatatgaaaaggacgtggcagccaggatcgttgcaggaaacagggcatattactcattaaggaccctacttaaatcaaaaatactctcaagaccagcaaaaataagagtatataagacaataattcgtcccacaataacgtatggaagcgaaacatggactctgaatcagcgggaaacgacaaaattactggtacttgaaagaaagatactgcggactatctatgggccttgcagagaagagacaacaggagaatggagaagaagacacaatgatgaactccagacaatatatggagatgaaaacatagtacgctacattaaagcaaacagaatacgatgggcgggtcacgtgctaagatcaagtgacgaaagacttctgaacgccacattctgggaaaggcccgatggaaaaaggtcagttggtcgcccaagaaagagatggaaggacgcagtagccagtgatctacgcaaaatgggagtacagcaatgggaaatagctgctcaggaccgacaacaatggagggaaatagtaaacgcggcc

SEQ ID NO: 5041 - DNA, 780 bp, Diabrotica virgifera
  SmartBlast Evalue=1E-51; Info=Endonuclease-reverse transcriptase n=1 Tax=Bombyx mori RepID=D7F170_BOMMO
aaaaattatttgaaaaattcaaatatttttcctaagctcaattatggtccctatttcaccctattcgagaatggaaccaaggaagttggtcttaaggttaacgaggacaagacgaagtaaatggtggttacgaagaacccaagaccaagggttagacaaaacgtaacaattaatgaatacaattttgaagtcgtcaaagaatttaagtacctgggagcgatcataacatctgaaaataaatatgaaaaggacgtggcagccaggatcgttgcaggaaacagggcatattactcattaaggaccctacttaaatcaaaaatactctcaagaccagcaaaaataagagtatataagacaataattcgtcccacaataacgtatggaagcgaaacatggactctgaatcagcgggaaacgacaaaattactggtacttgaaagaaagatactgcggactatctatgggccttgcagagaagagacaacaggagaatggagaagaagacacaatgatgaactccagacaatatatggagatgaaaacatagtacgctacattaaagcaaacagaatacgatgggcgggtcacgtgctaagatcaagtgacgaaagacttctgaacgccacattctgggaaaggcccgatggaaaaaggtcagttggtcgcccaagaaagagatggaaggacgcagtagccagtgatctacgcaaaatgggagtacagcaatgggaaatagctgctcaggaccgacaacaatggagggaaatagtaaacgcggcc

SEQ ID NO: 5042 - DNA, 1017 bp, Diabrotica virgifera
tttactctaactatataacaaatttatccaaacgcactataaattataaaaacaaaaaatatgatctttaataattaaacctattcccatttcgcaactgagcagaaaatcctgtagtagctaccgaatttaggcttggtgagtgtggatatggccccaaagaatgagctggaggctccaagttttgaggctgacgatatccgtttgagctaggttggggtgagtaattgctattttcatgtaactgccttgggttgtgctcaagggtattggtctggctgggtgtagctttagctctgggaatttcaacaccgtacatgcttgattttaatatcttctcgcgtgttattatattaactccagacaatatcgtgctgatagcaagtacacaatttaagagccacaaagtgtaacctctagctgctatcgtcatcactgtaccaatgatcacatggcaagccaaattacttgttgaacagttaatgaagtctcgtaataataaagatgaaaataccaaatcaactactgatatacaaattgttagtgtaccccaacttatcatcaatgttgattgtctagatttattccaatggatagctagaaattggtcaatagatattacgatccacacaatgctggcaaataagtacatccaagccagtataattaaatccgatgcctggattactctctggtcagatgtccctacctcactattttttactaaataagaaagttgtaattctcgacttaatagctggctaaagtttgtaggatcatccttcggtatctccgtaccatcgtagtaaacgattacacaagctagggccataccccaccatgcaaatccttgaaccgccccaatgatggcagccgtttttcccaaaattatttgcaatggcgttagagccatcttgtcacctattcgatgtattaattaaattcttaacttactacacgaaccaacacaatatttatttttgtgtatccgttcaaaaccatctagaagcattagta

SEQ ID NO: 5043 - DNA, 989 bp, Diabrotica virgifera
tttactctaactatataacaaatttatccaaacgcactataaattataaaaacaaaaaatatgatctttaataattaaacctattcccatttcgcaactgagcagaaaatcctgtagtagctaccgaatttaggcttggtgagtgtggatatggccccaaagaatgagctggaggctccaagttttgaggctgacgatatccgtttgagctaggttggggtgagtaattgctattttcatgtaactgccttgggttgtgctcaagggtattggtctggctgggtgtagctttagctctgggaatttcaacaccgtacatgcttgattttaatatcttctcgcgtgttattatattaactccagacaatatcgtgctgatagcaagtacacaatttaagagccacaaagtgtaacctctagctgctatcgtcatcactgtaccaatgatcacatggcaagccaaattacttgttgaacagttaatgaagtctcgtaataataaagatgaaaataccaaatcaactactgatatacaaattgttagtgtaccccaacttatcatcaatgttgattgtctagatttattccaatggatagctagaaattggtcaacagatattacgatccacacaatgctggcaaataagtacatccaagccagtataattaaatccgatgcctggattactctcttgtcagatgtccctacctcactattttttactaaataagaaagttgtaatcctcgacttaatagctggctaaagtttgtaggatcatccttcggtatctccgtaccatcgtagtaaacgattacacaagctagggccataccccaccatgcaaatccttgaaccgccccaataatggcagccgtttttcccaaaattatttgcaatggcgttaaggccatcttaacacttatttgatgtattacaaattcttagattatcgcacaaaccgatacaacatctatttttgtgtatccg

SEQ ID NO: 5044 - DNA, 1020 bp, Diabrotica virgifera
agacaaaataattttgatgtgacagtgtttgtattagttgtaaatatggatactcttgatatattcttgttgatttttttcatatgttctataattaattacgtaataagtgttttcatcaattactggaccctgaaaaccattcctcctgaacaaacacggagcaagtattatatatttaattgtttgagtaacgccagtaccacttactgtatccacgaccacctccaaaggaaagttaagcttctaagtattcttgcaaggcagaagactactgcttggatatcaccactggattcgcagttaaaactagcagaagacaatgtgtacgaagattttgatcgtttctaacacagtgatataagtaatgcgtgaaaagtgaaatttattaaacatatctaatagtcattccagtaatatctaataagttagtaataggtattctgtaagtttagtttttatccttaatatttcttacatacaaagtattttaaattagtattttacataaacagctgccaaacatacaaattttaaaatgtagcattttgggtccactctgatgtaagaaggaatgtaaacaagtagctgatgttatgtggaactaccccaaccccaatatccttaccgaacaaatttattttacagcgtcaattcgtcaacactatatggctgcgtttagttgtgcgattttactacacatttttgcatgatttgcgatttttttatttttctatttcacgtgatttttggggaaaaggtagttatggatatgccagtggaaggtatgtactcaatattaaactatttttttatttaaaattaaataataaattcaaaaatcagcttgtaccgctcacaatattgtcgttttatttatttatttctttattttattttattttattttattttattttattttattttatttgatttaattttaaattattttattttattttattttattttattttattttattttattttattttatttttattttattttattt

SEQ ID NO: 5045 - DNA, 988 bp, Diabrotica virgifera
agacaaaataattttgatgtgacagtgtttgtattagttgtaaatatggatactcttgatatattcttgttgatttttttcatatgttctataattaattacgtaataagtgttttcatcaattactggaccctgaaaaccattcctcctgaacaaacacggagcaagtattatatatttaattgtttgagtaacgccagtaccacttactgtatccacgaccacctccaaaggaaagttaagcttctaagtattcttgcaaggcagaagactactgcttggatatcaccactggattcgcagttaaaactagcagaagacaatgtgtacgaagattttgatcgtttctaacacagtgatataagtaatgcgtgaaaagtgaaatttattaaacatatctaatagtcattccagtaatatctaataagttagtaataggtattctgtaagtttagtttttatccttaatatttcttacatacaaagtattttaaattagtattttacataaacagctgccaaacatacaaattttaaaatgtagcattttgggtccactctgatgtaagaaggaatgtaaacaagtagctgatgttatgtggaactaccccaaccccaatatccttaccgaacaaatttattttacagcgtcaattcgtcaacactatatggctgcgtttagttgtgcgattttactacacatttttgcatgatttgcgatttttttatttttctatttcacgtgatttttggggaaaaggtagttatggatatgccagtggaaggtatgtactcaatattaaactatttttttatttaaaattaaataataaattcaaaaatcagcttgtaccgctcacaatattgtcgttttatttatttatttctttatttatttatttatttatttatttatttatttatttgatttatttatttatttatttatttatttatttatttatttatttatttatttatttattta

SEQ ID NO: 5046 - DNA, 1594 bp, Diabrotica virgifera
gaaactgaatgttttacctaaaacttttttcaacacttcgtcatttttccaaattttaatatttttgaaaaatcctagtagatggtataggacataggaaataacgtatatttcgataatcactttgaaattttatgtttcaggatctctgttagcgccaatcactgcagcagtggagctgtttttttacggtgccagcagatggcgcataaatcgtttaaattttcaatattttttatgaaaatttttttacacgtacataattctttctctaataaatgacaattgacaaaaacaattggtatattactttttattttagaaattcccaaaaaagtatatgattttcgtactttcacactaggatagccccttaatttcactgatttgttctatatattaatttttggacagttaggaaaattgataagatatacaatggtgtgttttgtacaaaaatgaaacccttgtttggtaagttcgggctcaatgcctagctaaatgagactgttatgtttttaagaaaaaccatcaatagtttagctcggattagaagaacttacctacgggacaatattttatttgttgataaatatttttgtttcgttgtgttagggaagtcatttctatgtaaaatacaaaataatcgatagaacgatagagttcatgtatttttattttctaaaacaacaccttggctgcgtttagagatgtttataaacttatgttgggcgcgtgacaaggcatatatgtcccgtgtaccagccaacagttagtttagtacgaggtctatttgtcccgttacgcagctaaggtgttaacttacactgctgctgttcataacccatcagaaaaattgagaatgtgcaatgtggttgatcaattccccattaattctcaaccaacaactactaaaaacagttacatgatttacgaaggtgcaagataactgtcaggccaatttttcagcgtctaatagtcatttctcttgtagaaaaattaaaaatatgtgggcgttaattaaaattatcacaaatttacctttcgcgcccgtcttagtaattttttgacaattttctcattcgaattattttttatttctatattactaatactctaatttttgttttttttattaaaatggctcgaaatttttggtatagcattggtctatctgtaacccaaaaaataaaagtattagaagacagctagaatgaaagactgggtaatttattgatatttggtgatttatatgtaggcctaaaattaaatcaaacgcgtgtccccttatatggctttgtttccctacatagcgccatgttgtgtcaaaattctgtttgtatggaatacatcattgttttagttataattatgtatcacttctttgcagtcggccgctaagtaaattgacaaaacactaatgaaccctcatttttttctagagcctcttatcgttcattgtttgtattttcataggaatatgtagtaatatattttgaacgtaaaatgattgtcctgattttatatttatgtaaactaaactgtatggataattaatataaatgtgaaataaattttcaataattagacaatt

SEQ ID NO: 5047 - DNA, 397 bp, Diabrotica virgifera
gaaactgaatgttttacctaaaacttttttcaacacttcgtcatttttccaaattttaatatttttgaaaaatcctagtagatggtataggacataggaaataacgtatatttcgataatcactttgaaattttatgtttcaggatctctgttagcgccaatcactgcagcagtggagctgtttttttgttttcgcggtgccagtggatggcgcatggatcgtttagttttcaatatttttttagtgaaagttgttttacatgtactttttataataggtgctcatccagattttcgggaacaattggtgcagtgctttttattttataaattcccaaaaaaattatatgaatttcgtacttttacactaggatagccccttaacagtcttatacat

SEQ ID NO: 5048 - DNA, 1067 bp, Diabrotica virgifera
  SmartBlast Evalue=1E-11; Info=Putative gag/capsid-like protein n=1 Tax=Simulium nigrimanum RepID=D1FPZ6_9DIPT
aatacactttgttatcattcctccttccgcaaatgacacatgcaccatgttgtcgttgttgaggttgaatgtcatgcgcgtaacgtctgtgctgctcctcattttctgcactctgcgtctctgtagtttcccatttcattggagtctgcgcgttgctccaacgtcgctgcgcatcgtaccttcgcgcaccttcgtaccttcagagttgacgtggttaagaggttctggcttaacccttaccatttcctcgtggatttctctggcagccatcttggaagctgctaaactgaccattttttcgagatcggcgcttacatcttcttccataagccggtccaacacgcgtcccttgccgaaaccgaacaaaaatctgtctcttaggcatacttttaattggctgccgaactcacagcctaccgctaatcctcttaagcgtgcagcccactcactcgccgatactgtcacgtctttctgtgcactgtaaaatttaaatcgcgctgcaaacggactctgctgtagtttgaaatacccgtccaatgtgcaagaagctgattatacgttttttcttctggtttttcaggacttaccagatcgaaaataagctgatatgcgttctcgtctaaagcgtttaataaaatagctctcatcttctctgcgtccgtattgactttgacataccgtttgctgcgaaatagtttcctagccgcgctttgaaaattgaccagtttgaactcttcaaacagaactcgtgtaattgaccacataccgattccgccattttttatactttttttacacgtttttcactacgtattttttacctcgtcgccaatgatgtaatgtattagccctagctattctgctaacacacatacctgctcgagacgttacaaccttaaataaaagccggacatttaacggactagttttattgtacagttgaagtaacatacaagaggtcgatacaggttacaattgccttatatactgctacagtgtagtgggatggtcactgatgtcaaaatgggcagtgacaccgagcgaaatgcgagtaacctaaaacctag

SEQ ID NO: 5049 - DNA, 929 bp, Diabrotica virgifera
  SmartBlast Evalue=1E-11; Info=Putative gag/capsid-like protein n=1 Tax=Simulium nigrimanum RepID=D1FPZ6_9DIPT
aatacactttgttatcattcctccttccgcaaatgacacatgcaccatgttgtcgttgttgaggttgaatgtcatgcgcgtaacgtctgtgctgctcctcattttctgcactctgcgtctctgtagtttcccatttcattggagtctgcgcgttgctccaacgtcgctgcgcatcgtaccttcgcgcaccttcgtaccttcagagttgacgtggttaagaggttctggcttaacccttaccatttcctcgtggatttctctggcagccatcttggaagctgctaaactgaccattttttcgagatcggcgcttacatcttcttccataagccggtccaacacgcgtcccttgccgaaaccgaacaaaaatctgtctcttaggcatacttttaattggctgccgaactcacagcctaccgctaatcctcttaagcgtgcagcccactcactcgccgatactgtcacgtctttctgtgcactgtaaaatttaaatcgcgctgcaaacggactctgctgtagtttgaaatacccgtccaatgtgcaagaagctgattatacgttttttcttctggtttttcaggacttaccagatcgaaaataagctgatatgcgttctcgtctaaagcgtttaataaaatagctctcatcttctctgcgtccgtattgactttgacataccgtttgctgcgaaatagtttcctagccgcgctttgaaaattgaccagtttgaactcttcaaacagaactcgtgtaattgaccacataccgattccgccattttttatacttttttcactatgttttgctgataacatctgatcatttgccccatcttgtaaaaaatgttttcatgttcgtcaatgttttctttgttttcctcattccttgaatgaacgatatactctcagtagagagtacgagaatcgtat

SEQ ID NO: 5050 - DNA, 1358 bp, Diabrotica virgifera
  SmartBlast Evalue=1E-155; Info=Protein RMD5-like protein A n=1 Tax=Harpegnathos saltator RepID=E2B2P8_9HYME
agttaagcaagatccatatcaaaacaaaaagtggaaataacactaaacaaaccaaaagaaaagcagacatggaagcttgtcaagcagtggaaagagaaattgataaagtttgttcgaagtttggaaatataaatgaacacgccaaaagggttctatcggatctcgtaaaccagattcagaacttaaaagaagagtatgataatagtggaagcgaacatgttttaactgagcttcaagtcgatattttgaagcagaacatggtgaagataaaagaaacaatatctaaattggcaaccgatcaccgagatttacatagtacagtttcgaaagtaggaaaagcaatcgatcgcaatttcacagcagatttcgctgctactagtcgcgaagagatgttcaacaatcccgataaaattaaccttattaataaagttatttgtcaacatttttacagacaaggcatgcacgatgtagctgaccaactcgcccaggaaagctccattacgccagagacgcacgagaaagaacccttcaccgaaatcaatcacatcttggaaagattaaagatgaaagatttggagccggctctggcgtgggcgacggtacaccacgaaaatttggaggctcaaaattcctctttagagttcatgctgcacagattgaagtatattgaaattctacgtaaaggtccggtataccagacagatgcgatttgctatgctaggttacatttcagtaaattcatgtatcgacatgaaaaagaaatccaaacgttgatggggatgcttctgtatgtccccaacggaataaatagttcaccatatagttgccttttagaccaagaactgtggatagaaatctgcgagttgtttctgcgcgaagcttgccagcttctcggcgtatgcgtcaacagtcctctgaccacttgcatcaacgccggctgcactgccattcccgctttgctcaatattaaacaggttatgatgcagcgacaggttactggcatctggaacggtaaagacgaattaccgatcgaaatcgacttaggtaacgaaaacaaatatcattcgatgtttgcttgtccgattttaagacaacaatcgacgcagttcaacccgccaatgaaattgatctgcggacatgtgatatcacgtgatgcattaaacaaattgtgcaatggaaataagatgaaatgcccctactgccctatagaacagactccttcagaagcacggctgatatttttctaacccctatgtatatatcggcagtacggtggttattgtattcttcgtatagagataataataattattacggttacattttttatggatatttagtgttgtgacagttttagt

SEQ ID NO: 5051 - DNA, 626 bp, Diabrotica virgifera
  SmartBlast Evalue=2E-43; Info=Protein RMD5-like protein A n=1 Tax=Camponotus floridanus RepID=E1ZWF9_9HYME
agttaagcaagatccatatcaaaacaaaaagtggaaataacactaaacaaaccaaaagaaaagcagacatggaagcttgtcaagcagtggaaagagaaattgataaagtttgttcgaagtttggaaatataaatgaacacgccaaaagggttctatcggatctcgtaaaccagattcagaacttaaaagaagagtatgataatagtggaagcgaacatgttttaactgagcttcaagtcgatattttgaagcagaacatggtgaagataaaagaaacaatatctaaattggcaaccgatcaccgagatttacatagtacagtttcgaaagtaggaaaagcaatcgatcgcaatttcacagcagatttcgctgctactagtcgcgaagagatgttcaacaatcccgataaaattaaccttattaataaagttatttgtcaacatttttacaggatgaaatgcccctactgccctatagaacagactccttcagaagcacggctgatatttttctaacccctatgtatatatcggcagtacggtggttattgtattcttcgtatagagataataataattattacggttacattttttatggatatttagtgttgtgacagttttagt

SEQ ID NO: 5052 - DNA, 1013 bp, Diabrotica virgifera
aaaaacatgcaccattttaatttcataggaaattaggcgacagggtaggatttgcacatgctaatgatgtctagtatttccaataaacatgagatattatgtttctctaataatcttaaacattccagttagtcatcgcatttttattttatcttacattgaaagatgtatctaataaaaatttacgacttcccgtctacactgccgataaaaattgctgtgtagtgtgtaaaaatataaaatatttacattgcactaatttggcttataaataaaccttttaagaactgaaaaaaatctagaggacaaataaataaataacaggtcaatgtatgatagaaaataataggattttggttttaaattcagcaaaatatgtttatacgagacgaaaactcagaattccttgggaaaatatgcccatgagatttttgcataatcactttcataaaataccgcagaataatgttcaagaggtcgcccatacaaaaagtggtcctaatttattgaacagttttgtataaatccattttttaggttgtgataagggcctcaaacaactaaaaacaatgttttaaaatcaaataagcccaaacttaagtatcagaaactgatagaacaaggtttggtgaattcagaaataattgtgtgtttttgagccttaaaaatcatcatttttcgttttttttttcagttttcaattgtttatgttgaaaacgataaactttagagaaatattacaattaaccttttttattcagaatgattcaaaataccgaaaaaacatttgtccgggcagatgaaattgatttatacaatttgtttaaaaaacaattattgtttaaataaattagaaccacttctgctggtattatgtttaagacgaaataagttaaatacaaagttatcaattaataatcacaaaaaaaataaaatattaaagctatttacactaacgcaaaaactaattcgtctctgtctcgctagactaaggcagtgaagagaactacatg

SEQ ID NO: 5053 - DNA, 940 bp, Diabrotica virgifera
atttccaataaacatgacatattatgtttttatttttatgtttttattaattttaaacaaattagttagtcatcgcatttttattttatatcacattgaaagatgtaataaaaatttacgacttcgtgtcttcactgacgataaaaattgctgtgtaaaaatgtaaaatatttacattgcactaatttggcttataaataaaccttttaagaactgaaaaaaatctagaggacaaataaatacataaaaaatcaatgtatgatagaaaaataataggattttggttttaaattcagcaaaatatgtttatacgagacgaaaactcagaattccttgggaaaatatgcccatgagatttttgcataatcactttcataaaataccgcagaataatgttcaagaggtcgcccatacaaaaagtggtcctaatttattgaacagttttgtataaatccattttttaggttgtgataagggcctcaaacaactaaaaacaatgttttaaaatcaaataagcccaaacttaagtatcagaaactgatagaacaaggtttggtgaattcagaaataattgtgtgtttttgagccttaaaaatcatcatttttcgttttttttttcagttttcaattgtttatgttgaaaacgataaactttagagaaatattacaattaaccttttttattcagaatgattcaaaataccgaaaaaacatttgtccgggcagatgaaattgatttatacaatttgtttaaaaaacaattattgtttaaataaattagaaccacttctgctggtattatgtttaagacgaaataagttaaatacaaagttatcaattaataatcacaaaaaaaataaaatattaaagctatttacactaacgcaaaaactaattcgtctctgtctcgctagactaaggcagtgaagagaactacatg

SEQ ID NO: 5054 - DNA, 1447 bp, Diabrotica virgifera
accgggttttgacaaaattaacaaattagtggttaataacatgtttatttatgtccgtactttgatactgatatgctttgttcctaggcttttctcattttgacagtggtaaaattaaaaacgaggtcatgattttttgggtctttattcgcaagtacataaatgaaaatggtcgcaaaaataagctcaatttagtaaaaaacacaaatatttttattttgaacttatagaatggccaatagggatgaataataaagaatagaactaaaaagtaaaaaaagaacaaaactattaaatggtcaaagtggcacaattttagtccgtcaaacattcagtggaaatatccccaaaatgatccttgaatgcaaatttgtgacatctttgacatgcccttcttgttgacatattgcaaattcgtgcacaaatacaacatcgtcccacataatttgttggaatattatgggagggcctacgacttcttgaactctgagcagtacgcgagctcgtcgtctaagttctcttagcagggaaggtatagttgatccatattcaatttgcggtttgattagttcccatgctaagttttcaatcaagtcgcttcttgaagtattttcagttatgtaattagctttatatacacagtaggctacatattagctttatatatacagtggaacctcgataactcggattaatcgggatcgcggccgatccgggttatcgaaaatccgagatagccggagaatatggtaaaaattaataaaatacggtatacttacagataagctccgttagaattgaaataacatgaaatatatttataaatatgcacagtacctacacatcaaaattactgaaaaaaaaaacaccaaacacaaacgtaagcaaacggaagcgaacaatacaagacacacaatacagtcacaacgatgtaatgttatttaagaacagtgaaaactaaagaccattgtttataaaagaattttttaaatagtctttcctaaacaatgctaagacagtttgaaataaaaaggaataggtactacagacaggtggctgttgtttctgcggcgtgtgctgagtcatttttaatatcgtatagttcaaattacacacatacacattatctctcaaatattatattacatacatttttattgttgaaaggtttgtctgataattaactattttgatgggaaataagccacaattaaattgaaaaatacaaaatattgaaaatcaaaatgtttatctgatgaaaatcggtccgggttagccggacttccgggttatcgggggccgacttatcggggttccactgtacatcgtttctcttctacaattaactattgttgtagtgttgtttctaggtccaaaaagttggatgggtttggaatgaacggttttgaagaaaaaaaaataaatcaagttgtagagcgctattttt

SEQ ID NO: 5055 - DNA, 528 bp, Diabrotica virgifera
tagcaattgcgttcaagcaattgatctagaatcaaaatatgacagattatctaatttgacacactatctaaggtgcaacgaagttcaccgggtcagctagtttgaaataaaaaggaataggtactacagacaggtggctgttgtttctgcggcgtgtgctgagtcatttttaatatcgtatagttcaaattacacacatacacattatctctcaaatattatattacatacatttttattgttgaaaggtttgtctgataattaactattttgatgggaaataagccacaattaaattgaaaaatacaaaatattgaaaatcaaaatgtttatctgatgaaaatcggtccgggttagccggacttccgggttatcgggggccgacttatcggggttccactgtacatcgtttctcttctacaattaactattgttgtagtgttgtttctaggtccaaaaagttggatgggtttggaatgaacggttttgaagaaaaaaaaataaatcaagttgtagagcgctattttt

SEQ ID NO: 5056 - DNA, 1406 bp, Diabrotica virgifera
attacaaaaaaatatggtataagcattctattcgaagatgtcttccgatttagcattaaagtgaggcatagtttttctggaatcaattcgagtttttataaatccatccctcgaatacgctccataaactgctagagaagcttgtgtcacaagcttgacacatcgttctacacattgtttgtggcagtgatatatctcaatctcaatgttaaaaagggtctaagttaggattcttaataaaatctcgcagattgtcactcgaaaatctagagaatataggtggttctgtaaggtgttattcttgttagttaattaactcaaagtagtcgtttgaatcaaaatttttataggagaaagtttgaagaccctcatgttttttgatttggtcacaagcaaacttcttttgatgtccaagggaccaagggatagatcatttgaatgtcgcagacatacaaaccactgaagcggttttttaagatgttctaagaaccgtattatatcacccttaccgccagtatttacgactgtttcgttacatgcaatagctggatttgatactttctgatataccaggcaggggatacccatatccgaaatatttgcaccctggctcatgcacaagtgttatgtgttcttccacgatcgattgacaataaaacttggtactgtttttacttgagctaaagttttgtctttgcgtcggtactttcttcttttaccgttgttctctctgaatatatttgtttttgttttccatatcaatggagcttatcaccatttttctgggacctctttgatttaataaaaattcgcgatcatccagagtcactttttgagatttgctacaaagacaattcatcagaatgtcacatttgcatgctgcaagatcgaaacgtgtagttttacttttgtacttaaagcattgaattttatttttgtaaaattcactgttttgtctgttcttaaatttaatggtatcataagtttcatatatttatcatgataggcttttaaaagctgaataattcttgtatgttaaattattcgaattaaagccttttttcatatttcctccaaattaattgcaacctgttcggcaataccagaaaattctggatctttcttggtgagtttttatcctcttcaaccacaaaacttcatcacttgtttgtatttcggtaaaacattttcaggtatatttggtggttgcccaaaaatgggacggtccacagcacatcttgattttattccccatggtcctggtttatctattttaaaaatctttaatttacaaacaacaataataacaaagtaactcgacgcaccaaacataagcgaaaattacacccacggactcacaaagtgggaaatttcaaaggggttggggacataggcgtaaccagttt

SEQ ID NO: 5057 - DNA, 549 bp, Diabrotica virgifera
attacaaaaaaatatggtataagcattctattcgaagatgtcttccgatttagcattaaagtgaggcatagtttttctggaatcaattcgagtttttataaatccatccctcgaatacgctccataaactgctagagaagcttgtgtcacaagcttgacacatcgttctacacattgtttgtggcagtgatatatctcaatctcaatgttaaaaagggtctaagttaggattcttaataaaatctcgcagattgtcactcgaaaatctagagaatataggtggttctgtaaggtgttattcttgttagttaattaactcaaagtagtcgtttgaatcaaaatttttataggagaaagtttgaagaccctcatgttttttgatttggtcacaagcaaacttcttttgatgtccaaggggtagatcatttgaatgtcgcagacatataaaccactgaagcggttttttaagatgttcttctaacagccgtattacatcacccttagctccagtatttacgactgtttcgtcacatgcaatagctggatttg

SEQ ID NO: 5058 - DNA, 983 bp, Diabrotica virgifera
  SmartBlast Evalue=7E-33; Info=Chymotrypsin-like proteinase 6D n= 2 Tax=Tribolium castaneum RepID=D0R8R5_TRICA
cattgtaaataaaatttattatataaatatttacaaattataataaaataattataggtatataaattataattgtactataattttaccggttctacttccggttatattgggtgagaaccgaggacttacgaagtccaattgtttgttacaataaaataatgttaaaatgtcaattcttcatctatatgttcagaaatccaggatatgtatgaactgatcttggtatacaacgtcaaaccactgcaatcggtagagacagacactataccaacgacaagattatcctgctctaagggccctccataatctaggctacaagctccttttctttcgcccatatggccagtacaaatagcagaattattgtagtcgggcattttcacgccccgtttggtaaattcctcaacacaatcttgaaaatcaataacaggtacttggactacttgtaaactatttggaaaaattggatgaatcagctgggtacttccccatcctgctaaatgtccttcttctaataagacctctgcattctgtttagggaatttggcggcttggactaactcattaaattcaaatggtgtggatacttttacaagtccaatatcaaataatctagggtaggttttattaaaactttcatggtaaaagaatctttccagggttctgttttgtttatttggatcgtcaatatttgttattccagcataaacctccatttcctctatagtgaacaattcaatacaatgtccagatgttaagatccagcttttggaaattataactccgttacacaactggatacattctgtgaaacaatcttgaatagtgactatataaggaaattcgcctttggtcgcattataaccaccgataatggagagtccgtcttcaggtacaccccaaattccggtaaaatagaacattaacaccaagcctaacatttttttatattaagtacaaattacttatagaaattttta

SEQ ID NO: 5059 - DNA, 993 bp, Diabrotica virgifera
  SmartBlast Evalue=6E-32; Info=Chymotrypsin-like proteinase 6D n= 2 Tax=Tribolium castaneum RepID=D0R8R5_TRICA
cattgtaaataaaatttattatataaatatttacaaattataataaaataattataggtatataaattataattgtactataattttaccggttctacttccggttatattgggtgagaaccgaggacttacgaagtccaattgtttgttacaataaaataatgttaaaatgtcaattcttcatctatatgttcagaaatccaggatatgtatgaactgatcttggtatataacgtcaaaccacctgtcgggctgcattgggcaaagcaagacactatgccaacgacaaggatatcctgctgtaagggccctccataatctaggctacaagctccttttccttcgcccatatggccagtacaaattgcggaattattgtagtcgggcattttcacgccatgttcggtaaattcgttaacacaatcttgaaaatcaataacaggtacttcgactgcctgtaaactatttggaaataatctatgctccatttttccccatcctgctaaatttcctggtgctaataagacctcagtatcctgtttaggtaatttagcgggttgaactaactcgttaaattcaaatggagtggttacttttacaagaccaatatcaaataatctggggtacgttttattaaaattttcgtgataaaaggatctttccacacttctgttttgtttatttggatcgtcaatatttgtcactcctgcataaacctctttccatatgccttcaatgaacaaatcaacgcaatgtccagatgtcaagatccagcttttggaaataataactccattacaaactggctacattctattgcacattcttgaatagtgactatataaggaaattcacctttagtggcattatgcccaccaatgatggagagtctgtgttctggtgcagcccaaatttcggcaaaatataacattaataccaaagccaacattttttaacattaagtacaaattaattacagaaattctattgtag

SEQ ID NO: 5060 - DNA, 1181 bp, Diabrotica virgifera
taggcaacaaacgactatcacctatctgtgtctctcttcaagagtacatagtagtgaagttcgtcacttcaccatttctgttttagcactgatttgtacttaaatggtttcttattaaccctccgttactcgcacacggtgtatgagaccgggcctctaaataactgcctgtaactctgattgtagtgcatattttcaattgctgctgcatatacctcttcagtcatcagtcaactgtgtgtgaagtccaagtgcagtgtaaaaaagagtattgtacttttattattaggcaagacctattaattagtcaggtaattaaaagtagtaagttttaattagtcaggtaatttaaggtctttttcttatttttaatgtttatatatttgtttatttatatttagatatggattacgagaaggagaagcaaagattattaaaattatttgaggaagtatcgactgacgaggaaacgtatgaagatgatgattaacaaattactttttgttaaagtaatataatgttgacacaaacgcatatctacaaaactatatgatcatatattcattaaataatgtaattgtactacacaattttgcaaaaaaaaattttacttctgcaccgtacgcgagttttcgatcacaaaaaattggcgcgagtaacggaaggttaaatgtattttttatgatagttcttacaaggtgtcgcctaggcatcaagaaacataggtatcaaatcaatagctattgtagactggtccacaaaaaattatgaaaactaaaaagatgttgcgacaccatcgagtggtaaaaaaagaatattgctttattatcacagatattttaattaaaattctacattactggatcagtgaataatgatgaagttatacagtaatgtaaactatttagtgaaatctttggatatagatatatgtattttatcaaaattttaacttggtatgttagcatcatagaatgagaaagccaagatggtatatcaaatgttttaaattgttatagttcaatttgaagaatttatagaacagttttttaatacatataatggcacaaatatgagaaagtgagatttggattataaaaaatcaaaattgaaacttaatcctatttatattgaaggccgttttgatttgtattgtgtgtgtgtatacagggtgtttcatt

SEQ ID NO: 5061 - DNA, 802 bp, Diabrotica virgifera
taggcaacaaacgactatcacctatctgtgtctctcttcaagagtacatagtagtgaagttcgtcacttcaccatttctgttttagcactgatttgtacttaaatggtttcttattaaccctccgttactcgcacacggtgtatgagaccgggcctctaaataactgcctgtaactctgattgtagtgcatattttcaattgctgctgcatatacctcttcagtcatcagtcaactgtgtgtgaagtccaagtgcagtgtaaaaaagagtattgtacttttattattaggcaagacctattaattagtcaggtaattaaaagtagtaagttttaattagtcaggtaatttaaggtctttttcttatttttaatgtttatatatttgtttatttatatttagatatggattacgagaaggagaagcaaagattattaaaattatttgaggaagtatcgactgacgaggaaacgtatgaagatgatgattaacaaattactttttgttaaagtaatataatgttgacacaagcgcatatttacacaattatatgatcatatattcattaaataatataattgtacacaactttgctaaaaattttttttttcaatattgctgacccatatttttggacccggtcctctgcaccgtgcgcgagtattcgatcacaaaaaattggcgcgagtaacggaagacaggcatgaaaaatttagataacataagcctagaggtaaagtcttgataataacttatttaaagactgtacaagaatgtcaaataaaaaatatacgatattgcgt

SEQ ID NO: 5062 - DNA, 994 bp, Diabrotica virgifera
  SmartBlast Evalue=5E-33; Info="Phospholipid scramblase, putative n=1 Tax=Pediculus humanus corporis RepID=E0VXM0_PEDHC"
tcattgtttgtgtattggtttagtgtactttagcttgtaattgaaaatgcaggatgaaaatctatacagtaacatggaaaatattgaattagaccatttttccagacaacaaagtaatttgacagtttattcccgaaacggagaagaaagtgccataactcaacaacccacaaacaatgacgattatcctggtttccggagacccataccagtttccattattgacgaagactacagaagaactattgctcccacaagtggtctaggtttcctccttgatgtcaacgagttgatcatacaacaaactattgaacttgtagatttaatttccaatgtttcttcagaaaacaggtatacagtaaaagtacccagaggtgatacaatatattacgcgacagaaagttcagcaaattgtcacagaacgtgttttggatctggcagggcatttagcatgagattgtatgacaaaactcaacaggaagctcttatacttgaacgacgattggcatgtggaaactgcacattttgttgttatcttcagaaaatggaagtttggattccacctggagaattaataggtacgataagccaaaagatgtctttgactatgaaagctagttttaatgtatataataagaataacgacataatagcagtgatagaaggaccaagttcgtttgcgtgtatgttcggaaaaacacaaaattttcagatttacagccctgatcgctcaactcaagtaggaagtatcatttatcagtgggaccaggttcaagtctcttataacattctattaaaaatgatgggtcatattactgaaacaaagcacaaagcccttttattgggatgtgcgtttttgttggagtacatgtattttgagtattcgaagaagaagactgcttgtaggtgcatatgttaatagattttaggaaatgtaggatttactaatattttttatgaaatggatttatattataagaaacataataatata

SEQ ID NO: 5063 - DNA, 986 bp, Diabrotica virgifera
  SmartBlast Evalue=5E-33; Info="Phospholipid scramblase, putative n=1 Tax=Pediculus humanus corporis RepID=E0VXM0_PEDHC"
attatcgataacaacaatacctactttttcattctattagtcttttgtgtattggtttagtgtactttagcttgtaattgaaaatgcaggatgaaaatctatacagtaacatggaaatttattcccgaaacggagaagaaagtgccataactcaacaacccacaaacaatgacgattatcctggtttccggagacccataccagtttccattattgacgaagactacagaagaactattgctcccacaagtggtctaggtttcctccttgatgtcaacgagttgatcatacaacaaactattgaacttgtagatttaatttccaatgtttcttcagaaaacaggtatacagtaaaagtacccagaggtgatacaatatattacgcgacagaaagttcagcaaattgtcacagaacgtgttttggatctggcagggcatttagcatgagattgtatgacaaaactcaacaggaagctcttatacttgaacgacgattggcatgtggaaactgcacattttgttgttatcttcagaaaatggaagtttggattccacctggagaattaataggtacgataagccaaaagatgtctttgactatgaaagctagttttaatgtatataataagaataacgacataatagcagtgatagaaggaccaagttcgtttgcgtgtatgttcggaaaaacacaaaattttcagatttacagccctgatcgctcaactcaagtaggaagtatcatttatcagtgggaccaggttcaagtctcttataacattctattaaaaatgatgggtcatattactgaaacaaagcacaaagcccttttattgggatgtgcgtttttgttggagtacatgtattttgagtattcgaagaagaagactgcttgtaggtgcatatgttaatagattttaggaaatgtaggatttactaatattttttatgaaatggatttatattataagaaacataataatata

SEQ ID NO: 5064 - DNA, 996 bp, Diabrotica virgifera
  SmartBlast Evalue=4E-50; Info="Eukaryotic initiation factor 1A, isoform A n=17 Tax=Endopterygota RepID=Q9VEA1_DROME"
atttacgcttttacatttttgttgccattaaaaaacagaaaaaccgaattgtacaaaatattacacatatataacagttctatatctataaacatatccctagaactttctttcacataagaaacatccacaaatatcagtttgaaaaaattgcattaatttgataaaatgattttaatcgttaattataaaaaatgattatttttctaagggttgagatgctatgagagagggctgcaagaaaatgacatttttttggtagcaagtggtcaggccaaaaaatctattgatacattaacctatgataaattattaatataaatatctacaatcacataggtctttcaaagtgttctggtacatgatgaaatccggttctgagataacccattcaagatctttattggcctgacctactatcatcgtcttcatgtcatcagatgccatcaacagggtcagcttcgtctgctgaactgatgtcatcaccaaattcaatatcttcatcaaaaccttcttcgacgaatgtaacggtttcattaattctaacagattctgggaattcaccatatgtttttagattacgagcttcatcaggggtgtattttagaatcacatctgctttggcatcttggtactctctgagacctatgagaataatgtcaccttgatttatccaaaccttctttctaagtttccctctaatatgacataacctcttgacaccatcaaaacacatagcctctagcctaccgttacccaacatttttgtgacttgtgcatattcttgtccatcttctttgaataccaattcacgtttttctgtttcattttcattctttcccctcctacgatttttacctccttttcctttattcttcggcattttgttttattcaattctagcacttaaatttggctgagagttctcaatttttagaattattccaaaaattgcgaaaataaaaagccagtcccttgactagagacttgacagcc

SEQ ID NO: 5065 - DNA, 979 bp, Diabrotica virgifera
  SmartBlast Evalue=4E-50; Info="Eukaryotic initiation factor 1A, isoform A n=17 Tax=Endopterygota RepID=Q9VEA1_DROME"
caaacagtgaatataattgacatccagctacaaaataaatacatcaaagaaagaaagattaatcaaaaaattttatattttctaacgtccttaaaacataaatgataagttaaatacatttttgctattgttaaaacttttatggtgaattacattcaaaattatatactgccctgaaaatagagataatctatgatgaaaatgaggctgaaatgtcatttagggaaactggcttatattatgatacaggtgttgtaaataccgaattagaaacaaagatcagaaatgttttacatatatatcttctctattaacagggcaaaccgtttctattatatattaatatcttgaacaataaattttatcagaaaaaaagatcacctttattggcctgacctactatcatcgtcttcatgtcatcagatgccatcaacagggtcagcttcgtctgctgaactgatgtcatcaccaaattcaatatcttcatcaaaaccttcttcgacgaatgtaacggtttcattaattctaacagattctgggaattcaccatatgtttttagattacgagcttcatcaggggtgtattttagaatcacatctgctttggcatcttggtactctctgagacctatgagaataatgtcaccttgatttatccaaaccttctttctaagtttccctctaatatgacataacctcttgacaccatcaaaacacatagcctctagcctaccgttacccaacatttttgtgacttgtgcatattcttgtccatcttctttgaataccaattcacgtttttctgtttcattttcattctttcccctcctacgatttttacctccttttcctttattcttcggcattttgttttattcaattctagcacttaaatttggctgagagttctcaatttttagaattattccaaaaattgcgaaaataaaaagccagtcccttgactagagacttgacagcc

SEQ ID NO: 5066 - DNA, 1200 bp, Diabrotica virgifera
tatgatgttcggatttcgcgctcacagcgtattttggccctatttttttgttacttctcaaacattgttctgtaactctttctacacagctttaggtgtatgcaatgttacatttaatgggaagaggggtcaattacctttaaaatggtcgattgtggaaggctgtataattattgttaagcaagatatggttgttcaaattttatacttttggtgatttttgatatgtatataattatttttaaatttctcataactttttttattgtatctttgggtatatacattgtctaataataaggaaagcttattttctttacttaaaatggtgtatcgtaaaaaattctagaactatttttaaacaagatatgctttttcaaaatgtgacataatattcacatgcaataggtcccactaagttccatatggaaaacttttattattacctttatgaaaaaaattattctttataaaatgctctgcatagtctaaaatgtaagatgcaatcatcagatataaaattttatcaatagtgtacgaggtctgttaaaaaatatgaatttagctgaagagtaaagtacctttatatttcacaatatcgaaaagtgttattaagaaaagatatttgttattaaaaattatgttatattatgcaattatattcttctaattgaaaaaaataaattaaaagaatatataatttttctcaaattacggatactcttgtatattttttgcaatactcctttttaaagtggagaaaattatctttttattccacaatgtatatacctaaatatacaagaaaaaaggcataatgagaaatttaaaaaataatcattaaaaatatcaaaaatcattaaaagtataaaaccttgaaaaagcataacttgcttaaaaagagccgtatagtcttatacaatgatcattttaggggtgattggcttctctttctactaaatgtacattgcatatacatacctggaaatgcgtagaaaggagttacagaacaatgtttgcgaataatgtggaaaatggcccaaaggatgctgtgagtggcgaactttgaaaggtcatatttcagaaactgtaaatcctggagacttttaacaaacttcattttaaagagaaagaatggaggtttttttcgctggggcaatgcctatacctatatccctgtggacaggggttatggggcaa

SEQ ID NO: 5067 - DNA, 745 bp, Diabrotica virgifera
tatgatgttcggatttcgcgctcacagcgtattttggccctatttttttgttacttctcaaacattgttctgtaactctttctacacagctttaggtgtatgcaatgttacatttaatgggaagaggggtcaattacctttaaaatggtcgattgtggaaggctgtataattattgttaagcaagatatggttgttcaaattttatacttttggtgatttttgatatgtatataattatttttaaatttctcataactttttttattgtatctttgggtatatacattgtctaataataaggaaagcttattttctttacttaaaatggtgtatcgtaaaaaattctagaactatttttaaacaagatatgctttttcaaaatgtgacataatattcacatgcaataggtcccactaagttccatatggaaaacttttattattacctttatgaaaaaaattattctttataaaatgctctgcatagtctaaaatgtaagatgcaatcatcagatataaaattttatcaatagtgtacgaggtctgttaaaaaatatgaatttagctgaagagtaaagtacctttatatttcacaatatcgaaaagtgttattaagaaaagatatttgttattaaaaattatgttacaatctaatattatattcttctaaataaaaattttaaaatttttctcaaattacggatacccttggatatcctacgcatatcttgtttaaaaacagtcc

SEQ ID NO: 5068 - DNA, 1039 bp, Diabrotica virgifera
  SmartBlast Evalue=9E-47; Info=Collagen alpha-1(IV) chain n=1 Tax=Camponotus floridanus RepID=E2APL4_9HYME
gaaccgattcgttaccatttgaagggagaaccaggagaaaagggtcagaagggtgaaatgggagaatggggagtcaaaggtcgcatgggagatcatggtcaacctggtatacccggacgtaaaggagaaactggtttcaaaggagatcctggtgaagatggaccatttggaaagcagggccgtccaggtcctctcggaccaccgggtgaaaaaggagataaaggagcacctggatacgagggagactatggccgagatggatctaaaggatggcctggagaaccaggacgacaaggttttccaggtgaacaaggtaaagagggaccaccaggtatatatgatcctacttatgacgaaccagcaaaaattggaagcccaggtaggcaaggacctgaaggatatcctggggatataggtatgtctggaattcccggacgacaaggaagtccaggaccgttaggggaaccaggaaagccaggaccaccaggtaacccggtttactcatatatcctgcaggcaatctcataaaagcagatgaagctgaaatcggagatgctggttacccaggaattacaggaccagaaggacctcctggtccaaaaggtccatttggcgaagagggattcattggttttaaaggagaacggggagatgttggtgaaagtggaaatcctggtagagatggattggctggattaaatggtttgccgggagagaaaggggaaccgacttctgcaaccaaggaagagctgaggggatttaccggactgaaaggtgtagcaggtagaaaaggtgaacctggtaggccaggggcgagaggtattgaaggtacaatagctggaagtctccagaggaatagaggtgacagaggaattgtaggagattttggagagccaggatatgagggtaggccaggagaaaaaggctttatgggttctccgggttggccaggtcttccaggtccagcaggagaacaaggtgtatcgtacgtagggcctcaaggtttgaaaggatatccaggaattgcgggagatcatgg

SEQ ID NO: 5069 - DNA, 920 bp, Diabrotica virgifera
  SmartBlast Evalue=6E-44; Info="Collagen alpha-1, IV, chain, putative n=1 Tax=Pediculus humanus corporis RepID=E0VEK8_PEDHC"
tactggagaccgaggattaaaaggatatcccggagttggcccaccaattcaaggacccccaggtgaaccaggcgcacgtggatctcctggattttccggtgacccgggttatcagggtatgaacggattccctggattaaaaggaaggcgtggtgacgattgtggagtatgtagaccaggactgccaggacaaaaaggagataagggtgatggtggtcgattcggtcgacctggattcacgggataccagggattaccaggtccccgtggacctaaaggactagatggcctaccgggtcccgcaggaaaggaaggattagatggatcaccaggatcggatggtctggaaggtgttccaggtccaccaggtaacccggtttactcatatatcctgcaggcaatctcataaaagcagatgaagctgaaatcggagatgctggttacccaggaattacaggaccagaaggacctcctggtccaaaaggtccatttggcgaagagggattcattggttttaaaggagaacggggagatgttggtgaaagtggaaatcctggtagagatggattggctggattaaatggtttgccgggagagaaaggggaaccgacttctgcaaccaaggaagagctgaggggatttaccggactgaaaggtgtagcaggtagaaaaggtgaacctggtaggccaggggcgagaggtattgaaggtacaatagctggaagtctccagaggaatagaggtgacagaggaattgtaggagattttggagagccaggatatgagggtaggccaggagaaaaaggctttatgggttctccgggttggccaggtcttccaggtccagcaggagaacaaggtgtatcgtacgtagggcctcaaggtttgaaaggatatccaggaattgcgggagatcatgg

SEQ ID NO: 5070 - DNA, 974 bp, Diabrotica virgifera
  SmartBlast Evalue=3E-27; Info=Interferon gamma inducible protein 30 n=1 Tax=Danio rerio RepID=Q5XJN2_DANRE
actaaatataatttatttgttacgaaaattgaattaaccctcaacaaacattacttttcacatttattatttttaagcatttttggatgagcctttgtcgcatgatctttacaaacgtctggtttgttatcttttagtaagttgcaaacggtagctgtaagatccatcatagcttgatcttctacgtcttcatcgtagacgccgttaaatcttatatttggtacccaaggtaatacgggattaagctctgcttgtcttttctcatatcctaataaaagttcagttccacgttcaccatgataacaatcactaacgctgtcccaggaaaggctgcttggcaacaaactttgggctagttctaattcttgtctttcgttgcgatcgcgttcgtcagtcttggacaaatgttgatatatgaaagtaacgtagtctaacgaggatggattttgatcaagaacacaagcgtgtattctgttaatataacattcctcatcaccatgctggcattcaaatgttacttttccatctgcgctacgtgaagagtcactccatccatagggtacaaagtccaatttcaagctatctgccaatttagcgtatgaaggatatagctgtgttagaataaattgatgacaaccagggcataatccttcataaaacagggtaagcgtcagatcagctccctgcacgctggatgacacacacacagtggctgcgaagaacaataccaactttgatacgaacatcttggttaaattgtaaatacttcagtaagactcctttttatagtatactgagctgctacttcttagtattagatgtatatcatagcgatcagaagtccttaagataataaaggtcacaaacacttgagtacattacggacccttggcatggagggtattcacatttcaacgaaatcttcttcaatgtgtttttatcttttgagataatactgaatactttgtataaca

SEQ ID NO: 5071 - DNA, 984 bp, Diabrotica virgifera
  SmartBlast Evalue=2E-24; Info=IFI30 protein n=2 Tax=Bos taurus RepID=A6QPN6_BOVIN
ttttcgtttcacaagtattatttatttatatacatattacgaaaacatgtatttaaacgaaacacttatttcattcaacattttttaatatttttaatcatctttggatgagcatttgtcacatgatctttacaaacgtctggtttatcatcttttagtaaattgcaaaccacagatgtaagatctgtaaaagcttgttgttctatatctgcatcatacacgccattaaatcttatatttggtacccaaggtaattcgggattaagctttgattgtctatcctcgtacgataataaaagttcaattgcacgatcaccatggtaacaatcactaactttgtcccaggaaaggctgcttggcaacaaactttgggctaggtctaattcttctctttgggtgcgatggcgttcttcagtcttggacaaatgttgatatatgaaagtaacgaagtctaatgaggatggattttgatcaagaacacaagcatgtattctgttaatataacattcctcatcaccatgctggcaagtaaatgatactcttccatttgcgctacgtgaagattcactccatccaaagggcactaggtccaattttaagctatctgccaatttagcgtataaaggatatagctgtgttagaataaattcatgacaagcagggcaccttccttcataaaacagggtaagagtcagatcagctccctgcacgctggatgacacgcacacagtggctgcgaagaacaataccaactttgatacgaacatcttggataaattgtaaatatttcagtaagactcctttttatagtatactgagatgtcacttcttatagtatgctgagctgtcaatccttaagataataaaggtcacaaacacttgagtacattacggacccttggcatggagggtattcacatttcaacgaaatcttcttcaatgtgtttttatcttttgagataatactgaatactttgtataaca

SEQ ID NO: 5072 - DNA, 973 bp, Diabrotica virgifera
  SmartBlast Evalue=7E-49; Info=Lipase n=1 Tax=Aedes aegypti RepID=Q173Q2_AEDAE
tacaaattcaagaagtgagatgatgaaagtgattaaaggttttctatttttcatttttattaccattacttcctcagaatatgcttcgcttagagctacagaagcagacatcaaattctacttatttacccaaaaagatctactttatggtacacatctaaacatttccgacaaagacgaaatcaatagatctgatttctcgaaagacaaagacacggtgttctatattcatggatggctggacaacaactcctccgaaactctcataagtatcaaaaatgcatatctgtcaaaatatgacgttaatatgcttgttgtcgattggagtacgttcgcagacagtgtaatttataacgtagcctacgacaatgtagaaccgattggaaatgtacttggacattcaatagaacaccttgttcaaaatactggagcagacttaagcagaatgattatcgttggacactctttgggagctcacgtggctggtgtagctggcagaattctaaatggacaattggatcacattatgggtttggatccagctggtccactattcacaacagaaaacaccagaaaccgtctcatgcccgggagtgcacagtttgtccacgttattcacacttgtggtggtcttataggatatttaaatagcttaggtgatgcggattattacccaaatggtggaaggaacaatcaacctggttgcgaaacggatctgtttggtaaatgtgcccatctgttatccattaagttctatattgaatcgatattaacgggtaacttcaaggccagaaaatgcggctcgtatgacgacttcactaaaggaaagtgtaacgattcgccaatttcatatatggggcagtataaagttgacaaaggggcacaaggatcatattttctccaaaccaatagtaagtcaccatatgctaaaaattaatgttatttaatgtatattttgtatagaattaaatta

SEQ ID NO: 5073 - DNA, 986 bp, Diabrotica virgifera
  SmartBlast Evalue=7E-49; Info=Lipase n=1 Tax=Aedes aegypti RepID=Q173Q2_AEDAE
cctttttattttttacaaattcaagtagtgagatgatgaaagtgattaaaggttttctatttttcatttttattaccattacttcctcagaatatgcttcgcttagagctacagaagcagatatcaaattctacttgtttacccaaaaagacctattttatggtacacatctaaacatttccgacaaaggcgaaatcactagatctgatttctcgaaagacaaagacacggtgttctatattcatggatggttggacaacaactcctccgaaactctcataagtatcaaaaatgcatatctgtcaaaatatgacgttaatatgcttgttgtcgattggagtacgttcgcagacagtgtaatttataacgtagcctacgacaatgtagaaccgattggaaatgtacttggacattcaatagaacaccttgttcaaaatactggacaagacttaagcagaatgattatcgttggacactctttgggagctcacgtggctggtgtagctggcagaattctaaatggacaattggatcacattatgggtttggatccagctggtccactattcacaacagaaaacaccagaaaccgtctcatgcccgggagtgcacagtttgtccacgttattcacacttgtggtggtcttataggatatttaaatagcttaggtgatgcggattattacccaaatggtggaaggaacaatcaacctggttgcgaaacggatctgtttggtaaatgtgcccatctgttatccattaagttctatattgaatcgatattaacgggtaacttcaaggccagaaaatgcggctcgtatgacgacttcactaaaggaaagtgtaacgattcgccaatttcatatatggggcagtataaagttgacaaaggggcacaaggatcatattttctccaaaccaatagtaagtcaccatatgctaaaaattaatgttatttaatgtatattttgtatagaattaaatta

SEQ ID NO: 5074 - DNA, 1018 bp, Diabrotica virgifera
agctcttcaaaaatcctacaaaatcatttttgaaaaaactttttgtcgcgaaaaatgaatgagctatgtttataaaaccagtttttttttcgaaatatttgaatagtccgcttatggaaaattttcaatgcatgtataataccacaaactggttcgtatactggaagatgacttaaaaaccatttgtatttgtacttctaatatttgtaaattcgtatttttgtgtaaataaatgtttttgtaattctttaattctactttttttttctgtatagatctattaaattatctacttataaaaattgtaatgttattaagggtggtttttaagggttgaaatattatgatattatatcctaaagcataaaacaatcattatttaaccaatcaaaaccaaattttacccatattaaagtttacaatgtttttatataatttttgacaataaggggtagtttacacccctaaaaataatcaacgcccttaagcatgatatagaatatgaagtacagggtgagatgatcctaatcccaaatttttatgtaaatcgatgcaagccgaaattattcttttaggataagtaaatttttatatatagctccaacaagggtggttttaagggttgaaatattatgatagtatatcttaaagcataaaacaatcattatgtaactaataagaaccaaatgttgacaatattaaagtttaaaatgttattttataattttttacaactaggggtagttttcacccttaaaaaaccaaaagcgtacaacggctcaatatagaaaatgaactagagggtgtaatgagcctaatcccaaatttttgtacaaatcgatgctggacgaaaaaattgcgaggttttgccatttttcagcttcatttcctcgactattgggctttcttaacattttactttttgattaatttgcttatgatggatagtggaagggttgggtactttagcaactggcaatgttattcaccgatacagggtgtttctaaataagtgcga

SEQ ID NO: 5075 - DNA, 911 bp, Diabrotica virgifera
agctcttcaaaaatcctacaaaatcatttttgaaaaaactttttgtcgcgaaaaatgaatgagctatgtttataaaaccagtttttttttcgaaatatttgaatagtccgcttatggaaaattttcaatgcatgtataataccacaaactggttcgtatactggaagatgacttaaaaaccatttgtatttgtacttctaatatttgtaaattcgtatttttgtgtaaataaatgtttttgtaattctttaattctactttttttttctgtatagatctattaaattatctacttataaaaattgtaatgttattaagggtggtttttaagggttgaaatattatgatattatatcctaaagcataaaacaatcattatttagctaatcagaaccaaattttacccatactaaagtttacaatgtttttatataatttttgacaataaggggtagtgtacacccctaaaaataatcgacgcccttttgcatgttatagaatatgaagtacatgatgagatactcctaatcccaaatttttatgtaaatcgatgcaagccgaaattattcttttaggataagtaattttttatatatagctccaacaaaggtgggtttaagggttgaaatattatgatagtatattttaaagcataaaacaatcattatgtaactaataaaaaccaaatgttgacaatattaaagtttaaattggtattttataattttttacaagtagttttttagtcgtagttttcacccttaaaaaaccaaaagcgtataacggctcaatatagaaaatgaactagagggtgaatgagacctaatcccaaatttttgtacaaatcgatgctgggcgaaaaaattgcgaggttttgccactttttcagcttcatttcctcgactaatata

SEQ ID NO: 5076 - DNA, 1157 bp, Diabrotica virgifera
acgggattctgcagaaaggatccaaaccacactttgttaaaactgagatattagccaaaaatttacgataaaatttaaaattctctattaaaaataatcatggtttaacattaaaatcgtgactatatgcattagatttgatttaacacatactgtttgattcaagaaaacagttgtttaaaaaaatccacttttgtggcttggttctcttctgcaaaacaacttaagtgaattcaaagttaacaaacatttattttccattattgagttacataatcaaggcgtataatctaaaaaatgttaatatgaaattactgggatttaataatttgttcgatttcaaaatctggaagtcccatgaattcaagaaaacagttgttttaaaaaaaatccacttttgtagcttggttcccttcttacaaaataacttaagtgaatttgcataaaggaaccaacccacaatggatcttttctgcagaacgctgtcatgctgcaacgataatgttggttggttctttcgctcatagaggacggtatatatcgtatgtggcttggttattttctgcataagtatctacggggtattttacaacctatgagactgttaataggaaaatacatatttgtggtttggttcctttctgcagaatcccgtccaattatggcagttatttatgacaaccataatcgtaaagaagcggtcgggtaaaagtagcttagtttttcattggcttgcaaacttataggctatggtcagaaattattattagttgtcgtccagaagacaactctgaccgttgctacatcgcctttgaaatgttcaaagttataatatcccacaaccaaggctaattacgaaatagttggtaataaatcatttagtcagattagttgacatttcactttttgaattttacaagacagcttagtgtttaacattactgccacgagacgagacacagctatacacacacatagaaataaaagtgaaaaaagttgttgcccttttccgtatttcaacaactatagcagtcactccatttaccaaggttaccataaggataaggctatctaggagaggagactctcggcgaaaggtttcttagctatgcaatcagcattaagcagtagaatgaatttaactcgctcattctggt

SEQ ID NO: 5077 - DNA, 765 bp, Diabrotica virgifera
acgggattctgcagaaaggatccaaaccacactttgttaaaactgagatattagccaaaaatttacgataaaatttaaaattctctattaaaaataatcatggtttaacattaaaatcgtgactatatgcattagatttgatttaacacatactgtttgattcaagaaaacagttgtttaaaaaaatccacttttgtggcttggttctcttctgcaaaacaacttaagtgaattcaaagttaacaaacatttattttccattattgagttacataatcaaggcgtataatctaaaaaatgttaatatgaaattactgggatttaataatttgttcgatttcaaaatctggaagtcccatgaattcaagaaaacagttgttttaaaaaaaatccacttttgtagcttggttcccttcttacaaaataacttaagtgaatttgcataaaggaaccaacccacaatggatcttttctgcagaacgctgtcatgctgcaacgataatgttggttggttctttcgctcatagaggacggtatatatcgtatgtggcttggttattttctgcataagtatctacggggtattttacaacctatgagactgttaataggaaaatacatatttgtggtttggttcctttctgcagaatcccgtccatgtcattattggtcttacactggctttataaattcttgacttcatctcagtgttaatatgtcggtttcgccatatagtattattgagacatcctgccaatctatttg

SEQ ID NO: 5078 - DNA, 1019 bp, Diabrotica virgifera
ggtgtacgcgttaggtctctggatctcgtagaaccagagttgtggccagtgaaagatagattcatattcaccaaatttcaaatggaatatttcgacgtgagatatccaaagaattaagcactttttggggaaaacccattataacttttttaaggtgtttagaaaaagctttacttctgtttttacaaaaagtttctagcaataagtttgagcaagttacgctcagaaataaaagttggtcccttttgtttttgcaaaaagaaatcgggaagaccaccccctaattagcggcttaaatgaaattaatcgttaccgctccacaaattattttacttatgttgtgtttatatgatctgtaagtttcatcgattcaaagtgcttatttttgaaaaaatttggtttaaagtaaaatttttaaaaatttaaattttgaaaaatatgctttttttcaaaataacttaaaaattgttagagataccaaaaatctcgaaaaacaaaaaaagtcagatttgcttttctgaatatcatgtatttttttgtttttctgttagacaaaaattgattaagatttggtgtttctaaatttgcatacattcgtgatcagtgactcgttcaaccccttttaactacagccctttcaataataaggactttgaaccgatgaaacttacagatcatataaacaatacatacacgagtcaagaaacttgtgaagtcgtaacgattaagttcatttgaaatgctaattagggggtgattttcagatttcgaaaaaagggaccaactttattttgagcgtaacttatttacttttgatgctaaattttttttttaaaacaaaacattttttaaatacattaaaaaagttaaaatgagttttgctcaaaatagtgcttcgttttttggttatggtacgttaaaatattcgatttggaatttgacgaatatgaacctatttttcattagctataactctgcttctactaggtatagtaacctaatatatacaccatgttttt

SEQ ID NO: 5079 - DNA, 917 bp, Diabrotica virgifera
ggtgtacgcgttaggtctctggatctcgtagaaccagagttgtggccagtgaaagatagattcatattcaccaaatttcaaatggaatatttcgacgtgagatatccaaagaattaagcactttttggggaaaacccattataacttttttaaggtgtttagaaaaagctttacttctgtttttacaaaaagtttctagcaataagtttgagcaagttacgctcagaaataaaagttggtcccttttgtttttgcaaaaagaaatcgggaagaccaccccctaattagcggcttaaatgaaattaatcgttaccgctccacaaattattttacttatgttgtgtttatatgatctgtaagtttcatcgattcaaagtgcttatttttgaaaaaatttggtttaaagtaaaatttttaaaaatttaaattttgaaaaatatgctttttttcaaaataacttaaaaattgttagagataccaaaaatctcgaaaaacaaaaaaagtcagatttgcttttctgaatatcatgtatttttttgtttttctgttagacaaaaattgattaagatttggtgtttctaaatttgcatacattcgtgatcagtgactcgttcaaccccttttaactacagccctttcaataataaggactttgaaccgatgaaacttacagatcatataaacaatacatacacgagtcaagaaacttgtgaagtcgtaacgattaagttcattcaagacactaattagggggtgattttctcgatttttttaccaaaaccaaaagggaccaactccattttgagcgcaacttgcttaattttgatgctagaaatttttttataaacaaaaattaggctttttttaaacactttaaatgagttgtaatgagttttccccgacatgcgcttaatttt

SEQ ID NO: 5080 - DNA, 998 bp, Diabrotica virgifera
  SmartBlast Evalue=2E-55; Info=Putative elongation factor 1 delta n=1 Tax=Graphocephala atropunctata RepID=Q1W2A4_9HEMI
ttttttgagtatgagtgtaattaattaatttattaaatcaattaaacataatcgatataaatttcataatagagaacttcacattttagatcttgttgaatgctgcaatgtcgacactttggataaaatcttctatttctagcagctgctctgttaaccaatcaatagaaactttatcatcttctacaacgcatgagatttgtaatttgtgaattccataagctagagggactagtttagcagcaccccataaaagtccatcagcttcaacctttctaacatgttgttccattaatttcatgtcggtctcatcatcccaaggcttcacgtccaagatgacattggatttggcaatcaatacaggtttttttgatttttttgcttcatatgctttgagtctatcttctctaactttggctgctgcttcatcatcttcatcagaatctgaaccaaaaagatcgacgtcgtcgtcgtcatcatcattaacggcaggtttcgctgaaggtactgactgtatgttgatttggtgtacaggtttggtctgactgtctgttttttccaaagcagctactcttagttccaaggctttcaattgtgtaacaagagatgtaatggttttttcatattcaactattttcttctccataaattttatggctccagtgtctatggaatcaacgtttgatgtaaaagtgtccctactttcgattaacctctgacgagcttttgctacttcaccagccaatggggttaaagctgcttttgttaagttttcataatgagcgatttcggcatcctcatagtatctcctgtttaaccaaacgctgcttacttcttctggatgcattttcttgcctctatatgttttctggtggtatattaataacaggagtaattaattatagaaagtaatttgatgtaaaatcggacacctctttttgccaaaagatgtaagcatgaaaagagggggaaaattcttctacttttgtttaaatacg

SEQ ID NO: 5081 - DNA, 923 bp, Diabrotica virgifera
  SmartBlast Evalue=3E-50; Info=Putative elongation factor 1 delta n=1 Tax=Graphocephala atropunctata RepID=Q1W2A4_9HEMI
ttttttgagtatgagtgtaattaattaatttattaaatcaattaaacataatcgatataaatttcataatagagaacttcacattttagatcttgttgaatgctgcaatgtcgacactttggataaaatcttctatttctagcagctgctctgttaaccaatcaatagaaactttatcatcttctacaacgcatgagatttgtaatttgtgaattccataagctagagggactagtttagcagcaccccataaaagtccatcagcttcaacctttctaacatgttgttccattaatttcatgtcggtctcatcatcccaaggcttcacgtccaagatgacattggatttggcaatcaatacaggtttttttgatttttttgcttcatatgctttgagtctatcttctctaactttggctgctgcttcatcatcttcatcagaatctgaaccaaaaagatcgacgtcgtcgtcgtcatcatcattaacggcaggtttcgctgaaggtactgactgtatgttgatttggtgtacaggtttggtctgactgtctgttttttccaaagcagctactcttagttccaaggctttcaattgtgtaacaagagatgtaatggttttttcatattcaactattttcttctccataaattttatggctccagtgtctatggaatcaacgtttgattttgttaagttttcataatgagcgatttcggcatcctcatagtatctcctgtttaaccaaacgctgcttacttcttctggatgcattttcttgcctctatatgttttctggtggtatattaataacaggagtaattaattatagaaagtaatttgatgtaaaatcggacacctctttttgccaaaagatgtaagcatgaaaagagggggaaaattcttctacttttgtttaaatacg

SEQ ID NO: 5082 - DNA, 978 bp, Diabrotica virgifera
  SmartBlast Evalue=1E-11; Info=Polyprotein n=1 Tax=Antheraea mylitta RepID=Q2MGA5_ANTMY
ctctgagggtatgtttagtttgctcgccgaaatagaaatttgaggaagcggatttgttatctttgggagtacagagcacgagatgtcaaaaggaacgtcgttagcgacagcgaaaattgttgtatctacaatagattgagacgaggatgaggtggagttaattccattgatccgtaattttccatctctagtggtgagtgacagttcctttacgaggtcagcactaataaatgaaacctgtgaggccgagtctaaaagtgcctttgcgaagaccctcttgccgctaggagcgacaagatagacctggagtgtgcttaataacaccaaatgattatcaagcgaggctgcagatagagccattgaatgtggagtcgaattttgaagattaacttccgtttcaggagctctaacatgtgagggcccctgttgtgaattaccctgtgtatgggagttatttgagatagcggttttattatgattatttgagttgtgttggccaacagccgcggaagggttactatgacccgttttgtcgaaatggagcaacgtgtgatgacgaaatttacaaactatgcaagagaatttggatttacactgatcgagcatgtgagacccaagacaattaatacaaaatttattttgtttgacaaaactaaaacgttctttagaattcaactgcttgaactgaggacaagagtagatcgagtgagagtcgtggcaataggaacatttcttaggatctaagcgaggcgaaaggttactggtagaagtgtctgaggctaggtgtaaagagtgtctggaagtagtagtcgattttggttttgattgagattgaatattctcaagatgaacaacgcgtgtctcgatttcccctagaaaatggacaaaatcaggggtagcttggctaccaccggattggaactcaagagccctaatggtaggtgcgtcgagtttctgagtagcgatatgtatgagaag

SEQ ID NO: 5083 - DNA, 930 bp, Diabrotica virgifera
  SmartBlast Evalue=1E-10; Info=Nucleic-acid binding protein (Fragment) n=3 Tax=Bombyx mori RepID=Q9N6I9_BOMMO
ctctgagggtatgtttagtttgctcgccgaaatagaaatttgaggaagcggatttgttatctttgggagtacataagcgatttagagttggcgtacctttgtgtcaggttatcccgggctattttgtaattgtcacctgtgagtgggatatgctcgagaagcgtcaaaggctcggaagttagaaaacttttgaggtaaatgagtttttccagatcacttaatgtagtatcagatcctattattgtatcaaaggtctcaatgaatgaattgtattcagtaactaagccactaaatggttttaactgaatacgagggaggtttactgttcgttgcctagccatagactgtgaggttagagaagaattagggtcaaattggagggagggggtagcagtcacattagaactttcaatgacctctaacctttcttccaatagagaaattgtatccaaatatttatcaaaaaccacagaggaatcagtagagggggtaggttcctcggggatcgtctccagcacattttgagcatcgcggaaaagtccgtaagaatgtttgagttgtgaaattatttcacgaattttatatttgtttagagaattaagagttgtgggaaccgaatcagccaacttggttatatcaagttttgcggtgagcctctgtcggttatattttgatcggtcagccatgttgcgagaatgtgagattagatagattatttgcaaatgtctaaacctataaatcgatgcgaaaatgagagaatatgtacaatatattatatattacacgtttaatagtgtgagattggcttaatagtatcaccctgtatgagcgcagattagtatatgaaatgcaaaactataaaatttcaaaatatatgcaattttccaaaatgggtatttttcagcaagtgtgagacacccttaacaagta

SEQ ID NO: 5084 - DNA, 1019 bp, Diabrotica virgifera
  SmartBlast Evalue=2E-50; Info=Endonuclease-reverse transcriptase n=1 Tax=Bombyx mori RepID=D5LB38_BOMMO
ttcaacccaacttatcttcagcattcgaaggtagcaccacatctcgaaactttcaatattttttatgttgttctgtttgagagtccaggcctctacaccgtataatagcgtgttaaatacgtagccacttagcattcttaatcgtagagggatgcttatatctctgttgcagaagaaatttctcatctttatgaagatggccctggcaatttcgatacgtctttttatttcattgttttggtctccagtttcgtttattaaagttcccaagtatttgtaacttgatactttttcaatttgaatgccgtttatactaatatgtgctggttgtgtcatgattttactgaagaccatatacttggtttttttgatattaatgtttatgccataattgttgcaagcaatatttatgtttgtaagtaatcgttgtaattcttctactgttcttgcaactagtacagtgtcgtccgcgtatcgaatattatttacaacctctccattgattacgattccttcatttgcttgcaaaagggcttcctgacagatgctttcactatatacattaaatagcagtggtgacaaaatgcatccctgtcttactcctctacgtatttctattgcttttgatatctcattttctattttgatgttagcttagtagtaagccactttggtgctaatagtcgccccacttagatttccggtatgtcgtcacctatggaaggaagtcacgatggaagtagttgggagaggcatatgtccaaacgtggacgatagaaggctaagaagaagaagaagtcaccttaagcgaaactatccaccatgtgtggtcagcagtttccatctagctgtaacggagctttaagtataataccacatacatttaacaatattccttgtatcggcatgtaagtaaaatattacaagttaaacatgtacatgtataccattaaaaccttagacatttaatattggcataagtgttatacagtatgtccctgtaagttgcatccatatgg

SEQ ID NO: 5085 - DNA, 877 bp, Diabrotica virgifera
  SmartBlast Evalue=1E-65; Info=Endonuclease-reverse transcriptase n=1 Tax=Bombyx mori RepID=D5LB38_BOMMO
ttcaacccaacttatcttcagcattcgaaggtagcaccacatctcgaaactttcaatattttttatgttgttctgtttgagagtccaggcctctacaccgtataatagcgtgttaaatacgtagccacttagcattcttaatcgtagagggatgcttatatctctgttgcagaagaaatttctcatctttatgaagatggccctggcaatttcgatacgtctttttatttcattgttttggtctccagtttcgtttattaaagttcccaagtatttgtaacttgatactttttcaatttgaatgccgtttatactaatatgtgctggttgtgtcatgattttactgaagaccatatacttggtttttttgatattaatgtttatgccataattgttgcaagcaatatttatgtttgtaagtaatcgttgtaattcttctactgttcttgcaactagtacagtgtcgtccgcgtatcgaatattatttacaacctctccattgattacgattccttcatttgcttgcaaaagggcttcctgacagatgctttcactatatacattaaatagcagtggtgacaaaatgcatccctgtcttactcctctacgtatttctattgcttttgatatctcattttctattttgatgttagctttctgattccaatataagttgagaattattcgcagatctttattatctgtcttttctttcaagaatgtctcttagcctatcgtggcgtactctgtcaaaatcgataaaacatgcatgtacttcttgattaacgtttaggcacctttgtgtaagaacattcaaaccgaagagagcttctcgagtaccaagtacttttatgaaccccatctgtgtattactaat

SEQ ID NO: 5086 - DNA, 1189 bp, Diabrotica virgifera
  SmartBlast Evalue=2E-15; Info=Endonuclease-reverse transcriptase n=1 Tax=Bombyx mori RepID=D5LB38_BOMMO
gatgactaggatgagctaatgatagaaatagattctgaatctaaggcctcatcttttttagtttagataaccacatccattatttgctgttacgaagaaaatttcatttttgattaaataaatttttaataccctattcatctttaacaacatacctaagcgtgtcatagggttcattctcagaaaattctccatatcgagaatattctcgagaatatttttgagaatattctccgatttttcattctcgagaattttcctacactaaatgcaccaacagtatgatgattaggtggcgtgtcagatttgtgggaggtcttcttcttcttaaagtgccgtctcctcaatggaggttggctactacaattgcaaactcttctctgtcttcagctgttcttattagctgttcaaaatttagccctgtccattgtcggatgtttctgagccacgatagtcttttccttcctagtcctctctttccctcgatctttcctttcactataagttgagcatattggtacttattatttctcagtatgtggcctaggtactgatgtttttctaactttcactgtgttgaaaagttctctttccttgcctatttgtttgacgtaagtacctactcggattgttggtccaattgtcagatgattctgaaaagactcgctttttgtttgtttccatggttgtatactacaatgtgttcgccaggagatctgaaagacggtctgacgattttttgaatgattttttgatgatttcatccatgattaaattgaagagcataggactgaatgagtctccctgtcttattttgctgcctatatctataggttctgtaagttgtctatctattctgacttccatgttgttgttttggtagatgttttcaattagtttttatgatatctagggggcttctctattatacctacagaagatggattccatctttaagtcttactctgtcaaatgctttcttcaagtcaatcatacatagacttgttggtttattatactctagtgcagtggtcaccaattagcggaccgcggtccgcatccggaccgtgagctagttttgtgcggaccctcaataaattcagaatatacccaatgtttttcaattttgaaaatgtttggccatgaaattgtgtactatgtttggctcaacttatgtgtgctaagccgc

SEQ ID NO: 5087 - DNA, 712 bp, Diabrotica virgifera
  SmartBlast Evalue=5E-26; Info=Endonuclease-reverse transcriptase n=1 Tax=Bombyx mori RepID=D5LB38_BOMMO
gatgactaggatgagctaatgatagaaatagattctgaatctaaggcctcatcttttttagtttagataaccacatccattatttgctgttacgaagaaaatttcatttttgattaaataaatttttaataccctattcatctttaacaacatacctaagcgtgtcatagggttcattctcagaaaattctccatatcgagaatattctcgagaatatttttgagaatattctccgatttttcattctcgagaattttcctacactaaatgcaccaacagtatgatgattaggtggcgtgtcagatttgtgggaggtcttcttcttcttaaagtgccgtctcctcaatggaggttggctactacaattgcaaactcttctctgtcttcagctgttcttattagctgttcaaaatttagccctgtccattgtcggatgtttctgagccacgatagtcttttccttcctagtcctctctttccctcgatctttcctttcactataagttgagcatattggtacttattatttctcagtatgtggcctaggtactgatgtttttctaactttcactgtgttgaaaagttctctttccttgcctattctatgcagcacttcttcgtttgaggtatgcgatgtccatgaaattttaaggattctctggtagatccacatttcaaaggcctccaacttatttatggttgatgttttaa

SEQ ID NO: 5088 - DNA, 1070 bp, Diabrotica virgifera
tctaacaacattgtcgggagaagattccgactcatctgtaaattcctctaaaagacgagcccatttagcatccttcagccaagactccattcttattaacgaggtttcttccgatgacctgaagtcagaaataaaagataaagtgttaagtgcgtagaaaattagtggagtgcatcgcaaacataaacacctatttacgcgaactgtgccgcctatgtgtgaaaactgtgaaacatcactcttcgtgaagcatatattaacttagtgcaaaacattacctttgttatatttttttagatcgctaataaccctggtggttacagcgtaaataaattaaaaaaaaaaagatatgtttcggtccgatgattcaaagtagcgaatgtataatagcgaataactgtataatcaaataataaaaatccgttaaaatgaaatcataaactgcctcacaagaatttcttggaagcgatactgaaacaaaaatcgcacaaattgtaaacacgtgcattttattcttctcagcagtttagcattttcgacagtttacagattataattgaataactgttgaataaattacaacacaaactaacgaatgtgacacattcgacatttagcgttgtacaaatatacctttaattatatacaaaacaaaagtatcgaatataccattttcatcagtttgcagtcaaccaaatggaaaaatgttcatattcgatagtttaaacagcatatttcccgcgctccttaatcaagctacaataacgagaatttgccacaagatgtatcaggtataacgcgagggtaaggtatcgaatctgaaaaacccgatttttcacattcgatagttggaaatggtagggtcgaactgtaaaaaatatgttaaaagtttttttaattttaattttagaaattatttgttttatattttcattactagaggaatttactttcgtacttctcataccgtacagtagagtggacaattggtggtcgagtgtctagcgatgatccattacagaggcaaattcgtaaaatacaataattgttattaacgccaccttggaaga

SEQ ID NO: 5089 - DNA, 819 bp, Diabrotica virgifera
atattttttgtatgtaatgtttaatccttgttagattgataacaaatttgaactgcttatcatttttttctttccaaaaaatctcattcgttactttgctttttgtagaaatcaaagatttgtttcggtccgatgtttcaaagtagcgaatgtataatagcgaataactgtataatcaaataatgaaaatctgcctcacaagaatttcttggaagcgatactgaaacaaaattcgcacaaattataaacacgtgcattttgttcttctcagaagtttagcattttcgacagtttacagattataattgaataactgttgaataaattacaacacaaactaacgaatgtgacacattcgacatttagcgttgtacaaatatacctttaattatatacaaaacaaaagtatcgaatataccattttcatcagtttgcagtcaaccaaatggaaaaatgttcatattcgatagtttaaacagcatatttcccgcgctccttaatcaagctacaataacgagaatttgccacaagatgtatcaggtataacgcgagggtaaggtatcgaatctgaaaaacccgatttttcacattcgatagttggaaatggtagggtcgaactgtaaaaaatatgttaaaagtttttttaattttaattttagaaattatttgttttatattttcattactagaggaatttactttcgtacttctcataccgtacagtagagtggacaattggtggtcgagtgtctagcgatgatccattacagaggcaaattcgtaaaatacaataattgttattaacgccaccttggaaga

SEQ ID NO: 5090 - DNA, 969 bp, Diabrotica virgifera
  SmartBlast Evalue=4E-24; Info=Androgen-induced protein 1 n=1 Tax=Harpegnathos saltator RepID=E2B9U0_9HYME
agcccttgaattgaaatgtttgagagttaacctcaaaatttagtcaatctgtttaattttataagcgaagtgatattattttcttatataattatgaataaaactgtagatattgataactaaacaactcattctatagattatcgtgacttagaaactatcgtgacaattactaaggaattaactagtttattattattgttttgttgcaacttgccaaggttcgttcgtaaataaattaacagagcgcacaagaaacaagtagtttcaaatcggtagcggaaaatgtcttttctaaagaaaatcgtgtttcctttgtatgtcgggtttgtgatattaaatgtctattctttgagactgcaactcgcgttgaatgaagtttctgagaggcctaacggggagatgttcagccatctgaaggtgtaccactattttttcctgaccaattggaattttatgctccaaatcttcttcatttcgctagccgtcctagatgaactctcaaaacttctgagcttaccatcaaaagtccagaatctcctcagcaaagtcagggcctacatattcaacagcctcgtgtttccatgcagcacattagtagtttttacgttttggtctatctgggctgtggatagagaactgatattcccgaaagttatggacacattctttccatcgtggttgaatcatgtgttacatactttcatagctattcctttagttatagagatattgctgccaaagaaagataattttgtgcaattcaagaatgcagctcctattttattattttatgctggattataccagacattgtatttttccatatacctcagggatggagtatggctatatccaatatataaagttcttagcataccccaaatggtgttatttaatatagtacaaatgttattgatattaggattccagtatgtaggtataagtctccaaaatagtaaaatgaag

SEQ ID NO: 5091 - DNA, 929 bp, Diabrotica virgifera
  SmartBlast Evalue=4E-25; Info=Androgen-induced protein 1 n=1 Tax=Harpegnathos saltator RepID=E2B9U0_9HYME
cagagatctccactcaagtcgattcgcggatagcgctggcggttggctgtgtgtgtagcccgattaagtgaaattaaatgggtcgaatgaactttttcacaattgtaccgtaatgcaactgcaatcaattgcgaaaaaactagttcacaattgtataatttacgctattaataacatttaagtgataacgttatattatagctgcatgctttaaatatccggctaagtcaacggaaaccgttaacatgaaatatctcaacattattgtggtgtttatatacatcgggctgattgtgacggatatttgtgctatggtcgtgagagatagactgaataataacgtgaatagacccaaaggagaatcatttaggattcagaagttatatagatattattttttgacttactggaatttcatgctccaaatcttcttcatttcgctagccgtcctagatgaactctcaaaacttctgagcttaccatcaaaagtccagaatctcctcagcaaagtcagggcctacatattcaacagcctcgtgtttccatgcagcacattagtagtttttacgttttggtctatctgggctgtggatagagaactgatattcccgaaagttatggacacattctttccatcgtggttgaatcatgtgttacatactttcatagctattcctttagttatagagatattgctgccaaagaaagataattttgtgcaattcaagaatgcagctcctattttattattttatgctggattataccagacattgtatttttccatatacctcagggatggagtatggctatatccaatatataaagttcttagcataccccaaatggtgttatttaatatagtacaaatgttattgatattaggattccagtatgtaggtataagtctccaaaatagtaaaatgaag

SEQ ID NO: 5092 - DNA, 1072 bp, Diabrotica virgifera
  SmartBlast Evalue=5E-94; Info=G-protein coupled receptor n=1 Tax=Culex quinquefasciatus RepID=B0WJ64_CULQU
cattaactttaccgacatggacaacaactactgtaatgccggacgataactcaacttcatcaacagacgcgtataatgacagcgattacgtcgatccacggttaatggagaggtatctccagaataaagcaattgatgaaccagcctatacggtccttattgtgatgtactgctttctcatgattatgggagctttaggaaacactcttgttatcgtagctgtagttcgtaagcccgccatgagaactcctagaaatatgtttatagtgaacttagcagtagcggatcttcttttgtgcgcaattacaatgcccctcacacttatggaaattttgacgaaatacttccctctcggaaataatctgtttgtatgcaagataattggcatactgcaagcaacaagtacttatgtttccactatctccattactgcgatagcgctggatagatatcaggttatcgtctatccaaccaaggagagtttacaacagtttggagctacgcttattcttctcctaatatgggtggtggcattattgcttgcaatgcctctattcgttgtaagacaccttgtacatcataccgtcccaatggagtcggaatgtttaaacatcaacttttgtatagaaaattggccagtagaacacggcagagcgtactactcgatattttcgttaattttccagtacacactgccaattattattgtatcggctgcctacgtaagaatttcctataaactaagaaatcgattcgcaagcggttttactagtgatgaaggacatggcaatcgacgggaacttcgtggacgtcgtcttcatcgaaccaatctgctgctagggtcaattgccgtcatcttttgtataagctggttaccgctcaacgtattcaatttggtagcagatctttcggcaaatgcgtcttttacttcgcagccaatgatgatttgctacgctgtgtgccacatgatgggaatgtcctcagcctgttccaatcccattctctacggttgcctcaacgaaaatttctggaaggagtttaaagatatcttgtgtatagagtccagcattga

SEQ ID NO: 5093 - DNA, 825 bp, Diabrotica virgifera
  SmartBlast Evalue=9E-59; Info=G-protein coupled receptor n=1 Tax=Aedes aegypti RepID=Q16SC4_AEDAE
cattaactttaccgacatggacaacaactactgtaatgccggacgataactcaacttcatcaacagacgcgtataatgacagcgattacgtcgatccacggttaatggagaggtatctccagaataaagcaattgatgaaccagcctatacggtccttattgtgatgtactgctttctcatgattatgggagctttaggaaacactcttgttatcgtagctgtagttcgtaagcccgccatgagaactcctagaaatatgtttatagtgaacttagcagtagcggatcttcttttgtgcgcaattacaatgcccctcacacttatggaaattttgacgaaatacttccctctcggaaataatctgtttgtatgcaagataattggcatactgcaagcaacaagtacttatgtttccactatctccattactgcgatagcgctggatagatatcaggttatcgtctatccaaccaaggagagtttacaacagtttggagctacgcttattcttctcctaatatgggtggtggcattattgcttgcaatgcctctattcgttgtaagacaccttgtacatcataccgtcccaatggagtcggaatgtttaaacatcaacttttgtatagaaaattggccagtagaacacggcagagcgtactactcgatattttcgttaattttccagtcaagatcaggattgtcgtacagatgttaaaaaagcgattagttctatttctggatataagaaatgtaatccaaccgaagaagatttgatttctgctgttgctactgtgggacccatatcttctactgtcgatgcatcc

SEQ ID NO: 5094 - DNA, 1082 bp, Diabrotica virgifera
gtgagtttgaacatggtttgtgtttattttgattaatttataatgctgttatttttacctgtaaagtatggttttgtgagaaaaaactggcgatgtatttcttaatgataaagtgttccttgtccatatcctgccaataagccaaaacaccgactgaacaaaatggggggatttatcatatttatgatagtagccacgattattggcgtatctgctgtgttcattaaagcatgcatagactgttttagtgataagaaaccacgtaaatctcaaaacaacaacttcgtttccgacaattacgaagacggagtgatcttcaccagtgagccctatggaaccaactacaatgttgagtctgtcaacgaagttacacatattcatcactttgaaaccagtgataacatagatacgacaacaggtgacacagacaacactggatctggagttgcctcgggtctggcgggtggttttgcagaaacatttacttcttcgttcgctgatccaggggggagttccacgtacgattcgggtggaggtggcttcgactctggaggcggaggagattctggaggaggaggagatggtggcggttcatacgattaaattttcaaatagtccggactgtatgatcgcacccgttatataaaatattccgattcgtttttgtgcataaatttactcaaaaagagtaagtttgtgcttataacaattcacagagtgccaggtgccgcggtcggtaaggttgtttaaaaatttttttttaactaaattaaaaaatcaattttttcacttcggacagattttttttagatttgttggatcattctgagtaaaagggtctcgtgtgatttttctctaaaattgattgttgttgagttatacgcgatttgaaatttgaaaatcgcgagggtgaccattttcaggggttaataactcggttaacttcgagagagatgcactattggatagcatgtctttctcgtactcacgcctcaatacgcgcttagcgctcattgttaataattaaaaataacgctttgtgatataatagcgacaaaaatttcatcataatcttgtagggg

SEQ ID NO: 5095 - DNA, 799 bp, Diabrotica virgifera
gtgagtttgaacatggtttgtgtttattttgattaatttataatgctgttatttttacctgtaaagtatggttttgtgagaaaaaactggcgatgtatttcttaatgataaagtgttccttgtccatatcctgccaataagccaaaacaccgactgaacaaaatggggggatttatcatatttatgatagtagccacgattattggcgtatctgctgtgttcattaaagcatgcatagactgttttagtgataagaaaccacgtaaatctcaaaacaacaacttcgtttccgacaattacgaagacggagtgatcttcaccagtgagccctatggaaccaactacaatgttgagtctgtcaacgaagttacacatattcatcactttgaaaccagtgataacatagatacgacaacaggtgacacagacaacactggatctggagttgcctcgggtctggcgggtggttttgcagaaacatttacttcttcgttcgctgatccaggggggagttccacgtacgattcgggtggaggtggcttcgactctggaggcggaggagattctggaggaggaggagatggtggcggttcatacgattaagaccatccacacacactgctgctaaaaagaaaccagttagtaactttagttaccaatcagttacttagtagtcactgcccatgtattttaatgagtgtctgcacacagcgctactagttagcagccggtctataatgtgggagtgatcagtcgacagcggactgtacatgcaggttgcttggggactagtttcagt

SEQ ID NO: 5096 - DNA, 995 bp, Diabrotica virgifera
ggttgggctctgtgccgccgttctttattatattacgaatgcgtgtgccaaatgtctcgagaaatgttcaggattgcagcctcaatcttggaacgcgtttttgctacctgttgatcgctactgtttcctcttaagggcgcatgcgcaaaatttcgtctccaatgctttttgaatgcattaattttttcgaatcctgaaaaaactaataaatatttttgaaaaatttacacgcagaataaaagatatgtaacaatatgagatatctgcaattattactgagcgccgaaagtccctttagaataaacaataagtttcttttgaatcagatgtttaaaattaaaaatcacactaaattttctcttattttttcactcctgtaacttattaaaataaacatcatagaagctttcaggaaatttcggtaataacgtagtatttcgttctgtgtttaaatctttttaaaatacttattggttttctcaagattcgaaaaattgaatgcatttaataagaatggtagccgaaatttttctcctacccccttaattgtttccataaaatactggtacaatatgcttttgcacggtatcagactccatattatacttatggtcacaaaaatcgttttagacacacctgtatgaagcattatatttaataataatatgtaaataaaatatagtattgaattctatctaaaagctttaatacatactaatatgtacctatcttccaatgaaatgtactttgaaaagaagtaataactgtgattttcaaatttagtttgtaaggaaatttaatatttaataaattttgaaagttttataatgcattcagatgcaccatagtttcgttcttcttttactaaagtttgattagttcatcaccagtatttaaaagagaatacccttgtaaatatacttatattaaacatattagactttgttataatcaaatacaaaaattatgtaacaatatgagatatctgcaataaa

SEQ ID NO: 5097 - DNA, 886 bp, Diabrotica virgifera
tcttggaacgcgtttttgctacctgttgatcgctactgtttcctcttaagggcgcatgcgcaaaatttcgtctccaatgctttttgaatgcattaattttttcgaatcctgaaaagactaataatatttttgaaatttacacgcagaataaaagattacattattactgagcgccgaaagtccctttagaataaacaataagtttcttttgaatcagatgtttaaaattaaaaatcacactaaattttctcttattttttcactcctgtaacttattaaaataaacatcatagaagctttcaggaaatttcggtaataacgtagtatttcgttctgtgtttaaatctttttaaaatacttattggttttctcaagattcgaaaaattgaatgcatttaataagaatggtagccgaaatttttctcctacccccttaattgtttccataaaatactggtacaatatgcttttgcacggtatcagactccatattatacttatggtcacaaaaatcgttttagacacacctgtatgaagcattatatttaataataatatgtaaataaaatatagtattgaattctatctaaaagctttaatacatactaatatgtacctatcttccaatgaaatgtactttgaaaagaagtaataactgtgattttcaaatttagtttgtaaggaaatttaatatttaataaattttgaaagttttataatgcattcagatgcaccatagtttcgttcttcttttactaaagtttgattagttcatcaccagtatttaaaagagaatacccttgtaaatatacttatattaaacatattagactttgttataatcaaatacaaaaattatgtaacaatatgagatatctgcaataaa

SEQ ID NO: 5098 - DNA, 959 bp, Diabrotica virgifera
acgaacggattgcgagctgttgcgagcacgtcctgtcggtttttgggacgaacacaaaggatattctctgttcacacagagattgtcagaatgacgtttttctagaaataataagaaacgtaagaaacacaatgtaataaattcttattttataattgataaacaaataattgctgtctttaagaaggagactttgagacaaaattacaaattaaccgagtcatttacataaacttaacacaaattgatgcgtagttagttcgtcgctttccatggatcgtggtgagtttgcgatgagttcgctgtaaatatattttcaacgaactgtatgcgaatagttcgcaaacagttcggctggcatatgctcctgctttaccgagacgataaaattaaattttgatttagttatgaaatttaagttttttattctcgaaattttgttaaatatttaggtgcaaggacaaaccttatgggatatcagtttttaatgtgtttaatttaaattaatttttaattgacgttccgttttaagtgtgtctcatttatagcgtgtaaataacaaatatggatgccattcttttaaaaatatgataagttttgactgtattagttcattacaaacagtggataaacaatgataggaatattgtaacatgtggcggcaaacaggagaagagtatcttatttatagtattgtttttttgaaaaaaaaaaatgcgttgttttatcatatctcggaaaatagtagactacttcaaaatgatttagctaagaaataaagatatttttctgctactgcacttgtccccacttctagtatttttctactgtcgcattgctattgaagcaaatttagtttcggcatgcaatcaagaaataagtgtgaatttaaaccaaccaaccaaagacattttattaaagtgattttaaatgataaggtgctacttgtgaactactgt

SEQ ID NO: 5099 - DNA, 914 bp, Diabrotica virgifera
gtcacttgaatcggacagcgggtttgggtaattcgtgacatcaagttgaccagattttttagtggatcgattgttttgcacccgagtgtaattgataaacaaataataactgtctttaattacatttagaaggtgactttgagatataatttattaaaaaattcatcaataaaatcttttacattaaacttcgcacaatttggttcgtagttagttcgtcgctttccatggatcgtggtgagtttgcgatgagttcgctgtaaatatattttcaacgaactgtatgcgaatagttcgcaaacagttcggctggcatatgctcctgctttaccgagacgataaaattaaattttgatttagttatgaaatttaagttttttattctcgaaattttgttaaatatttaggtgcaaggacaaaccttatgggatatcagtttttaatgtgtttaatttaaattaatttttaattgacgttccgttttaagtgtgtctcatttatagcgtgtaaataacaaatatggatgccattcttttaaaaatatgataagttttgactgtattagttcattacaaacagtggataaacaatgataggaatattgtaacatgtggcggcaaacaggagaagagtatcttatttatagtattgtttttttgaaaaaaaaaaatgcgttgttttatcatatctcggaaaatagtagactacttcaaaatgatttagctaagaaataaagatatttttctgctactgcacttgtccccacttctagtatttttctactgtcgcattgctattgaagcaaatttagtttcggcatgcaatcaagaaataagtgtgaatttaaaccaaccaaccaaagacattttattaaagtgattttaaatgataaggtgctacttgtgaactactgt

SEQ ID NO: 5100 - DNA, 1042 bp, Diabrotica virgifera
acatcctacatccttacaacatcttgttaaaaaaactgtaaaatcaatcctgaacgacttcagtgcaaaggttgctaaaaaatacggtcacgtcatttcagtttgtatttcaatgcttttagcaaacaaagataaaaactactcgcccatcatctaattagtgaatatcaaccatcaaccagcgaaacagaaccagaggatacttttggcattaataaaattgctgcaaagttttatgtgacagtgcttattaaaaacaaaccggcaacatttgaagttgattctggagcaggatttacactcatctcagaatcaaaatttaaagaactagatcttgatttaccacttcaaaaacctgatattgcatttagatcatatacaaaaacgtattttatcccctgtggaaagcaaaaacatcaatacaatatcaaaataaaatttcaacagaagaattttatgtagttcctgatgaattggcctccttattagggcgtgtatggataagacatttaaacattaaagtgggatttatagtttgacgtagcgcaaacgtagacgcaacggagacgcactggaaaagatcaacaccgaattttgtgtactcgtgtttataaatgaacgcaagcgcctgacggaacgtaagagaaacgtaacggaacggaagagttcaccaactttcatcttttacagtgcgtttcttacgtctggccaatcaaaaggaagaaattcaagaattttgttctgtcacccaaagtgaacacgccctcatcaattttgtaaagttaaagttgtttatcaacatattcgaattttgttaattatttgttaatacaatggatgttaagttattaatttaataaaaatatatcatagagtcattttaatatttcagataaatatgagttgtttatagcctaattcggggttatccacacataatattataggataggtgaatccaataaacattttaaagaccaggaaatgaaacaaaatagttggaaatcccacggcatgcgcggcaccaatgagcatagcttcg

SEQ ID NO: 5101 - DNA, 818 bp, Diabrotica virgifera
acatcctacatccttacaacatcttgttaaaaaaactgtaaaatcaatcctgaacgacttcagtgcaaaggttgctaaaaaatacggtcacgtcatttcagtttgtatttcaatgcttttagcaaacaaagataaaaactactcgcccatcatctaattagtgaatatcaaccatcaaccagcgaaacagaaccagaggatacttttggcattaataaaattgctgcaaagttttatgtgacagtgcttattaaaaacaaaccggcaacatttgaagttgattctggagcaggatttacactcatctcagaatcaaaatttaaagaactagatcttgatttaccacttcaaaaacctgatattgcatttagatcatatacaaaaacgtattttatcccctgtggaaagcaaaaacatcaatacaatatcaaaataaaatttcaacagaagaattttatgtagttcctgatgaattaaggcgtatatgaataagacatttaaacatttaccttcaagacaccgatagctcaacaggaatcacacaaattaaaaatataccggctaatgaagaagaattttttcaaaaatattcagacatgtttgaagaaagaattggacttgaatcaaatttcaaagtaaatttgcaactgtgtaaaaatgccaagccagtctactttaaagaacgagatgtactttatgcacaccagggaaaaagttgaaaaagcacttgacagcttataagctcaaggaattatatctaaagtcaactatagtgattggggtttacaatggttgttattccaaaagctgatggtgtt

SEQ ID NO: 5102 - DNA, 975 bp, Diabrotica virgifera
  SmartBlast Evalue=1E-25; Info=Leucine-rich transmembrane protein n=1 Tax=Aedes aegypti RepID=Q17CY4_AEDAE
aaagttgtcagaacgcgagtggtgtgtgaatctgcgtcgctaaaaccacaggacaagcgcatcctcccaatgaaaaacttattagcaccatacttttgctcttccaatttcaatgcgataattcggtgaattagtgtctcctttcgtcggctacaacgtgtgttaaattataccgtactggaatatttttttattcaattaacttgaggacatgaactgcatgacgtattttctactactaattttattctccagtgtaaacttaaaaaaggtttcggtctatgtccatccatattcacccgacattactggatgcgacttcataaatggcgaagacacaaacgtcaactgttacggaaaatctctgatggagatcccgaataacctgtctagatatctttccgaatttagcatgactcaaagcgggattaaacatataaccaagagttcctttgacagatacagggaagaaatgagggacgttactctgtccgatttgccatatttacgagtaatagaagatggtactttcagtgatatgcccaaactaagaacattgacaattaattttaatcctttagaagttgtggatgattatgcttttaatggctctgaaatagcagaattgcaaatgcaccataaccctcaactcagaaccttaggtatcaacgcctttagtggtattaaaagtctatggtcattagacttatcccgcacttcgattacaagactgcccagtgaaggattgcaagaactggaaactttaaaaatagaagctacacatacgatgcaaactattcctagtatttacgatttggggaaattaacatcggccaagctgacacattccttccactgttgtgcattccgatatccagaacaacacgatcccagtaaacatgctcagtatgccgaaaatctaaaggaaatattgtaattggcaaattctgattccaacgtatcaagtagaaagag

SEQ ID NO: 5103 - DNA, 886 bp, Diabrotica virgifera
  SmartBlast Evalue=5E-11; Info=Leucine-rich transmembrane protein n=1 Tax=Aedes aegypti RepID=Q17CY4_AEDAE
aaagttgtcagaacgcgagtggtgtgtgaatctgcgtcgctaaaaccacaggacaagcgcatcctcccaatgaaaaacttattagcaccatacttttgctcttccaatttcaatgcgataattcggtgaattagtgtctcctttcgtcggctacaacgtgtgttaaattataccgtactggaatatttttttattcaattaacttgaggacatgaactgcatgacgtattttctactactaattttattctccagtgtaaacttaaaaaaggtttcggtctatgtccatccatattcacccgacattactggatgcgacttcataaatggcgaagacacaaacgtcaactgttacggaaaatctctgatggagatcccgaataacctgtctagatatctttccgaatttagcatgactcaaagcgggattaaacatataaccaagagttcctttgacagatacagggaagaaatgagggacgttactctgtccaatttgccatatttacgagtaatagaagatggtactttcagtgatatgcccaatctaagaacattgggatcggaaaatctcaccagttcagattacttactccgatcacggatgttcggagcaatacatcccataaaaggcaaagctttgggacgcgaagaagggagagtcatcaacacaatgaagaacgacgatttcaacgaagatgatggattcttccacctggttacgaaagtgaatgatacagaggcaaataatcagtgtggaaatattgtaatcaggatacctgaagtggaatgtttaccagatccagacgctttaaatccatgcgaagatataatgggaatgtcatggctacgaatatcagtatggtgcgtggtcgtattggcattg

SEQ ID NO: 5104 - DNA, 1249 bp, Diabrotica virgifera
tatttacaggtaataatatgcataaataattcgttttataaagaataaagaaaattgaaaacggattttataatacttacataattttttaaacaaaagagatccagccagagtaaaactaacagacagaacagcaaacaagccactaatttccattttcccaatattctttatctatgcattttccaatcagaaatttttaggttatcatgaaatgtgatgaccacgcgaccctacatagatacacgcgcggcaaatttgaaaatgaacgcaaattgaatagtaaatggcctctcttaaaatataggacattggtagtatgttcgtagaatgtcttgtggtaacattccaccaataatttaatcagatgttcaccgaatgttccttgaatgtccaggacattcaaacattaatagaactttgatagtacattcctggaatgttttgttttgttaggttggcttatgggtgatcaaatataataaactacaccgattctgagtcggttcctactctatcttaaaacagaaaaacaaattcacaacggtgtaacttttctacacacatacacacacacccataattatttcccgtttttaaatagaaattgaatcaaatgtctaagctgggtggcttttgaatggtataactgagattcaaaattactattagaagccgtagaagtacgacgtaaatcttccaagcttaaatctttggtttcacgctatactcggagcagagtacaaaacgatggcggtatatatggatgaactgctgatgctttagtgcagagatcggcaacctgcggctcgccgccgcatgcggccctttgcaactttttacgcggcccgacaaagcaccactataattagggaaaatccacaggaaaatattccaatatacggttcagagaacgtgtatgaattgtatggcttcgaaattatggcatttaggtatagggaatgtcatatgaaaaataatcagtatcccttaaggattccaaaattaaaaatatatagggtgttccatttgaaataagaaagttcgttagattttcagaaaaacggaagatttgacaacaatgtaattaccactataatatcggccgcattaaaagacccttacccaccaaaacttataaaaatcattctagcggtttccgggaaaataacgtgtggccagactttctcgcaaccctgtatagtgtcgcatatagaggggttgtgagccactagcgagaactgtcgtt

SEQ ID NO: 5105 - DNA, 619 bp, Diabrotica virgifera
tatttacaggtaataatatgcataaataattcgttttataaagaataaagaaaattgaaaacggattttataatacttacataattttttaaacaaaagagatccagccagagtaaaactaacagacagaacagcaaacaagccactaatttccattttcccaatattctttatctatgcattttccaatcagaaatttttaggttatcatgaaatgtgatgaccacgcgaccctacatagatacacgcgcggcaaatttgaaaatgaacgcaaattgaatagtaaatggcctctcttaaaatataggacattggtagtatgttcgtagaatgtcttgtggtaacattccaccaataatttaatcagatgttcaccgaatgttccttgaatgtccaggacattcaaacattaatagaactttgatagtacattcctggaatgttttgtgtttttagggttctttgtcctctcaggttgatattcgagtgcttgtctgcagacatattaattttcaaagttttctgcaaatatttgagcgaaatttttaaaattaaaacagtcttatatctcccaaaatagttattttgttacgatttaaagacaaccttatccaatgtc

SEQ ID NO: 5106 - DNA, 1362 bp, Diabrotica virgifera
  SmartBlast Evalue=1E-112; Info=Cytosol aminopeptidase n=1 Tax= Camponotus floridanus RepID=E2A4Q4_9HYME
agaagagtgaattgtcaaaaatcaatttcggatttggaaagcaccaattttctaaatttcgaactgccaactgcccccatgttatacaacaacatttaagtcctacaatcaaaaagtcgtacaaattttgcttatttttaatttagaagtatggctttgcgttcacaccatatgaggtattttaggttatgttcgaacatcaataactttggttttgtaagattttcttccaccgctggagtctcaaagaaaggattagtcttgggcgttcgtaccagtagtactgatgaagtcatactgactccggcagcaacaaaatataatgaaataactcaaggaaagctcctacaacaattcaaactcgctggaaacgaaatcaaagcaggaaaatgttttgtattttgggggttagatccagaatataatgctgttgctgttacgggacttggtaaagacactgacaaacaagatgacattgaattaatatgccaagaaaacgaaaatgtaaggatagctgcttctgccggatgtcgagcactggagtcggtgggggttaaaaatatcgacgtggaggacttttgtaatgcagaagcagccgctgaaggaagtaatttaggcatttggaaatttcaagaatacaagtcaaaaaaagaaagcttaccacaagtacagctttctcaattaaacggttctggagttgctgaggattggcagaaaggagttataaaagcagaagcacaaaatttggctagaaaattagccgacacgccagcaaatctcttgacgcccaccattttctccgaacaagtccatagtattttaacgcctttgggaatcgatgtgaaaatttacgataaacaatgggctgaacaacagaagatgttctctttccttagtgtagcaaaaggatccgtagagccaccgaaatttttagagatcacctacaacaaaagcgcatcttcttgcgacgcaccataccttctggtcggaaaaggagttacgtttgatgctggaggtataagtttaaaaccagctcaagctatggacgagatgcgagccgatatgggaggagcagctgctgtagttggtgccatttatggtttggcgcggctgaaagttccaacgaatatcaaaattttaattcctttagtcgagaatcttccatctggcaacgctgttaaaccgggcgacgtcatcaccgcaagaaacggaaagacaatatgtgtggataacactgatgcagaaggaagacttattttggcagatgcgctatgttacagctcggaattcaaaccaaaatgggttttagacattgcgactttaactggagccatgagggtagcattaggaaacgcagctaca

SEQ ID NO: 5107 - DNA, 508 bp, Diabrotica virgifera
agaagagtgaattgtcaaaaatcaatttcggatttggaaagcaccaattttctaaatttcgaactgccaactgcccccatgttatacaacaacatttaagtcctacaatcaaaaagtcgtacaaattttgcttatttttaatttagaagtatggctttgcgttcacaccatatgaggtattttaggttatgttcgaacatcaataactttggttttgtaagattttcttccaccgctggagtctcaaagaaaggattagtcttgggcgttcgtaccagtagtactgatgaagtcatactgactccggcagcaacaaaatataatgaaataactcaaggaaagctcctacaacaattcaaactgtcagtcatgatttaatgaccacacagttgtcgcatcacaaaaatggcatcaagtcgtgatggcaggagcagttctgcttcgtctcacagtggttccaatataccgcaaaaccgaccgtctattcgtaccccgaaacgcccacgtc

SEQ ID NO: 5108 - DNA, 1765 bp, Diabrotica virgifera
  SmartBlast Evalue=1E-113; Info="ATP synthase gamma chain isoform 1, putative n=1 Tax=Pediculus humanus corporis RepID= E0VFT5_PEDHC"
ttttttagtatatatacaattataaattttatttccaccatttcttcacatcaactcaatgccacagcgaatatgaaagtaaaaatttttcaattgagaatttgggcttactttctttttacgttcatcttcactgcaccatccagagcagtatttaaaacaaaacattaagcctacacctaaaatctaacttcttgtaacttaaatttttaaccctacagcgtttctcaattatttttaagacaaaaattgcgaaaagagttactgaaatgattctaatgaaactatattgttaccttcaaattttctagataataacttgcattcacctaggaattattatttaatataaatatctaaaaataccgaatttccaccattacttttgaacagttattacagcataatgttacgacaaaaattgtttcgagagaatttgggcttaaatccaatttcttatcttatacctggctgcaaaattatgtcggcgccattttagaatttagaaaaaattaattagtttcaaaaacaggcttctgttcaattaggcagtattttctttaatagtttaacaacttacagtaacagcctgtattactcgtttgtcatccatgtttggctaacccattaaaaaaagtaaaagcaactagagcatttctgatctacctcatgatcttgttttaatttactctccaacccattaaaatttaaagataaatatatagatcaccagttccattaataacccttccggatttaattttaaagagcagaagccccggaaataatttcgataagttctctggtaatgacagcctgtctggtacgattgaatgtcaatgtcagcttgtcaatcatctctccggcgttcttgctggcattgtccatggcagtcatacgggatgattgttcgctgcaagcaccttctttcatggaatagaacagaagagacgctaaggagaattcaaggtagctctggactacttcgtcatctaacgaatcatagactgataattttggcgcggctgtaacagcagccaagctaaacataggcaatgtctgtgtgttgtaagatacaacagatttaaatttgttatacacaatttctcctgtgctgaacttgtaatcagacttcaaaacagcatcagccaatttagaagcatcaatgaaagtggggggcaaacgtccaacttcattacaggcgagcataatgttttttccatagatacgttgcaagattgaacgagatttatctccgacacaaaccactttaatgttttgatcatctttgcccaattctgtacgaatgtaacgagagacactggtgtgaacagcaccacatagacctctgtctgaagttatagcaattactaacttctgaggcacatcagctaagggttgaatttcagctttctcataaaactggctagctccatcaccgatggggcgcacagctttcagttccctttcagccctggcgtatttggctgctgacaccatcttcatggattgtgttattttctggatgttcttgaccgatttcaaacggatggaaattgccttcagggtggccatacccctttgctgttgttgctgtccattctggaccagcaaagggaccacattaccaaaattaccgaatcttaccaacatctcttagccttgccaccttgcaggccgaccccagaaaatcgagtgacttcgtgatttgataaagaatgcgcttgcgttaggatcaactggactttcaaaggaaaatagaccg

SEQ ID NO: 5109 - DNA, 1390 bp, Diabrotica virgifera
accggtcgcgcaacacaatacaaaatgagtaaaattagtagtttttacaaaatttcaaaatttgactgtccggcacaactcaatcatacaactgttatagatggtatagttcaatttaattacaacaatatatttaaaatccaagcatataagataaattctgatattcaagtggaattcggtcgcgcagcttcgtcaaaaacagcagaccaccgagagacgaggcgagagtgacgaatgccagcgaagcgcgcgctgccacaaatgaagatacttgtgggaacacctctacaatggagctttgtcttctccattacaacgaactgccattccaccaccttttccaacacttggatgaaagtgcgacaggcccaataggatattccggaccgattggaaaggccctacctgactgtgaaagactaccacttattgattttaatcctattgattgtgagattccaaaagttgacaagcgtattcttagcaagcaccaataattgtacttgcttgagatatcagaagtcatcaagtcaggacattgttcagaagactttgtagtgggtacgtgatcctagcccaacgtcacattcaagatggcttactactgcaaacagagttttgcgtttctacatcagtgtgtccaacccttctgaaaatctgagagagattgtcacattcattcttaaatgttataatatgcctatgtggtttgccacaaaaataaaccacaaattaatagacgggcctagacatgattacaaaatcattgaatcttcaaggtacttaccagaagagcttcttgttgatcccgttttacaacggaatgcttactttgcccatcccgaaaatttacttttggctatggcaactgatgaaagaaaccatatccgagagctgggctttaggcgtatcatgaaggaaaagcaagcaatatctgaaagtgactctatcagaatctttaaactaccaaacttgaactttgaagctaaatagtattacgaattatcaaatggaacaccagtacactgactcccctctactgctaagaacattgactaatgaagagattaaatagtatgtgagcaatgacttcaagcctgttatgagtatagatactttgccatgccatacacaggcagttgaaagatgcgttaagctagtgaccgaagcttcaagtaaagtgtgtggacacagttccagagacggctatattagaaccacattattgcaccgctcagcgatgccaactttgacattgggtcaggatcacgcactacaaagtcttccgaacaatgtcctaacttgacgactgatatctcaagcaagtacaatcggtccttgctatgaatacgcttttcaactttttgaatctcacaatcgataagac

SEQ ID NO: 5110 - DNA, 446 bp, Diabrotica virgifera
aatctttaaactaccaaacttgaactttgaagctaaatagtattaggaaattatcaaatggaacaccagtacactgactcccctccactgataagaacattaactaatgaagagataaaacagtatgtgagcaatgacttcaagcctgttatgagtatatgtcatatgtagatactttgccatgccatacacaggcagttgaaagatgcgttaagctagtgaccgaagcttcaagtaaagtgtgtggacacagttccagagacggctatattagaaccacattattgcaccgctcagcgatgccaactttgacattgggtcaggatcacgcactacaaagtcttccgaacaatgtcctaacttgacgactgatatctcaagcaagtacaatcggtccttgctatgaatacgcttttcaactttttgaatctcacaatcgataagac

SEQ ID NO: 5111 - DNA, 965 bp, Diabrotica virgifera
  SmartBlast Evalue=1E-58; Info=Casein kinase n=4 Tax=Culicidae RepID=Q17D24_AEDAE
cagccgaaaagatagtcgaaaattaggttataacttctgcctgtgtgggtggtagaatgtctcagattttgtaatatggggttttaaatcaattctaatttaatttgttttgaaaggtaaacgtattcgtacacctgtaatgatttaattacataagttatctttgttggattgtggagtacttacattttcatctaaaacacccaattagtgtactgatttagattttggtgtctaataaaaatattagatttttagaagttagatttttaatcttaagacaagcaatttagtgctttttacatgcattgacataatagtttaagattatcaaaagtgacttaacaaaacgtaaagacaaaaccaatcaaggtattttattttatttttcataaacttgagtgttatacactttttttaacaactcacagcttacaacccttattgactgtgataaaccactatgtgataaggatcaaaataacttttgaatgttttgatttgtgttaaaagtcttcaaccatggacaaaggggaccagaaaaaatcttcatcaaaacattacggtgcaaacgaaaccagctcaaactctacctcgtcggtgctcatggtaggcccgaattttaaagtgggcaagaaaatcggatgtgggaactttggtgatctacgcttaggtaaaaacttgtatactaatgaacatgtggctattaaactggagccgtttaaaaccaaagctccccagcttcatttagagtataggtattacaaactattgggtagccgtgaaggagtgcctgatgtttactactttggcccatgtagtaaatttaatgcgttggtgatggagctgctggggcctagtttggaagacttatttgacatttgtgatcgtaaattcaccctaaaaacagtattgatgacagctattcaactgttacatcgaatagagtatgttcattcgaaggc

SEQ ID NO: 5112 - DNA, 889 bp, Diabrotica virgifera
  SmartBlast Evalue=1E-58; Info=Casein kinase n=4 Tax=Culicidae RepID=Q17D24_AEDAE
cagccgaaaagatagtcgaaaattaggttataacttctgcctgtgtgggtggtagaatgtctcagattttgtaatatggggttttaaatcaattctaatttaatttgttttgaaaggtaaacgtattcgtacacctgtaatgatttaattacataagttatctttgttggattgtggagtacttacattttcatctaaaacacccaattagtgtactgatttagattttggtgtctaataaaaatattagattatcaaaagtgacttaacaaaacgtaaagacaaaaccaatcaaggtattttattttatttttcataaacttgagtgttatacactttttttaacaactcacagcttacaacccttattgactgtgataaaccactatgtgataaggatcaaaataacttttgaatgttttgatttgtgttaaaagtcttcaaccatggacaaaggggaccagaaaaaatcttcatcaaaacattacggtgcaaacgaaaccagctcaaactctacctcgtcggtgctcatggtaggcccgaattttaaagtgggcaagaaaatcggatgtgggaactttggtgatctacgcttaggtaaaaacttgtatactaatgaacatgtggctattaaactggagccgtttaaaaccaaagctccccagcttcatttagagtataggtattacaaactattgggtagccgtgaaggagtgcctgatgtttactactttggcccatgtagtaaatttaatgcgttggtgatggagctgctggggcctagtttggaagacttatttgacatttgtgatcgtaaattcaccctaaaaacagtattgatgacagctattcaactgttacatcgaatagagtatgttcattcgaaggc

SEQ ID NO: 5113 - DNA, 958 bp, Diabrotica virgifera
  SmartBlast Evalue=4E-69; Info=Small heat shock protein n=2 Tax= Pteromalinae RepID=C1K660_9HYME
agaagagttgcgcaagactcgtctgtaccccctcacgaattctatttaaaaccgtcccatccccggttctgcgcgctagtaacattcggtgacagacaagaggcagctactattaacgatacaccgctctctcgttagtgttcatattttacgtgtagtgtaacagaaagtgcagtttttttattcaccatgtctaaccgcaacatccctatcaaaatgggtgacttcagtgttatcgacacggagtttagcagcatcagggaaaggttcgacgccgaaatgaggaaaatggaagaagaaatgaacaaattcagatctgaacttaccagtagggaggcgaacaacttcttcagaagcacaaccaggtcgtacgaatctgaaacggtgactggtggaaataagtcttcatcgacgtccagttcaacgacacagcaaagcagcacaggatcagatttagcccacagagcaccaagtggtgatgtcagaacatggtacgacgacctcaactctcccctaatccaacaggacggtaacgaaaagagcctaaaattaagattcgacgttagtcagtatgctccagaagaaattgtagtcaaaactgttgataataaactcttggttcacgccaagcacgaagagaaaacagaatcaaaatccgtatacagagaatacaatagggaattcttgctgcctaaaggaacaaatcccgaacacatcaagagctcattaagtaaagatggcgtcctcactgtcgaagcacctctcccagctatcacctcaggggaaaaattaattccaatccaacattaagtaatttaaaattccttgtaagccttcgaagcgtttatgtccgctagtaaatactcatcgattaattatttaaaatgtaacaactcatgtgactaacaaaatttttattttatttcatttttaaaacctggcaacgttgtctggcttg

SEQ ID NO: 5114 - DNA, 904 bp, Diabrotica virgifera
  SmartBlast Evalue=5E-69; Info=Small heat shock protein n=2 Tax= Pteromalinae RepID=C1K660_9HYME
agaagagttgcgcaagactcgtctgtaccccctcacgaattctatttaaaaccgtcccatccccggttctgcgcgctagtaacattcggtgacagacaagaggcagctactattaacgatacaccgctctctcgttagtgttcatattttacgtgtagtgtaacagaaagtgcagtttttttattcaccatgtctaaccgcaacatccctatcaaaatgggtgacttcagtgttatcgacacggagtttagcagcatcagggaaaggttcgacgccgaaatgaggaaaatggaagaagaaatgaacaaattcagatctgaacttaccagtagggaggcgaacaacttcttcagaagcacaaccagttcaacgacacagcaaagcagcacaggatcagatttagcccacagagcaccaagtggtgatgtcagaacatggtacgacgacctcaactctcccctaatccaacaggacggtaacgaaaagagcctaaaattaagattcgacgttagtcagtatgctccagaagaaattgtagtcaaaactgttgataataaactcttggttcacgccaagcacgaagagaaaacagaatcaaaatccgtatacagagaatacaatagggaattcttgctgcctaaaggaacaaatcccgaacacatcaagagctcattaagtaaagatggcgtcctcactgtcgaagcacctctcccagctatcacctcaggggaaaaattaattccaatccaacattaagtaatttaaaattccttgtaagccttcgaagcgtttatgtccgctagtaaatactcatcgattaattatttaaaatgtaacaactcatgtgactaacaaaatttttattttatttcatttttaaaacctggcaacgttgtctggcttg

SEQ ID NO: 5115 - DNA, 1221 bp, Diabrotica virgifera
ttagtatgattgaataggtatttttgaatgcctttcagacgaggtatcacttgccatggggtcccatttaaaattatcggtcgcagtggctctgtaacgtcatctgtcactattgcgtcatctgtcatgactagttggaaagcttacgtcggtttatttcctcccttcaaattcggaagtcgtgacgtaactggagaccggcaagttcgtaatggttcgtaatcattcgtaatgtccgattactttgaattgttcgcggttgtaagctaagtgtattttatattttatttttgacagttgttatttttacaggaatctcgacattaaatctttttcgaatacattgaggttaaatgttatgttgctaattgaataatttaatcacagaatgcatacaaatcccatttaactataacaataattcaaattcaacttccggtctctcagttacgtcatcatgcgcgaactcggacgtatttgagaagatattcttgttctcatgatcatttttcagtgcgtcacagtttttcgatttctctctaatgcattaagttagatgagacggaaaaagcggtagctccgtgattaaacacaaaaataatgcagcattacaatggttatatacataagatgtctattcctaacctacgtttgattcgttgatatttagaatgcgcgttttttctagccaatcaaatactcgtattacgaacatttgacgaaaacttcgtccattttggccattttttagaagtgtcaaagagtcaagtgacggttattattcaggtcagtattttgtgtacctgtcattttgaaattcgaattcgacttcccttgtgtttcacaacgtttttgtgcattattttgtgttttggtttagaatttagttcgttaaaagttagtcattggcgtgaggagactagagacattcgagatgtaccgaagagtgctaaaaatctcatgagtagatagaatagccaacgtggaggtaatgagacttacgcataaggaacgagaactaacaaataagaagaaaactgagatatatgggacatgtgatgagagatgtatatctaatactccaggtcattatgcaagaaaaagatccatagtaaggagacgtaactcatggctgaagaaccttaggaactggtttggatgtaataacaatgaattatttagagccgctgtttcagaaataaagatctctctgatgattgc

SEQ ID NO: 5116 - DNA, 624 bp, Diabrotica virgifera
tgcagcattataatggttatacatatacataagatgtctattcctaacctacgtttgattcgttgatatttagaatgcgcgttttttctagccaatcaaatacacgtattacgaacatttgacaaaactttgtccattttggccattttttagaagtgtcaaagagtcaagtgacggttattattcaggtcagtattttgtgtacctgtcattttgaaatttcgaattcgacttcccttgtgtttcacaacgtctttgtgcattattttgtgttttggtttagaatttagttcgttaaaagttagtcattggcgtgaggagactagagacattcgatttgtaccgaagagtgctaaatatctcatgagtagatagaatagccaacgtggaggtaatgagacttacgcataaggaacgagaactaacaaataagaagaaaactgagatatatgggacatgtgatgagagatgtatatctaatactccaggtcattatgcaagaaaaagatccatagtaaggagacgtaactcatggctgaagaaccttaggaactggtttggatgtaataacaatgaattatttagagccgctgtttcagaaataaagatctctctgatgattgc

SEQ ID NO: 5117 - DNA, 990 bp, Diabrotica virgifera
  SmartBlast Evalue=2E-18; Info=Reverse transcriptase family member n=1 Tax=Glycine max RepID=Q1AKH8_SOYBN
aaaaaactgttttcaaaacattgacgaaaagtaggtctcggtagagagtatgtggatgctatcgcaaatatatacaaaaatgcaagaagtgtcgttaaagaaggaaactttatatctgactcattccctatatcaaagggacttaaacaaggatgttgtctgtctccgactttatttaaaatatatattcaatcatcgctagagcagtggaggaaacaagtatccggaatgggaatagacataggcggtggtaaatgtctaacaactttgtttttgcagatgatcaggtagtcgtagcgaatgatgaggaagacatggactacatgtttagaaaactaaagaaagaatatgaaaaatgggcctcaatatgaatatgtcaaagacagagtatcttaaaataggggatgatgaagaagatccagagttagaaattagaaccacaaaaacatgtaaatgaatataaatatctcggatctataatatctaaagaaggcactaccaaaagagacatcgaaaacaaatcgcagcagggcaaaaaagcgggaaacattctaaactttctactatggtctaaagatataagacaaaaaaccaaattgacaatctatcgtaccttggtagagcctattatggcttatggggcagaaatttggcagatcacgaagaaagattaaaaagaatagaagtagtagaaatggattatctaaggagagcgtgtgctatatccaaaaaagatcacatcaggaatgaagatattagaagaaggacaaatactgtatattccaatgtagacagaattgaaacgagactagtgtggtatggtcacgtgaaacgaattaacgaagatacataaccaaagaaagctttaaattacataccacaaaaaagaaggagaaggccttcagttgcctgggaagaaaatgtacggcacatcatgagagatagagcagagccatcaaagacgaatggatggacagaaaaagatggcgg

SEQ ID NO: 5118 - DNA, 856 bp, Diabrotica virgifera
  misc_feature (764)..(764): n is a, c, g, or t
  SmartBlast Evalue=4E-17; Info=Endonuclease-reverse transcriptase n=1 Tax=Bombyx mori RepID=D7F179_BOMMO
aaaaaactgttttcaaaacattgacgaaaagtaggtctcggtagagagtatgtggatgctatcgcaaatatatacaaaaatgcaagaagtgtcgttaaagaaggaaactttatatctgactcattccctatatcaaagggacttaaacaaggatgttgtctgtctccgactttatttaaaatatatattcaatcatcgctagagcagtggaggaaacaagtatccggaatgggaatagacataggcggtggtaaatgtctaacaactttgtttttgcagatgatcaggtagtcgtagcgaatgatgaggaagacatggactacatgtttagaaaactaaagaaagaatatgaaaaatgggcctcaatatgaatatgtcaaagacagagtatcttaaaataggggatgatgaagaagatccagagttagaaattagaaccacaaaaacatgtaaatgaatataaatatctcggatctataatatctaaagaaggcactaccaaaagagacatcgaaaacaaatcgcagcagggcaaaaaagcgggaaacattctaaactttctactatggtctaaagatataagacaaaaaaccaaattgacaatctatcgtaccttggtagagcctattatggcttatggggcagaaatttggcagatcacgaagaaagattaaaaagaatagaagtagtagaaatggattatctaaggagagcgtgtggtatatccaaaaaagatcacatcaggaatgaagatattagaaggnggacaagaactgtatattccagagtagatagaactgaaacgagacaactagtgtggtatggtcacgtcaaacgaatgaatgaagatacatgg

SEQ ID NO: 5119 - DNA, 1091 bp, Diabrotica virgifera
cgttacacccttagcttagctcagtcactcaggtgtgtgttcgtcttgtcctaacctcagatatgaactatgaaaattggaatggaagcaaacaaaacatagtttttaactaatcatgtttattgttcataaagatataataaataaaatgacttagtaaattgcattaacaaatgtatttaaattcttgccaaaaactaacaattctggattatacttatggcttttggtagctgaaggtatcttcttgatgtcgtatggtattgctgctggttctgcaacgggctctggggttgtaggtgttgtattccaccaggcctacggatgttggtcgttgcagtcttggttatgtggttgcagccctgatgacatggtcctcgttgttgtatcgccggcgatttgagggttgttgaaactcccggagggagaaaagtggtttctttccaaaaaactataaaatagagacacatatcaatcatcaagaagaaaaaccaacgtgtgccatctgccgttctaatcgtcagaaagagtagcagatgacaataataaatcaaatgaaatttagatgagaatagttaaaattctgattactaaacgtgcatacatgtaaattaaaagataattatatttgaaactaaaatatcagaacacatggtctgacattggaagttaggttagataaaaaaacaattagaaaaactgttagacggagaaatataatcacaatataatgttatccttaccccaagagatgatttgatgaaatagaaatgatttatttttcgaattacatgcctttttaaggattaatttttcccttccagtgtatgtcagggagtagggggtcaagtcgatgaagtgacactgtcattgaaaacgacatttaaaatgacaaccaagtactatgaagtagcggcatgttccgtattgaaaatacagatatttggagagtatgaatatacgaggtatgttcagtatgatgatttaaatgaaagagatatattaaatagaagataataaaagaggtaataaaagagagcgccaaccgatttttaaaggggaaaatgggtaaaccaattagaagaagataa

SEQ ID NO: 5120 - DNA, 745 bp, Diabrotica virgifera
cgttacacccttagcttagctcagtcactcaggtgtgtgttcgtcttgtcctaacctcagatatgaactatgaaaattggaatggaagcaaacaaaacatagtttttaactaatcatgtttattgttcataaagatataataaataaaatgacttagtaaattgcattaacaaatgtatttaaattcttgccaaaaactaacaattctggattatacttatggcttttggtagctgaaggtatcttcttgatgtcgtatggtattgctgctggttctgcaacgggctctggggttgtaggtgttgtattccaccaggcctacggatgttggtcgttgcagtcttggttatgtggttgcagccctgatgacatggtcctcgttgttgtatcgccggcgatttgagggttgttgaaactcccggagggagaaaagtggtttctttccaaaaaactatttaaacaaatcaaagttatgactgtcacctgaagaagaatcgagtaaagttctaaacattgatgctatgatataccatgatcattttaaaaatcgacctgtccgagcgttttgcttatgcgctaaaaataaataagttcatataaataaataacacttattccagcgcactgtataagtacaatgaaattggcacattttcaattaatcaattttgaagtattaatagataaatatattatgtatctacatagtactaagggaacattcataaactgcaaaaaggcccaa

SEQ ID NO: 5121 - DNA, 924 bp, Diabrotica virgifera
  SmartBlast Evalue=5E-56; Info=Putative glutathione S- transferase GST2 n=2 Tax=Leptinotarsa decemlineata RepID=A0FKH1_ LEPDE
tagtgatttcgtggcgttcaaaccactttactttcatcaaccttgatcagtcgtattctccagttttaacaaaatcgagaaaatggcccccaaattgtactgctcagaggtcagccctgccgtcagatccactcttttaacgatcaaggctcttggtttggatgttgagttggttcctgtgaatttggctacgggagaacacctcacacctgattacttgaaactaaaccctttgcatacagtgcctacactgcaggacggagatttcgttgtatgggatagtcacgctattaatatttatctgatcgaaaagtatcacccagaaaccgacctctatccaaagtgcaatcaggcaagagctaccatccaccaaagattgttcttcgatgctggtatcctttttgccaggatggctgatatcgtcaaaagcgtcgttagagaaggtgcgaaaatggtcagcaaagacagggcagacaaagtcatcgaaggttacagtttcttggaagcactcttagaaatgaataaatacgtcgctggagatcacgtcaccatcgctgacttcagtctagtaaccactactgcttcctgcaatgttgtggtgccaatagcctcgaacagataccccaagatctctgaatggttggctaatatggaacagctgccatactacaaagaagcagtccaggctggactagacatgttcaccggaatgatgaaaagtaaactagcctaatttaaagataaattcgctagttacgatcaaaataatcacaacgttggcagagatgttgtttagccgacatgacaaatattttataataatcattatatctacaaatgcatgtcatatttatgtgctccatctttatttatttctttgttatgtgcaaacctaaataaatatatattttaatggtcaaaaaa

SEQ ID NO: 5122 - DNA, 922 bp, Diabrotica virgifera
  SmartBlast Evalue=8E-54; Info=Putative glutathione S- transferase GST2 n=2 Tax=Leptinotarsa decemlineata RepID=A0FKH1_ LEPDE
gtgatttcgtggtgttcgaaccaattcactttcatcaagcttgatcagttgcactgtaacagttttaacaaaatcaagaaatggcccccaaattgtacatcgcagaagtctgccctgccgtcagatccactcttttattgatcaaagctctgggtttgaatgttgagttggttcctctgaatatggcaaaagatgaacacctcacacctgaattcttgaaaatcaaccctttgcatacagtacctacactgcaagatggagatttcgttgtatgggatagtcacgctattaatatttatctgatcgaaaagtatcacccagaaaccgacctctatccaaagtgcaatcaggcaagagctaccatccaccaaagattgttcttcgatgctggtatcctttttgccaggatggctgatatcgtcaaaagcgtcgttagagaaggtgcgaaaatggtcagcaaagacagggcagacaaagtcatcgaaggttacagtttcttggaagcactcttagaaatgaataaatacgtcgctggagatcacgtcaccatcgctgacttcagtctagtaaccactactgcttcctgcaatgttgtggtgccaatagcctcgaacagataccccaagatctctgaatggttggctaatatggaacagctgccatactacaaagaagcagtccaggctggactagacatgttcaccggaatgatgaaaagtaaactagcctaatttaaagataaattcgctagttacgatcaaaataatcacaacgttggcagagatgttgtttagccgacatgacaaatattttataataatcattatatctacaaatgcatgtcatatttatgtgctccatctttatttatttctttgttatgtgcaaacctaaataaatatatattttaatggtcaaaaaa

SEQ ID NO: 5123 - DNA, 1177 bp, Diabrotica virgifera
ccccattcatagacaattatttccataattctatatttttattcaccttcacattggccttctttcctatacataccacgacaaacccaaaataaacaaaaaacccaaacattatacctaatcaaatattcttttagtacttccagtttctttcactctgtgctcctgtcaagactctatctcttccatctcattctttaattattttcacttaacaaaatcattttctcattatatcaaaatcacaccatggaacccttgatcttttcggatatgacattctaatatagacaataaccaaaaattttgttgaatttccaacattttaattgattcactctatttttcatttagattaaaattaaaaaataaatctcagctatcaacatttaataaatttacttaatatcaactttggtcaatacaatattcaatctagaatttcaatagttcaatatgtgacatattctttttacatttagagcttacaatcaaaattaattttcttctttgatcaaaacatgtacatttctttcagcgcagttttcctaatttaatatcagtctttatccatttaacaattcacacaatttaatttcaaaacagtaattatatttcatttatttgtccactgaacataggcaacttaccttatcaccttttttaataatttttctaaatttagattttcaatagttctatatgggacaaactctttacattcagtcataacaaaatatttttagagaagatttcttgattaagatatgtacatacattttttcaattccacttccctcttttaatatcatttcctttaatacctccaataattcacattacagatctatagattggtattttctcattatattcgttggttccctgaaacatatgcaaccgaccattccctattggcatttcttccaattctacagctgctactctattaaaatatcatattttgataaaaaattttaaaaattttctatataattttcaataatattcattcattataactttgctcaaattaatataattattatcagtcctatacagtagacaaacagtctatgacgtcacagcatatgagtagaattttgcttttgtttacggtgcactaatgaatatatcattatagcttattaacctttatttacaatttagaattcat

SEQ ID NO: 5124 - DNA, 665 bp, Diabrotica virgifera
ccccattcatagacaattatttccataattctatatttttattcaccttcacattggccttctttcctatacataccacgacaaacccaaaataaacaaaaaacccaaacattatacctaatcaaatattcttttagtacttccagtttctttcactctgtgctcctgtcaagactctatctcttccatctcattctttaattattttcacttaacaaaatcattttctcattatatcaaaatcacaccatggaacccttgatcttttcggatatgacattctaatatagacaataaccaaaaattttgttgaatttccaacattttaattgattcactctatttttcatttagattaaaattaaaaaataaatctcagctatcaacatttaataaatttacttaatatcaactttggtcaatacaatattcaatctagaatttcaatagttcaatatgtgacatacttttctacattcagagcttacaatcaaaagaatttttttcattttttggttaaaacatgtacatttctttcagcacaatttttcctaatttaatatcagtcttaatacatttaatacttcacagaatttatatttttttaatagtatttctattttatttattatccctctgaacatatacaactgaccttattatcc

SEQ ID NO: 5125 - DNA, 1313 bp, Diabrotica virgifera
cctatcttcagaaataaaaaaagtatctagcttaaaaattaagtgacttagaatgaaaagaatgtcagtcccatttttttttcagcgaaaaagtgatcggaagcaacctcctaatcaccaccctaattaaaattagtcattgaccttatttggtcttcctatttatgtattattaataggatctagaagtttgagcggcttataatgattagttttaaaaaaatggagttaaaagcgaataacgaatttttgtagtttggaaaaatgacgttttcttcagaatagaaagattagcatcagagatacgaaaaaatgtttaaatatgaaattgtagcttgtttaattttcaagaacttggtttgcaaaatttttttctacggtaaaaattaagtgatgtgttgacaattaaaacttgtaataacatgcaaaaaccacctttactaaccctttcaaagtcacctctttttgctactcagtattttaaaaagatttaataatagtaggcttatagatcttgtaaaatcatcttcttcttcaggtgccatctccgctacggaggttggcaatcatcatagctattttaatttttgaggcagtagctctaaatagttgttttgagctgcatccaaaccattctctgaggttcttcaaccatgaaattcgtcttcttccgatgcttcttctgccatctatctttccctgcattatgagtcgtaggatgccatacttaaataaagagtacagtaataagaggagtaaaatcatacaaaattcttttttaccaaactttccaagataaaaaataaaaaagttacggttaaaaaatcgatatatttttttgaaaaaataaggggaaatccaattggaagcataatattgtaagttagcggcgtttttagtcattggcctcagtcattcttctttatttatgcactgataatagattctagaagtttgactggcttagactgactagttttaaaaaactggagctaaatccgaataacgaatttttgtagtttggtaaaaaatgccattttcttcagaatataaagattagcatcagagatacaagaaaatgtttaaatatgaaattgtaggttatttaattctccggaacttggtataaaaaaaatttttctacagcaaaaattgagtgaatcgtaaatgagtattatcgaaatacattgattttttcgatataaaactgcactttcgatagcgaatggatcgaaaactgttgattttatcaagataatgtatggaacgttttttgcttagaatgaatgtttttatcaaattttgcggtggaa

SEQ ID NO: 5126 - DNA, 510 bp, Diabrotica virgifera
cctatcttcagaaataaaaaaagtatctagcttaaaaattaagtgacttagaatgaaaagaatgtcagtcccatttttttttcagcgaaaaagtgatcggaagcaacctcctaatcaccaccctaattaaaattagtcattgaccttatttggtcttcctatttatgtattattaataggatctagaagtttgagcggcttataatgattagttttaaaaaaatggagttaaaagcgaataacgaatttttgtagtttggaaaaatgacgttttcttcagaatagaaagattagcatcagagatacgaaaaaatgtttaaatatgaaattgtagcttgtttaattttcaagaacttggtttgcaaaaatttttactacagcaaaaatttagtgagctatggataattaaaacttgtaataacatgcaaaatcaccttaaccaaccctttcaaagtcacgtctttttgcgactgagaattttaaaaagaattaatattaataggcttatag

SEQ ID NO: 5127 - DNA, 1364 bp, Diabrotica virgifera
  SmartBlast Evalue=8E-68; Info=Death-associated small cytoplasmic leucine-rich protein n=2 Tax=Bombycoidea RepID= B9VTR9_BOMMO
gttgggttctaaaccgctccaaagcaaaagtgataccaaaagtgcattattccgctcgttggtgatcagtttgtgacgaaaagatgcgccctcctacacaatatccccaagaaattgcccaagaggccgagaccgagagtgaacccgaccccaggatgggggcgatgatgatctgcaccaggctggctggaagggctgtcatcagggtcatcggaaggtgcaacgatgctaaagaaaatgaaaatcttgatttatccgattgccagttaatgcaagttcctgatgcagtgtaccacctgatgaggcacaccgagctcaaaacctgtgatctcagtgacaacgtcattacaaaaatacctccaaagtttgccgccaaattcaaccaaatcacagagctcaacttatctcacaatcaagtgtcgaagttgcctgatgaatgcgtaagcctaggtgcgcttgagagactggatatatcgcacaacaccttcatagaattgcccgattgtattttcaaaattcccaaattacggcatcttaatgccagcaataatagtatagttgatttagatgtagattgtttaaaagatgcaccatcgttagaatcagtagacctaacaaataacccattggcaccgagaatatatgaacaattatctagattatcagatctccgaatactgctcactcccagagagaaagaagattgggaagatctcaccatttaatatttacgtaatatattttgtggcaaatgctatagactgaagacagctaattgataggttcagttatagcggactacttcctaaattgtgttccctcagagacgtatctcgattgtagctgtagatcagagtatgtagtcgaattatgactaataatgtaatgcaacatataaataatatgttacaaaatatacaaaggtataatctcccttttttgtagtctttaatctcaattacttgcagtgaatacttatttctttggtaattaataaaaagtatttcaaaaggtacatcaaaagtctcagcgcccagtatttttttatattataaaaatgtctagtgattgtaaactcttttggttttttagatgttgcattaaaaattgctgaggtgtacatatgccgagtgcaaagtacagattgtcatgatgatcgccaacatccgaaacggataggccctacaagaagaaaaacattttaacataatatggcacgccaattgaacaagtgtattcttaccaatacatttctgggccactatttatactaaatttgcaatcaagatgcagtagaggtggacaggccaagacgcgttgaatgctactattagcagcccccgaatcatagtttacaatgtata

SEQ ID NO: 5128 - DNA, 461 bp, Diabrotica virgifera
  SmartBlast Evalue=6E-11; Info=Death-associated small cytoplasmic leucine-rich protein n=2 Tax=Bombycoidea RepID= B9VTR9_BOMMO
gttgggttctaaaccgctccaaagcaaaagtgataccaaaagtgcattattccgctcgttggtgatcagtttgtgacgaaaagatgcgccctcctacacaatatccccaagaaattgcccaagaggccgagaccgagagtgaacccgaccccaggatgggggcgatgatgatctgcaccaggctggctggaagggctgtcatcagggtcatcggaaggtgcaacgatgctaaagaaaatgaaaatcttggtgagtgatcataaggattctttgtgaacgagttgtgcttattgtgacatgtgttatgaaattgtgataccttctggattattttggatgctaatcaggtgatacatgggtgttaaacattaaaaaatatatattatccttatttaaaactatcttacatattatcccaaatcttcaatacttcaattgacaaattatagatataaatttgc

SEQ ID NO: 5129 - DNA, 1369 bp, Diabrotica virgifera
tgagagtggcgttggtttcatgcaccccattactatcctgcacgtctcatttagcgtagtataaacttgtttggtgtggcagatgtgccccaaacggggcacgcttattcagcagttgaaaaacacaatgcctgtgccgttgttcttaagacgccaggagatgcaccccatttactttccgttagctttccgagtatgctgttccgagttgctactttccctctcgtttttatgaaatgttgtttgtaggagagggattggtccaagctacagtcgaacccgctattggaatagccctcgtgcctagcaaaaatatttttataagcgggatattctaataaccggccatgggtggcaagttgaaataagtgtaccgaataaacgttatatagtacatactatgtcaatttgtatatgcatatggttttaggcctttttatatcaataaaaatttataatctatttacaaaaataattacgaaacgattagaaaataaattggaattgggttttagaaaagacttccgaacaaacgatcaactattggtaatcaataatcttgtagaaaaatgctgtttctaaaaacagtcaagtggatgacaatatgtacctacagaaatttgtagacaaatgaaattattttctgaccttgtcggcgaacgattgaattttctgcgggaatagatcgttgctcataacacagtaataaagtgtttattaggtacctgacaaaccgtaataatatacaaaacagcagactttcgaagctcttaccgacaaaccattataccaggcaaattttaaatttttaagaaattgtacgtaaaaatttattctattaatagatttgaaatcagacttgaaattattctattaagcggtattattttaccaaaccatattccaataaacggagaaatttattaaaggaaacgtttcgggacctcgaatttatattctataaaccgggatattcctataaccggtactgtaataagcgggttcgactgtatatgctgttctcatatattacaatccaacaagcgagacgtggaggctgaacttctcgtattgtgtattttcgctcaaggtcagccgccagctatcgtttgtccgattgtaccattccacgcaatttggagttttcgcttggcttcctttgcgcgcgaaggtggaaggcgcaggcttaattattagagggattggatctcagagaattctgcaggtagtacgctgtcattgttttaaggcagtttcgagtttctcctccacttcttcaaaactatttccttgagcacacattgcgagatcgtcagcatagaggaagtgcttgctttcagtcggcgtaagttggtcgtttgtatatatg

SEQ ID NO: 5130 - DNA, 465 bp, Diabrotica virgifera
tgagagtggcgttggtttcatgcaccccattactatcctgcacgtctcatttagcgtagtataaacttgtttggtgtggcagatgtgccccaaacggggcacgcttattcagcagttgaaaaacacaatgcctgtgccgttgttcttaagacgccaggagatgcaccccattttcttcccgttaacttcctgagtatgctgttcctaggtgttactttccctctcgtttttatgcaatgttgtctgtaagtgagggaccggtccaaccagaccggtgagttactcccaagatatatagctttgtctgtgtgttctaacgtattacaattccaagaaatttggagttttcgcttggcttgctttaataagatagtacgaatagcacgagataagtcgccaaatggacgaagaagtattggcagaccaagaaaaagatggtgcgatcatttaaacaatttaggaggc

SEQ ID NO: 5131 - DNA, 1322 bp, Diabrotica virgifera
cagtaactgataaacgctttaataaaataatttaaaattattataatcatacgatatttaaaaattaacaatatacatacatataaatcaaaggattgaattatattaaatgaccatgatgtattttttaccttacagtgccttacggtataactgttacaataatagattattttgagttcctatcccatttttttgtggttcgtgtaatagttattattaataaataaatatacatttatgtatgcagagtgagttctatgtatggaaacactcaattatctcgaaaacggcttggacgatttttatattctttggtaggtaggggccctccaatgcggccaataccatagtgcaaatcacattgttgtcatattctccgtcctccggaaatccaatgaactcccatttcaaatggaacacaccgtatacctcctgcgttccgaagtcctcaagaaatactgattcttttatgattatttatttgtttaaaaaaattaacaaattataaaaatcaatttttggcccgggtaaacaccacttctaggttgtttggatcattgcgaacaaaaaagatcttttgtaatatttctcttaaattaatcgtttccgagttataaacaatttaaaactgaaaaaatcgaataatgacaattttcaaggttcaagaacacaagtaaaaaatatgatttttaaaattttaaagtacctaaattcaagcccaactcttcttctaattcttgccaaaatattttttgcctccttttattgtataacattgctttttaatttttaatgaagtgcatatgagaggacgggcgatcgggctgcattaacacctaaaaaacaatgttttacaattaaacaatctcaaattacttaccggtaactgataaaataagctttgagcttgaattggggtacttcgcagtttcaaaaataacattgttgacttgtgttcttgaaccttgaaattttagagaaaaattacggaagatctttcttgttcccaatgatccaaacaacccaaaacagtgcttacccgggccaaaaaagaaaatgatttttataatttgtttaaattttttttaaataaatgtagcaataacttcgaacttatggcatttaggtatagggaatataacatcaaaaataatcggtatttcttaaggacttcaaaacgcaaaaaatacacagggcgctccatctgaaataagaaagttcatcagatctccagaaaaacggaaaatatgacaacaatgtgattagcactataatatcgaccgcattagaaaatccccacctatcaaaatctataaaaa

SEQ ID NO: 5132 - DNA, 491 bp, Diabrotica virgifera
cagtaactgataaacgctttaataaaataatttaaaattattataatcatacgatatttaaaaattaacaatatacatacatataaatcaaaggattgaattatattaaatgaccatgatgtattttttaccttacagtgccttacggtataactgttacaataatagattattttgagttcctatcccatttttttgtggttcgtgtaatagttattattaataaataaatatacatttatgtatgcagagtgagttctatgtatggaaacactcaattatctcgaaaacggcttggacgatttttatattctttggtaggtaggggccctccaatgcggccaatattatagtgcaaatcacattgttgtcatattctccgtccctccggaaatccaatgaaccctcttatttcaaatggaacacactgtataccttccgcgttccgaagtccttaagaaataccgattcttttatgattatttatttgt

SEQ ID NO: 5133 - DNA, 204 bp, Diabrotica virgifera
tggtgttcttgtggaatgactggctttaataaataaaatattaatcgcatctcacaattttaataaaacagaatcatgtgttaccatggaaagattagataaggtttgaacatgtgaagaactgcgttgtataaatgtagtattactcaattaatttataaagactttatttatttcttcatttgcgcaaattaaaatatggga

SEQ ID NO: 5134 - DNA, 925 bp, Diabrotica virgifera
  SmartBlast Evalue=2E-45; Info=ATP-binding cassette sub-family D member 1 n=1 Tax=Culex quinquefasciatus RepID=B0X1Z0_CULQU
gagcattgaagggtaatcaatcggtatcggctacactctgctggtttggaacgtcacgtcgtgactcagtgttgtgaactaattctggagtcaagttgtggttttcaagtaaaataaaagaataattcgtggttgtggttgttcattgttttatcaacttgtagtggccatgtctgttgttttaagatctgaaaccatggaacaaggaacctaaggcttaaacaaaccaccaacgcaatttgaccaaatagctttagtaatttaaaatactcaccaagatcaaaccagaccaaacaacatgccaacagtaatctccaagttcctggaacagggtgaaagcaccttcaagcagaacaaatccgtcttctccggagcattcatcgcagccgttctttgcacctacgcctacaaagtaggctaccccttcgtggactccttgatacacaaaccaaaggacaatctcaacaacaaccacatagttcaaaaagacttgcaacgtaagaatggcctagtgaagaacaagaaactcaaaggaaggcttaaaaatagtataccgaacttcaatttagcctttatcttacaatttattaagttagttaggataatgatacccagtttcatttgtactgaaacggttttactcagcgggcatacgacgtttttgtttttgaggacgtttttgagcatttatgtcgctaatttagaaggtgctatagttaagtatattgtgatgaaagacccccagaacttcgttaagcagctaggaaaatggtttgccgtagcgattccagctacgtttattaacagcatgataagatatcttgaaagtcggatagccttgagtttccgcacaagactggtagaccactcgtacaaactatacttcaagaaccagagttactacagggtgactgtgctagacggc

SEQ ID NO: 5135 - DNA, 889 bp, Diabrotica virgifera
  SmartBlast Evalue=2E-45; Info=ATP-binding cassette sub-family D member 1 n=1 Tax=Culex quinquefasciatus RepID=B0X1Z0_CULQU
ataatggagatgagaattagttaagaatgtgctcaagtgtcggggttttgtcgaactaatacaacaagtggtctttttgtgtgattgtgctctttttttggattaaaaacggatctactggggttttccctaaatgaagaagccactccgatctgaaaccatggaacaaggaacctaaggcttaaacaaaccaccaacgcaatttgaccaaatagctttagtaatttaaaatactcaccaagatcaaaccagaccaaacaacatgccaacagtaatctccaagttcctggaacagggtgaaagcaccttcaagcagaacaaatccgtcttctccggagcattcatcgcagccgttctttgcacctacgcctacaaagtaggctaccccttcgtggactccttgatacacaaaccaaaggacaatctcaacaacaaccacatagttcaaaaagacttgcaacgtaagaatggcctagtgaagaacaagaaactcaaaggaaggcttaaaaatagtataccgaacttcaatttagcctttatcttacaatttattaagttagttaggataatgatacccagtttcatttgtactgaaacggttttactcagcgggcatacgacgtttttgtttttgaggacgtttttgagcatttatgtcgctaatttagaaggtgctatagttaagtatattgtgatgaaagacccccagaacttcgttaagcagctaggaaaatggtttgccgtagcgattccagctacgtttattaacagcatgataagatatcttgaaagtcggatagccttgagtttccgcacaagactggtagaccactcgtacaaactatacttcaagaaccagagttactacagggtgactgtgctagacggc

SEQ ID NO: 5136 - DNA, 1001 bp, Diabrotica virgifera
actctttctaaggttattccatacactctggtgttcattggttgtaactccgttttgatgacaaccatcatgatccaatttagtgaatattaatatgaatttgacaaaaactaagacatatcgcacacctagttcaattgtgccacaactgcaaaaattcgaattttgggttaaggctgtaaaatattgcctatataatggcccatctaatgcaatacagcctgaactaaaataattgttttcttcttcttcttcttcaggtgccatctccgctacggaggttggcaatcatcacagctattttaatttttgaggcagtagctctaaatagttgtttcgagctgcatccaaaccactctctcaggttcttcaaccatgaaattcgtcttcttccgatgcttcttctgccatctatctttctttctatcaatattgttttggataagtataaagtaagttacttcggtatttcactgtagggtttttggaggttttgaaaatgcaatatggccataactggtagatgtggcgataatatacactgccacaatacaaccgatgtaattcaatacgttcaatacggccacaactgcaaaaatcaagagagatgtggcgataatttacactgccacaatacaaccgatataattcaatacggccagaactgcaaaaatcaattgattttttcattatattgcgccgtatctcctaggtatcgttttataaatgacttttttcacaatgcaatatcgccataactatcaaaataataattacgtttattttaataaattgtaataagatccagccaataagtgtataatttgccacctaaattgtaattttgaagcgagtcattctcaaaataaattatttacagggcataacgcgtttactacagaacgttttgctcatttctcgagaatattgtgttttgcacttgtggcactattgaactaggtgtgcgatatgttgtataatttgtgtataatattaatata

SEQ ID NO: 5137 - DNA, 803 bp, Diabrotica virgifera
actctttctaaggttattccatacactctggtgttcattggttgtaactccgttttgatgacaaccatcatgatccaatttagtgaatattaatatgaatttgacaaaaactaagacatatcgcacacctagttcaattgtgccacaactgcaaaaattcgaattttgggttaaggctgtaaaatattgcctatataatggcccatctaatgcaatacagcctgaactaaaatattgttttggataagtataaagtaagttacttcggtatttcactgtagggtttttggaggttttgaaaatgcaatatggccataactggtagatgtggcgataatatacactgccacaatacaaccgatgtaattcaatacgttcaatacggccacaactgcaaaaatcaagagagatgtggcgataatttacactgccacaatacaaccgatataattcaatacggccagaactgcaaaaatcaattgattttttcattatattgcgccgtatctcctaggtatcgttttataaatgacttttttcacaatgcaatatcgccataactatcaaaataataattacgtttattttaataaattgtaataagatccagccaataagtgtataatttgccacctaaattgtaattttgaagcgagtcattctcaaaataaattatttacagggcataacgcgtttactacagaacgttttgctcatttctcgagaatattgtgttttgcacttgtggcactattgaactaggtgtgcgatatgttgtataatttgtgtataatattaatata

SEQ ID NO: 5138 - DNA, 1214 bp, Diabrotica virgifera
  SmartBlast Evalue=2E-29; Info=Hamartin n=1 Tax=Camponotus floridanus RepID=E2AKG1_9HYME
tcaaattgtggtaaattgtcacgtaagaaaccttcctttttcaaatacagtactattcctttgtttcagatatcccaatcccgagattaactgtccgccatcatttttcgaggccttgactttttcgccctctataatattaatgcacgtgcgtaaggggacctttggcggcaatggccgccgaaggatgttttatgtagaatgaaaaatttatttgaagttatctaaataatccccaaagaaaagttaatttttagttataattcgtgaaagtgaagtagtttagtgttgtctgttatagttattgtagtaaaattatggcaatttatctttattaaggaagaattattttcgagcatggttgctaatgtgtttgttcttagttaaatggaataatggatatttgaagaaaagttatatatattattatttgtaaggataaaaacgtaggttgtgcatattgtttcgagcaagactcgcataacctacatacatgtactgggtaaatgatagcgtattgcataatcgaaacccataaaaaaggaagaagaagaacaaatgccagaacctttactttttctaaaaattcacatttaagactcctctgcaagcacccgcagtttaataaaatgagacctgtttattagcccatttaaaattcatgtctttttcctcacctttttatacaacatgactgaactttttgaaaacctagaatctaataacagaaccgccgtcgaagatgccaaggaaaaacttcgagaactcttcttaaaagttaatgaaccatggctcttaaatggattgtacgaatattatttaagcaccagttcgcctcgagctatggaaattttggtcaatatcaaggaaccccaccatatatatttgtttgataggatatcagattcgatcaaaggtccaaaagtagagatcaaagtccaggctctgacactttttggatatgtagctcgtagacaaccgacttggctatacaaactacaagaacatattctccttagggatatactaaaattactcagaaatgaagtggaacttttgccattaataagcgcccttctcgttttaatagtgttgttgccaatgattccctcgtccatggggaattgcttaagagatatttttgacattttcagtcgtctagcatcttggaattgcaacccaggaaaattgtcgaagaccaattgatacatatg

SEQ ID NO: 5139 - DNA, 602 bp, Diabrotica virgifera
tcaaattgtggtaaattgtcacgtaagaaaccttcctttttcaaatacagtactattcctttgtttcagatatcccaatcccgagattaactgtccgccatcatttttcgaggccttgactttttcgccctctataatattaatgcacgtgcgtaaggggacctttggcggcaatggccgccgaaggatgttttatgtagaatgaaaaatttatttgaagttatctaaataatccccaaagaaaagttaatttttagttataattcgtgaaagtgaagtagtttagtgttgtctgttatagttattgtagtaaaattatggcaatttatctttattaaggaagaattattttcgagcatggttgctaatgtgtttgttcttagttaaatggaataatggatatttgaagaaaagttatatatattattatttgtaaggataaaaacgtaggttgtgcattgcttcgagcaagactcgcataacctacatgaaatgtgctggcagatgcagttgcatgcaagccaaaaaaacgaagaagaagaagaagaagaagcacgtgcataaatggaaaaagatatactttttatactctccaagagcta

SEQ ID NO: 5140 - DNA, 1036 bp, Diabrotica virgifera
ctacttaacctctaaaaatagattaataaataaataaaaatacatacgaattagctgaatttagccgagatgtcaattttgggacccaaaaaataatgcaaaaaagttagttgttcctacccagagcttccccctaaaacccacgctcatcgcagatagcaatataaacttgtttcaaacttgcaacaagtttgacacatcaaacatgaaagcttgctgtaagtttgccatggcaactttgcaaacttgctagttggagtgtgacaaacttgcatgaagtttgtttattcaaacttgatacaaacttgctgaaggtttgtttttgttttgttgcatgaagtttgttttcacaaacttgatacaaactgaaaaaaaaaatttgttttgacatactagccacaatttgaataaaaaatacaataccattttatataactatttattcagtaatcactcaactaaaatacaatctattgtctaaaattatttattggaacttacattaaacccgctagcttcagattccgatgctcagtttttgtctatcagctctgaaacaaataaaagaaattgttataaactcttgctgtgtgaacagaattaatctgtgctattaaaaaaaagagataaaaagatgttaaagtaacaattttacaataaaacctaaaacttatttacatataatattattataaatataatttaaataaggctagaagctacgaaaaacataaaaaacttacctcaatttcaccaaagcaaagagaataccaatatatacctaatcaccacaaacaggtgggtctatgaaaaactgaagaaaagaaggttctgcttagttctcagcttgtaattaaagtaatagtctcggagaattgtacggtaaatgttgtaaaaaattcaaagaaaaatatcaatcaacataggataggactgtccactgtcctattaggacataaccacaaattatcaccgcttgggctgggctggcaggttacttttcccgtgttatcagctgtcgagtaagctttttccc

SEQ ID NO: 5141 - DNA, 755 bp, Diabrotica virgifera
tgatatagtaaacttgctgaaggtttgtttttgttttgttgcatgagtttgttttttcaaacttgatacaaacttgcttaatgtttgttttgacatactagccacagtttgaataaaacaatgtgaataaaaaatacaataccattttatataactatttattcagtaatcactcaactaaaatacaatctattgtctaaaattatttattggaacttacattaaacccgctagcttcagattccgatgctcagtttttgtctatcagctctgaaacaaataaaagaaattgttataaactcttgctgtgtgaacagaattaatctgtgctattaaaaaaaagagataaaaagatgttaaagtaacaattttacaataaaacctaaaacttatttacatataatattattataaatataatttaaataaggctagaagctacgaaaaacataaaaaacttacctcaatttcaccaaagcaaagagaataccaatatatacctaatcaccacaaacaggtgggtctatgaaaaactgaagaaaagaaggttctgcttagttctcagcttgtaattaaagtaatagtctcggagaattgtacggtaaatgttgtaaaaaattcaaagaaaaatatcaatcaacataggataggactgtccactgtcctattaggacataaccacaaattatcaccgcttgggctgggctggcaggttacttttcccgtgttatcagctgtcgagtaagctttttccc

SEQ ID NO: 5142 - DNA, 917 bp, Diabrotica virgifera
ttttttaattcttattagtatttgaatcatgtttgaatttcgcggcattttatcttacgttcgaatagaactgtcacaactttgaccttgtggaagccaaggagccaaaaattataatttctagacgcgagtttgattaaaatgggccagtcttctgcgtttggaatacgaatgtcgtgccttttgtacaacttaggcatttctaaaaatcatttaaagcgaatattttcaataaaatacaaaactattgacttactttaaattttttagtctttgtagaggaagactcaaccgaattattattgcaattttttgatttctgcatgagtctgacaaatgtagagcaaagaatcaatacatattttaaaccgaggtcagttatgaactgaacacgactgaatatattgcatcctgaataaaaaccctgtcacctctactatgtttaatgtggcccccgcgctactgttgaatctgcttggatatacaaatgatttatatccgccaatattcagtttctgtcctttgttataccaaggattcggatccaccactatattttaccttatctctttcgttacagctgaatcaaattgattgtgtgttgatgaaccgttgtctgaaccgatgatgcatcgctactatcccctccgttattgttgaatctggcactgcaactacagtaacataaaaccttcagttaatgtagaattcggtcgcgtttatgctgaatcttatcctgaatttattgtcaaatcagacctgtgaatatgttgcatctgcccctgttgttattgttgaatctactgaatcgattttccacggaatagcgcctcagttgctgatgaatggggcccgcgattaggacgaatatggcatctagtaagtgataaattcagttctggaatatattggatctg

SEQ ID NO: 5143 - DNA, 889 bp, Diabrotica virgifera
ttttttaattcttattagtatttgaatcatgtttgaatttcgcggcattttatcttacgttcgaatagaactgtcacaactttgaccttgtggaagccaaggagccaaaaattttataatttctagacgcgagttttaatcaataggtttgttctaacacgcaatggttgtaaggtccagaaatcgtcacgaaactgcttgtcttgtacctgtttatgcgcatgttcctcattattccacatgtgcgcatgttccacagtccaaccagtacttgcatttatccgattactggaatgatcgtcaagaactgtcactaggcgattacaatttttgttagaataatcggaaggacgatgcgatgaacgatcatttctttgttaaaacgtattttgtttactgcgcaggagcgtgattgttacatggcggttttttattgtgttggaaacaaacctaatgtttgtagtgggctaaaatctgacattgtccaaacttctgatctttcccagactagttatgcaaagctgaattagttttaacttagtcgtaaaagtggaagagttaacggtgctgcaaattaacaataaattgcttttacaagtataagtgaagagttatcgatttagtacataattaggataagagtttttctttgtagttatcacttcttgtaacaccaaatagagagtttgcacatttttgttttattacataataatgttaagtttcgtttaaaaataagatttccaaaatttcacgccttaaaatctcataataacttaaagtacaaatttaaaatcctttatgtatttaaatcatttcaaacgatcaaaaacaattgtaacgtcacgttattgtattttcattaggagacataaataaattgaccggc

SEQ ID NO: 5144 - DNA, 924 bp, Diabrotica virgifera
  SmartBlast Evalue=2E-43; Info=Pol-like protein n=1 Tax= Biomphalaria glabrata RepID=A3FMR3_BIOGL
acttgtgtatactccttgtaattgcggagtatatcattgaaggcggatttgattaactgtgggtttactgagggttctttatttgccacggaggaattgaggacagtttggaaggaaagcattctgggaacgcatagtttatttgatttaagtagcttctaattcttgcgtagaagggtttggccgttcttggtttatttatgaagagatttgggaacttttctgtaaaacaattttgtatagtagggttttttgagttacacctgatttttgcggcgtatgctacacttaaataaactcttctgtcttctaaggagggttctccaacttcacaatacagactttcgattggtgttgtgcgaaaagctccagatattatacgtaaagcgagattgtgaagactgtcaagttttttcagcagcgtcttagccgctgtagaatacacagtagacccataatctaattttgatctgattaatgttctgtataacattaaaagtgtttggcgatccgcaccccattctttattggccagagtttttagaagatttagtcgcttgtgacaagataacatcagatttgttatatgaagtttccagcttagggtttcttcgaatgtcatgcccaagaacttaattgacgttgcacgctttaggttttcatcacatagtcttaggttggggatatttgtgacgtttctctttgaaaacaggatgaagcgagtttttttcagcggaaaaacagaaacctgttttttgtgaccagatttctaagtcttgtataaagttctgtgtatgacgaaatatattttgtatatttttacctttgcagaaaactacaagatcatctgcgtagactcgtgcctttacaggcgattttaggtttttgaggatatcattgattgccactatgaagagagtagga

SEQ ID NO: 5145 - DNA, 882 bp, Diabrotica virgifera
  SmartBlast Evalue=5E-34; Info=Pol-like protein n=1 Tax= Biomphalaria glabrata RepID=A3FMR3_BIOGL
acttgtgtatactccttgtaattgcggagtatatcattgaaggcggatttgattaactgtgggtttactgagggttctttatttgccacggaggaattgaggacagtttggaaggaaagcattctgggaacgcatagtttatttgatttaagtagcttctaattcttgcgtagaagggtttggccgttcttggtttatttatgaagagatttgggaacttttctgtaaaacaattttgtatagtagggttttttgagttacacctgatttttgcggcgtatgctacacttaaataaactcttctgtcttctaaggagggttctccaacttcacaatacagactttcgattggtgttgtgcgaaaagctccagatattatacgtaaagcgagattgtgaagactgtcaagttttttcagcagcgtcttagccgctgtagaatacacagtagacccataatctaattttgatctgattaatgttctgtataacattaaaagtgtttggcgatccgcaccccattctttattggccagagtttttagaagatttagtcgcttgtgacaggatgcgatcaaatttgttatatggagtttccaacttagagtttcttcgaatgtcctgcccaagaactttattttatctctcaactggaaatttgtgcaaaattctaactgaagaaaaattttagaccccttaattatcgaaataccctcgtaacactgatttctgtagttctcagagacagcaacggcgaaacatagatggagctgcaagtagcgatcatgtttaaaataatatgtgtgaacgcccccaaataagaattaaaaacaacggtctaaattgaaataaaccccgattactcttcagaatttttaaacaa

SEQ ID NO: 5146 - DNA, 952 bp, Diabrotica virgifera
  SmartBlast Evalue=2E-77; Info="N-terminal acetyltransferase complex Ard1 subunit, putative n=31 Tax=Arthropoda RepID=E0VIS6_ PEDHC"
aatattaaatatgtatattatattcgctataaatacaaaaattacaaataattacactattcttcgtttttagtctcagacttaggtttaactttcttagcgaattcagataagtctcgtctcatggaatatgcatcttcaccatctgcataatattttggctcaatttcgacagtttcaaatttcaaagagtttttgtatagatttaaagcggcgcgattgcttttacgaacatgcagcgaaacatattttgcgtcaaaacattcgaccatggcttcggaagcttgatccatcagtttctgggctagccctaatcgcctgtgggaccgcttcactgccagggaggttatgtgaccatgcttgagatcttcttggtcttcttccatttttgctaggacataaccaactatgttacctttttcgtcttcagctacataacttagttggggccaactaaggccatgataaaagtaatatttcatctgatagttttctggtagacataacagattgcagtgctgcatgttcataagatcttctggttttgcacatcgaatattcattttgagaagataaatcagtcctttcttgtcctcttgagtttactcctagtgtttttcaattccgtaattgtagagtcacttgctcccttcaacagttctttaataaaacggaatctacttagaatgagcttccagacaataaaccatccaaataaaacaaacagtataacaagaataaaacttgcgacaaccgagagagcagccaaagcaatatctttcattatgtttaaacacttaaaaatctaattcttaactattacaaaaaggcagtgatgtttatcagttccaacatttcgccattttgttcctaactaaacatttaggtcaaaggccgtcacaagtgcatattttttttggaatcaagttatatacctaaatatgattagata

SEQ ID NO: 5147 - DNA, 852 bp, Diabrotica virgifera
  SmartBlast Evalue=2E-77; Info="N-terminal acetyltransferase complex Ard1 subunit, putative n=31 Tax=Arthropoda RepID=E0VIS6_ PEDHC"
aatattaaatatgtatattatattcgctataaatacaaaaattacaaataattacactattcttcgtttttagtctcagacttaggtttaactttcttagcgaattcagataagtctcgtctcatggaatatgcatcttcaccatctgcataatattttggctcaatttcgacagtttcaaatttcaaagagtttttgtatagatttaaagcggcgcgattgcttttacgaacatgcagcgaaacatattttgcgtcaaaacattcgaccatggcttcggaagcttgatccatcagtttctgggctagccctaatcgcctgtgggaccgcttcactgccagggaggttatgtgaccatgcttgagatcttcttggtcttcttccatttttgctaggacataaccaactatgttacctttttcgtcttcagctacataacttagttggggccaactaaggccatgataaaagtaatatttcatctgatagttttctggtagacataacagattgcagtgctgcatgttcataagatcttctggttttgcacatcgaatattcattttgagaagataaatcagtcctttcttgtcctcttgagtttactcctagtgtttttcaattccgtaattgtagagtcacttgctcccttcaacagttctttaataaaacggaatctacttagaatgagcttccagacaataaaccatccaaatatgattagatatttaaactcaatgcattaatgggtcttggaattaggcaattaagtaatttgctacaccacaattttccaaaatacttttaaaaccatgagttaaatttttgacagatgacattgatgtttcagca

SEQ ID NO: 5148 - DNA, 1054 bp, Diabrotica virgifera
aaaacagtcaggtttgtgatcgttaaagtgatattttaaaagtaattaacgtgaatgaaatataaaacaacaaataccattttgtattagactgccttcaggcttgttcatagatcaagcaagcaagcatagtgatttaacccagcctgagagacttgctcacccctagagaatgacattcgggtgatacaattcattggggcgaggaggattaactcccgtaagcaggaatcactccaccccgcttcaatgctccagaccatccacttaccccccgatagcactctgatgcgctataggggctctcaatcagcaaagtgcttatcatatgggagtcttgggtacacggactcccatatgaaatcctaccccgatcaatgcaggccagcgtgaggcgctctattcccgctatctctagtgacttatcttcgatctgttttgcttgctcgggcgccgagtccccgctctgggctatgtccagttcggtgactcggcgctcgaggatgtgggcccctcatgcccgtttgttgggttttgttcctaatattttttttgtggctttcgcctattgttaatattttattgatttgtttagtggctgaagccgttttaagtttttttgtatattttttttgagggatgtctgaaaattataaaaatcaacattaataaatataatgagatgccaaaggtgagcaagttgtcttcttttgatagagctacgattatctagcctttattatatatttactaatatttgttgtttgggtctcctatgtttccatctatggtacacatcataccttaatatctcttgcaagatccggtttgggtggtcttctagctcagcaaattttgttctggctttttcctccataatatccagtactcttatttgttttaggtctctaaataagaaccgttcggcgacgtatctgggcacgtttgcagcttctctgaggcagttgttgtgtgccgcttgtatcttctttttgttactttgactcgtgtgaccccatgcaagagatgcgtatgtaattattggcagtataat

SEQ ID NO: 5149 - DNA, 743 bp, Diabrotica virgifera
aaaacagtcaggtttgtgatcgttaaagtgatattttaaaagtaattaacgtgaatgaaatataaaacaacaaataccattttgtattagactgccttcaggcttgttcatagatcaagcaagcaagcatagtgatttaacccagcctgagagacttgctcacccctagagaatgacattcgggtgatacaattcattggggcgaggaggattaactcccgtaagcaggaatcactccaccccgcttcaatgctccagaccatccacttaccccccgatagcactctgatgcgctataggggctctcaatcagcaaagtgcttatcatatgggagtcttgggtacacggactcccatatgaaatcctaccccgatcaatgcaggccagcgtgaggcgctctattcccgctatctctagtgacttatcttcgatctgttttgcttgctcgggcgccgagtccccgctctgggctatgtccagttcggtgactcggcgctcgaggatgtgggcccctcatgcccgtttgttgggttttgttaaatgttcttaaggggaaaggagcaaaatgcaaacttttgacgcctgtcaaaatttttgatgtgttttaaatgtattcatttttttcgaatcctgagaaaactaacaaatacctttagaaaaatttaaaaagtttattttgaatgagatatttgaaattaaaaatcacactaaattttctcttagtttttcacccctgtagttc

SEQ ID NO: 5150 - DNA, 900 bp, Diabrotica virgifera
  SmartBlast Evalue=5E-62; Info="Alcohol dehydrogenase, putative n=1 Tax=Pediculus humanus corporis RepID=E0VGI8_PEDHC"
tttattttgtgaaaatgcaatagtgagttaaaaaatgtaaatgtattgtctccctatatatttatcatcttccaaaattcgaattaagctgtctctcctaccacttgaatcgtcaattctgtaatgttaacatgaggaggtgtagataacacataatagaccgaatcagctatatctttcgcactcagagcagctactttttcaatctcctcaggattctcaattggcatacccatctcttttgaaacattcatcatcatctcggttacaattgcccctgggctaatactcgttactttaatgttggttttttgatttgattgctccaaccgtagagtttcagtaagtgcactaacagcatgtttggttgcggcatatacattaagctttggaaaattcatcaccttatgacctgcaatactgttgatgttaataatatgccctgcgatgttattttccttcatttgctttatggcttctctatttgcaatgcaaactgaaattacgtttatatcaaattcttgttttaaatgtggcgttgtaatcgaactcaaatcctctagaagtaaaacagccgcattatttatcagaacactgacaggtcctacattttctttggtccaggaaaacgcttttacaatgtcttcttctttggagacatcgccggtataaggaaaaaattttcccttctttgaagataacttctgagctagttcatctaaaactttggtacgtcttgcaacaccgacaaccttcaaacctgcctcaaccaatttttctgatatagcggcccctacaccagcacttgcccctgtaactagggctacttttcccaaccatctatccatttcctgttacttttaacaacggcaagcaagtaatgtttgtattaagtaattg

SEQ ID NO: 5151 - DNA, 902 bp, Diabrotica virgifera
  SmartBlast Evalue=2E-61; Info="Alcohol dehydrogenase, putative n=1 Tax=Pediculus humanus corporis RepID=E0VGI8_PEDHC"
tttattttgtgaaaatgcaatagtgagttaaaaaatgtaaatgtattgtctccctatatatttatcatcttccaaaattcgaattaagctgtctctcctaccacttgaatcgtcaattctgtaatgttaacatgaggaggtgtagataacacataatagaccgaatcagctatatctttcgcactcagagcagctactttttcaatctcctcaggattctcaattggcatacccatctcttttgaaacattcatcatcatctcggttacaattgcccctgggctaatactcgttactttaatgttggttttttgatttgattgctccaaccgtagagtttcagtaagtgcactaacagcatgtttggttgcggcatatacattaagctttggaaaattcatcaccttatgacctgcaatactgttgatgttaataatatgccctgcgatgttattttccttcatttgctttatggcttctctatttgcaatgcaaactgaaattacgtttatatcaaattcttgttttaaatgttgagttgtaatcgaactcaaatcctctagaagtaaaacagctgcattatttatcaaaacactggcgggtcctacattttctttggtccaagaaaacgcttttataatgtcgtcttctttggagacatcgccagtataaggaaaaaattttcccttctttgaagataacttctgagctagttcatctaaaactttggtacgtcttgcaacaccgacaaccttcaaacctgcctcaaccaatttttctgatatagcggcccctacaccagcacttgcccctgtaactagggctacttttcccaaccatctatccatttcctgttacttttaacaatggcaagcaagtaatgtttgtattgagtaattgat

SEQ ID NO: 5152 - DNA, 899 bp, Diabrotica virgifera
ggaatctcgactgaattccgctgttgcgttagccatcattttgattttaaaagggaaccgttttttgctcaatatctccgccattttcgacttctctacaaaaaggtgtgacaactggaattgttgaggatgtgatttcctataatttctttcattacaattttttcgtgcggtcgatattttctgagacatggcggaaaatagtgacagttagagcatagttattgaattgtttcgttattattaattttacgacaaaactgtacctatacaaaaagggcagctcggcatgcaaggtcaaatgctatcccgactatagtgtaggaaacggaggttggacctggcaaaattgacataagtccggttttatttttttctggtatatcaagggtacttattatgagactaactttttttttaatttcgccccggaacccccctttttatccctttaaaaggagtaatttgtggtttttgcgaaacgtagcccttcctgtgcgttttgcaaaaaatttattcaatagtaaaatgaagaggactatatttcctactatttatttcccgacagtctatgtctatcacccaccgtttagcgggggtgacgccccaaagttgacaaatttttaaaaaagatgtttttaaaaaaacttattttttcctaactataatcaaaattaagaagaaactcggcggcaattgcaaatttttttaattacaggatgctacatttttaaaaaaccccgttttataccatctgaaccgcctatgctagagttaaaaaactttcagcgattatccatgtactagtgttatttacaaatttgtgtaatgaacctcctacactactaggatgaaaaatatattgtctcacattgtcttacaattgtgtggtacattgt

SEQ ID NO: 5153 - DNA, 890 bp, Diabrotica virgifera
ggaatctcgactgaattccgctgttgcgttagccatcattttgattttaaaagggaaccgttttttgctcaatatctccgccattttcgacttctctacaaaaaggtgtgacaactggaattgttgaggatgtgatttcctataatttctttcattacaattttttcgtgcggtcgatattttctgagacatggcggaaaatagtgacagttagagcatagttattgaattgtttcgttattattaattttacgacaaaactgtacctatacaaaaagggcagctcggcatgcaaggtcaaatgctatcccgactatagtgtaggaaacggaggttggacctggcaaaattgacataagtccggttttatttttttctggtatatcaagggtacttattatgagactaactttttttttaatttcgccccggaacccccctttttatccctttaaaaggagtaatttgtggtttttgcgaaacgtagcccttcctgtgcgttttgcaaaaaatttattcaatagtaaaatgaagaggactatatttcctactatttatttcccgacagtctatgtctatcacccaccgtttagcgggggtgacgccccaaagttgacaaatttttaaaaaagatgttttcaaaaaatattgtttttccccaactgtaatgaaaattaataagaaaccctgcggcaatcaatcacaaataagtggttgattccttggtataggtttcgttcaagggcaattgcaaattttccaattatagggtgttacattttaaaaaaccccttttctaccatctgaaccgcctatgctagagtaaaaaaactttcagcgattatccatgtactagtgttatccacaaatttgcacaatgcacctccata

SEQ ID NO: 5154 - DNA, 1062 bp, Diabrotica virgifera
ccccaattattggtaatggaagattcataacttcgatcatcgccttcgtgagtttttattagctcttcatgtacgatcaattcttcaaatgtgtagccactacgttctgaaaaatgatgtcctttgacaacaagctctagataatgcattctatctttttcaaatttatctttgtcgataggaaaaggcttgagacgtccaaatttttgttctataccttcagcgactttctgtaaggcattttgccaattccgtttgtactgcttggtattgtaaggggcaaggagacgccagctggttggaaaatgttttgcaaatactgagaaatatgattatagctggacaaatgaattaagatagttcgtgggtcacctcttttgtcgcacaacaggcacaaatagagcggttctttactgggatcatcatcctgtagttcgaagagatattctagagctactagcggtcccactttaaatccatcaatgcgttcctgaatttgtgctactctagcagcttcatcaaaaccgggaggcaaaggttctcctggtgctacctccacgatttcccgttcttcaacaacggaaggtttttgttcatcttcagtgctaccagaattgaaatccaaattttgcatgtgtcttcgacccgtctcatgttgaaaaatacgtcccatgacaggacactcgcatatgttacaataccacttttcgacgccaccggatattgataattcaaagacatttccatatttattgttctttaagaatgcctttaagccgagtacacgctgctgctcgttttccttctttgttagtgtcgaaaacatgatcggaggatcatcttcagtacctggagcacagggttccatttttaaagcactacactgacgaggacttccaaaacgttgaaatatctcaaaaaaggaatttctttcttaaatatattcacattcacaccaccacaatattatacataattcagtttatgtataaaatttcaaatccacaaatttatgaatattagcacaatactgagccagatttattcaaaccgaacaactgg

SEQ ID NO: 5155 - DNA, 713 bp, Diabrotica virgifera
ccccaattattggtaatggaagattcataacttcgatcatcgccttcgtgagtttttattagctcttcatgtacgatcaattcttcaaatgtgtagccactacgttctgaaaaatgatgtcctttgacaacaagctctagataatgcattctatctttttcaaatttatctttgtcgataggaaaaggcttgagacgtccaaatttttgttctataccttcagcgactttctgtaaggcattttgccaattccgtttgtactgcttggtattgtaaggggcaaggagacgccagctggttggaaaatgttttgcaaatactgagaaatatgattatagctggacaaatgaattaagatagttcgtgggtcacctcttttgtcgcacaacaggcacaaatagagcggttctttactgggatcatcatcctgtagttcgaagagatattctagagctactagcggtcccactttaaatccatcaatgcgttcctgaatttgtgctactctagcagcttcatcaaaaccgggaggcaaaggttctcctggtgctacctccacgatttcccgttcttcaacaacggaaggtttttgttcatcttcagcggaattagaattttgcaaaaaagccatattatgcatgtgtcttcgaccaatctcatgtggaaaaaacacgtcccatgacgggacactcgcatatattacaataccaatg

SEQ ID NO: 5156 - DNA, 1055 bp, Diabrotica virgifera
ccgaaccaacggaaagtgaaaatttttttaaaaattcaaaataaaaatttaaaaacatgtttattatatgtacagagaaccagaaaatttaacaatgtaaaattaataggaatttggacatgtgaaatttattaaaaataaatacacctagtacatacttataaaaaactaaacacaatcaataaaggaatgtgcataatacacattttccatggtatactatgaacgaaaacattgaaaaagataagaaacatgagaaacatagtgtaatcaatatccagattacaaattaaatgaatcatttacatggccgaattcccatgtcccgtgacgaaacaaaactactggcgttagcgatttaatatttcagtgatctaaatatttttcagctttagaatattggaggcataaacgtgcggatagagtttcataaagggatcggtggcagtccaaatcttttaaaaatcatcttcgttagcttcttaggctaactttcggataatccgaacaggctgtccccccaattagttcggatttgcggggttctactgtagttactttgtaaagtatataatcaatagcctactaattcatttctttcaaattttcaaatcacgaggcgcaatccaacattttgaaaatttgacacggacatgtttgattgatttgttactctgttaccatttattttaatttactatttatatttttttttacttgtgcttacaacaatatttcgcatttgttatagtcatgtccatttttgtggaagcattttggtgtgtgtactgctcaaatgtggtaatatctgctgtatattaccagagatgtggtatacccattaaaaattgacagttgacataataaaaactattcagggttggcaaaatcgggtggaaaaacattaagttttaaattttctgtggtaattaaactaactggaacattgaaatcaaaatattactgttatactttattaggagagtgggagagaaaaaagtgctattagaagcttctacgttacaaactatactttttccaataagcgatgcagg

SEQ ID NO: 5157 - DNA, 735 bp, Diabrotica virgifera
ccgaaccaacggaaagtgaaaatttttttaaaaattcaaaataaaaatttaaaaacatgtttattatatgtacagagaaccagaaaatttaacaatgtaaaattaataggaatttggacatgtgaaatttattaaaaataaatacacctagtacatacttataaaaaactaaacacaatcaataaaggaatgtgcataatacacattttccatggtatactatgaacgaaaacattgaaaaagataagaaacatgagaaacatagtgtaatcaatatccagattacaaattaaatgaatcatttacatggccgaattcccatgtcccgtgacgaaacaaaactactggcgttagcgatttaatatttcagtgatctaaatatttttcagctttagaatattggaggcataaacgtgcggatagagtttcataaagggatcggtggcagtccaaatcttttaaaaatcatcttcgttagcttcttaggctaactttcggataatccgaacttttcggaatccgaacaggctgtccccccaattagttcggatttgcggggttctactgtagttaaatcaataaaattatttgataacagtaacaaaaaaccatttaaaataaattaatctgatttatagtaaaatatttgacaaaaagtcaactttttttcaaaatttgagcaccatttaacaaattcctggaagataagtagaagaacctgtacagctgcactta

SEQ ID NO: 5158 - DNA, 903 bp, Diabrotica virgifera
  SmartBlast Evalue=1E-18; Info=Peritrophic matrix protein 14 n=2 Tax=Tribolium castaneum RepID=D1MAJ8_TRICA
aacactactatttcagataattaccgaacaaaaatcagtattatgaaagttaccggtactttggtgatacttagcgtttattttgtgttaagtatagtcgactctgcaacagcgagacaagtgcctagaagacagttgctttcagagaataaaagtgacattgaggaggactgtaagaatggactacaaaattattacaattacccttacgactgccagaaatattacacttgtagagaaggaaaattataccttagtacatgccaagacgatttatactggaatagtgaacttcgcagctgtgacattcaagcaaatgtgaattgctcaaagataattccccttccacatccagtgtgcacggattctagaacaacgttctatatttacccttacaactgcaaaaaattttatgagtgttacgaaaatgtgttgtacattcttgaatgtcccgatgacttactctggaataatgatgctaaggtgtgcgatgatagctataacgttgattgttcatacatcatacctgagaatgctgaaacggacgagccaacttcagccccaacttctacttctcctgtaactactgagcgtccaacaactacaaccgttcctccaccaccgactaaaccaccagttcaatgtgagcattcagggcaatacattcctgacccttacaattgtagcatgtattacgaatgttcaaatggagtaccagtttcgatgagttgtccaggtggagaatattggaacccagatgaagaaacttgtgattggcctttcaatgttgattgcactgaggcacctctccccgcataaaatgccgaatacccgcagaatttaaattaaaaaatttgtaatttaaaaatttattaaatgtaattttatttacttaaacaataa

SEQ ID NO: 5159 - DNA, 882 bp, Diabrotica virgifera
  SmartBlast Evalue=2E-20; Info=Peritrophic matrix protein 14 n=2 Tax=Tribolium castaneum RepID=D1MAJ8_TRICA
aacactactatttcagataattaccgaacaaaaatcagtattatgaaagttaccggtactttggtgatacttagcgtttattttgtgttaagtatagtcgactctgcaacagcgagacaagtgcctagaagacagttgctttcagagaataaaagtgacattgaggaggactgtaagaatggactacaaaattattacaattacccttacgactgccagaaatattacacttgtagagaaggaaaattataccttagtacatgccaagacgatttatactggaatagtgaacttcgcagctgtgacattcaagcaaatgtgaattgctcaaagataattccccttccacatccagtgtgcacggattctagaacaacgttctatatttacccttacaactgcaaaaaattttatgagtgttacgaaaatgtgttgtacattcttgaatgtcccgatgacttactctggaataatgatgctaaggtgtgcgatgatagctataacgttgattgttcatacatcatacctgagaatgctgccccaacttctacttctcctgtaactactgagcgtccaacaactacaaccgttcctccaccaccgactaaaccaccagttcaatgtgagcattcagggcaatacattcctgacccttacaattgtagcatgtattacgaatgttcaaatggagtaccagtttcgatgagttgtccaggtggagaatattggaacccagatgaagaaacttgtgattggcctttcaatgttgattgcactgaggcacctctccccgcataaaatgccgaatacccgcagaatttaaattaaaaaatttgtaatttaaaaatttattaaatgtaattttatttacttaaacaataa

SEQ ID NO: 5160 - DNA, 1140 bp, Diabrotica virgifera
  SmartBlast Evalue=7E-19; Info=K1310_HUMAN Isoform 4 of Q9P2N6 - Homo sapiens (Human) n=1 Tax=Gallus gallus RepID=UPI0000ECBE2A
cgtgttggattgatcaggttgtttggaaggtgaaaagtgctgagatggtttgtcggtgtgacaactgtcattagatgaagtgtcgggagttgttggataaagtagaggagatgttggactggatgaagtaggatttgccgatgcattaccttgagcacacatttgtgcccattttgtttccagcttgtttttagtcttggatccgggtggtctacctactggtctggttatcctaataggcgttggagaagaaggttcgctgtccaaagagcttgtattagagttgaagcgtttgcgttctgcattacctttttttacaggaatctctgaaggaatatggacggaaggtggtctgacttgaggggatagggggaaaggattaagccgctaacaaattctccaatctcgtccacaacacatctattgacaatactctgagtaatcccttcttgacgcttctttttcttagttattcttagataatcatcagcacaaccaactactaggaggcccgtttcaacgcgcatatgttctctcaaattttcaagatcttcttgattggaagtattagacagctgtccaattacaaacaatacagggcactgaagctctaaaattgcatcatctggttcacccctaaaacccttttgggaaatacgcagagctcaacgtacagtaccgcaaaatgatacatgagtttgggacttaataaccataatatacaaatatgttatataaataggtaaacaaatccgaacgactcctaaataggttgctggcgcatccccggaaatgagcactaggatagtgcaaaaatcatgcctcctgtaggtccaagtgctaatacgaaaaggagctggaatgcccccaaaaggcttgttccccaagtaactactcccagtgacttatggttggagattggcctcttggtgtttcgaggtgttatttaagatttcacatggatggcgtgtgatacgatgatgttatgctgtaaaccccattggattaataccttctttattcccaaacactcctagataggtttggtgatccataattcaaaagtcacacatttttactaacacgaggtctaacctccaaatttgatcctcacacgccatccatactaaccaaatcccc

SEQ ID NO: 5161 - DNA, 630 bp, Diabrotica virgifera
gcgacgaattaactgaacaaatgaaataaagcgaataaataacatatttggggaaacaagcaaataatacaacctaaatttacataatgacacgaaatctacctaaataaacaataaaataatagaggtagtaccttttgggaaatacgcagagctcaacgtacagtaccgcaaaatgatacatgagtttgggacttaataaccataatatacaaatatgttatataaataggtaaacaaatccgaacgactcctaaataggttgctggcgcatccccggaaatgagcactaggatagtgcaaaaatcatgcctcctgtaggtccaagtgctaatacgaaaaggagctggaatgcccccaaaaggcttgttccccaagtaactactcccagtgacttatggttggagattggcctcttggtgtttcgaggtgttatttaagatttcacatggatggcgtgtgatacgatgatgttatgctgtaaaccccattggattaataccttctttattcccaaacactcctagataggtttggtgatccataattcaaaagtcacacatttttactaacacgaggtctaacctccaaatttgatcctcacacgccatccatactaaccaaatcccc

SEQ ID NO: 5162 - DNA, 940 bp, Diabrotica virgifera
  SmartBlast Evalue=2E-25; Info=Endonuclease-reverse transcriptase n=1 Tax=Bombyx mori RepID=D5LB38_BOMMO
tacgtatacagtgtactatactatggagtggaatcatggacgttaaatgtacagacaatgagacgacttaacgcctttgaaatgtggacctatagaagaattatgagggtttcctgggtagatagagttacgaacaatgaagtactgagaagaataggtaaagagaaggaagttgaacttacaattaaagaaagaaaactacagtactcggacatgtgatgcggggcgagaagtatggcatcctgcgactcataatgcagggaaagatagatggcagaagaagcatcggaagaagacgaatttcatggctgaagaacctgagagaatggtttggatgcagctcaaaacaactatttagagctactgcctcaaaaattaaaatagctatgatgattgccaacctccgtagcggagatggcacctgaagaagaagaatcatccttcatgttcatccagttttttcgtgaatactttcctgtttttgatgtcaactttattttttgtctcagtacactgctatttcttgtttttcttgacatcttttgtctataaatacctagtaacttgcgtattcgcgcttgtaaccttcttcaatctgtcttattttcctaccaaaatattgtgatgtgttgatacatctgcacttggatgttttgactgctaatactgagtttcagtatcttttgtttagccatatgaagtatatttggttacgaaccactcgttcaggtgtatgtataccatggatggtagaccgcacgtcatttattagaatgtagacgctccgtttaaaaatatataacatgatttaatgcagcaatgtcacaattcaaaaagagtcattgttgcaccactaaaaggtttttggataagatctcgagaccaactgaaaggatgtcaatacatattgcacgcagtaatagacacggcacacgacctg

SEQ ID NO: 5163 - DNA, 826 bp, Diabrotica virgifera
ctgggtagatagagttacgaacaatgaagtactgagaagaataggtaaagagaaggaagttgattagaattaaagaaagaaagctacagcatctcagacatgtgatgcgggacgagaagtatagcatcctgagactcataatgcaaggaaagatagatggcagaagaagcatcggaagaagacgaatttcatggctgaagaacctgagagaatggtttggatgcagctcaaaacaactatttagagctactgcctcaaaaattaaaatagctatgatgattgccaacctccgtagcggagatggcacctgaagaagaagaatcatccttcatgttcatccagttttttcgtgaatactttcctgtttttgatgtcaactttattttttgtctcagtacactgctatttcttgtttttcttgacatcttttgtctataaatacctagtaacttgcgtattcgcgcttgtaaccttcttcaatctgtcttattttcctaccaaaatattgtgatgtgttgatacatctgcacttggatgttttgactgctaatactgagtttcagtatcttttgtttagccatatgaagtatatttggttacgaaccactcgttcaggtgtatgtataccatggatggtagaccgcacgtcatttattagaatgtagacgctccgtttaaaaatatataacatgatttaatgcagcaatgtcacaattcaaaaagagtcattgttgcaccactaaaaggtttttggataagatctcgagaccaactgaaaggatgtcaatacatattgcacgcagtaatagacacggcacacgacctg

SEQ ID NO: 5164 - DNA, 968 bp, Diabrotica virgifera
  SmartBlast Evalue=0.000000009; Info=Novex-3 (Titin isoform) n=1 Tax=Aedes aegypti RepID=Q17AF0_AEDAE
gaagaggaaatcaaagaggaagttacacttaaacctattaaaaagactccaaaagaaactgaagatatttctgaagtatctcaaccaaaacaaataccaaaatctgacattcagcctaaagaatacgagaagatagattttgatgttactcctaaagtaactgaggaaaaaccacaaattgtagatatgacaccagtcactatatcagaagaaattcgcgaagcagaacctgtgccagaagagcctaaagctccttggaggagaactccaaaagaaaaaccggtagaaactgtagaaacaaaagaaatgccaaagggtaaaaggaagcctcttcctgaagaagaaaaggaagaaatcaaacttaagccaatctctaaagaaaaaccagaagttccagagtataaaacagaggtagaagaagtaaagcgagaatcagcagaggttatagaaataaaggaatatgatgatcaaattaaaatacaaccaattgacaagaaaacaaagaaagataagaaaacacggcctaaaccaaaggaagaagacaaaccagaatttatagcagatgaagaaacaaaggatttgcaaacaactacagttgaggacattttagaagaaaaaattgttgaaaaagagttggttcctgagaaagctaaggatgaagtaattgaagctccagaagaaacaaaagtaatctctgaaactgagattaaactagtagaaaagaaagctcctgttaaaccaaaggaagttgaagagaagcagccaacagaagatgctgaacaggtcacataccaaaaagatatgactgttcaaattacgtcaaagaaggtcaagaaagataaacagaaaacagtttcatttgacgatagtcaacctattccagaactagaaattatatcccaaaaacgcattaccgagacaattgacaaagtacccgaagaaactgttagagatgatgtagaagtgca

SEQ ID NO: 5165 - DNA, 780 bp, Diabrotica virgifera
gaagaggaaatcaaagaggaagttacacttaaacctattaaaaagactccaaaagaaactgaagatatttctgaagtatctcaaccaaaacaaataccaaaatctgacattcagcctaaagaatacgagaagatagattttgatgttactcctaaagtaactgaggaaaaaccacaaattgtagatatgacaccagtcactatatcagaagaaattcgcgaagcagaacctgtgccagaagagcctaaagctccttggaggagaactccaaaagaaaaaccggtagaaactgtagaaacaaaagaaatgccaaagggtaaaaggaagcctcttcctgaagaagaaaaggaagaaatcaaacttaagccaatctctaaagaaaaaccagaagttccagagtataaaacagaggtagaagaagtaaagcgagaatcagcagaggttatagaaataaaggaatatgatgatcaaattaaaatacaaccaattgacaagaaaacaaagaaagataagaaaacacggcctaaaccaaaggaagaagataaaccagaatttacagccgatgaagaaactaaggatttccaaacaactacagtcgaggaaatcttagaagaaaaaatacaggagttggttcctgaaaaggctaaggaagaagtaattgaagttccagaagaaacaaaagtagtttctgaaactgagattacactagtggaaaagaaagctcctgttaaaccaaaggaagttgaagagaagcagccaacagaagaggctgaacaggtc

SEQ ID NO: 5166 - DNA, 1145 bp, Diabrotica virgifera
tcaatattcatctaatatattgttttcttactctatgttttgttgtattttattatttcaattctgcaaaaatcaaaataatttggttaaattcagaactgtcaaaagtttaaaccgtttagttcagtcgatcttcccacatgatgcatgtgtctccgtgggtaaaatgtgtaagatgaatgaatttcaatactaactgcgctaacataagcgggttcgaaccccaatagaaacttttatttttttttatacattttatgattgtaagtatatttattatataattttttttttcagaaaatacgtatttagttaaaaaatttccgacaatgtgtttatgtttgttttattcgtttatttttttaatttttggtattgttttaatgaaaatttttgaaaagtagtaagtattaaaatcagtttaatatttaaataaaatgtaaataaactgtttaaagtatattaatttcgttgaaatcatataattgaagtgtaacttcttacgtgcgtacaaagtacacacacattctttttttttatttataattttgaaacttgtgcatttgtatgttaacgaatacgaaaagaatgagataaacaaggtattacgaatatggtaaattttaacataacgtgtataagccgtatttttaaatttgtaacgtcataattggagtacaaaaaatgcaacatgttaaaatatacagcagcaggtagtaaattactctattttatagaccttagcatagttaacacgtaatttgtgtccaccgctttacaaaagccacccgtatagattattatttaacaattattcatccgtgttgtagtcagaggtcagacacgatcaattttatcaggatattgaaatagactgtcaggattacttgattttgtgtgtcaggatttttgtcgtgcgacaagcctacacacgctccaacagtcagacccaacgttgtcggccccgacagtcgggcgattttgtcagaacgtgtgtagacgttagttatactcaatgatggaaatatccatcttctgcatatctcctacatcctacatatttaatatgtaaatcaacagattgacaataagcaatcatatttaaagtattaattccaatttcacaattttttatagatatcttt

SEQ ID NO: 5167 - DNA, 573 bp, Diabrotica virgifera
tcaatattcatctaatatattgttttcttactctatgttttgttgtattttattatttcaattctgcaaaaatcaaaataatttggttaaattcagaactgtcaaaagtttaaaccgtttagttcagtcgatcttcccacatgatgcatgtgtctccgtgggtaaaatgtgtaagatgaatgaatttcaatactaactgcgctaacataagcgggttcgaaccccaatagaaacttttatttttttttatacattttatgattgtaagtatatttattatataattttttttttcagaaaatacgtatttagttaaaaatttttccgacaattaatgttcagaaataatttgtggcatttttaatgtgtttgtgtgtgttttatttttttattattttaatttttggcactgttttaataaaaatgtttgagaagtagtaagtataaattaatttaatatttaaataaaatataaataaaaagtatattaatttcgtttataatcatataatcatataatagaagtataacttcttacgtgcgtacaaagtacacacacattctttttttctt

SEQ ID NO: 5168 - DNA, 1475 bp, Diabrotica virgifera
  SmartBlast Evalue=3E-63; Info=Lactosylceramide 4-alpha- galactosyltransferase n=1 Tax=Harpegnathos saltator RepID= E2B6F6_9HYME
acaagctgcaaaaatctttgtacaatactttttagcaaaaatataaggtaaattcgatttgactgatatcttgtgtaaaaatcgagctgcaaagctcaagcacaacctgaaaacatcaaaaatattggttacaagctgcaacaaccttcgtgcaatacctcctggcaaaatataaataaggaacgtctgttttcaccgatatcttgtgcccttcacttaacttattccacgcatgaaagatatagctatctttggtttgatccttaactagtggtaagaagttcttgtcgaaaaataactcgttgctttggtatggaattgcaaaaaacgtagaagcggggtaaatggttacacctacacattttttatctacccagtcgcttgcttgtgttacgttacagtgcttctttaataccctcgtaattacaccaggaccattagtggcccatgcatttccatcaaaagactgtctcaaatcttcaaggcactgttcagccagttcgtgtccaattccatccggagaaaaacttaaagctgcagaacccaaatcaacgtcagcttcgactccagcaaaactaagaggaagatcttgaatgggttttaaatgtactacatcgagatcgaaataatatccaccatatttccagagagatagaaatcttaaaacatcacttgcgtgtgacacaacgtactgggacttttctatctttccagagctgtacagttcctccacaggagttcctttggtatatttcccatagtccaagtgcattattttcacattcttgtaactctgtaatgcatttagaaacttatcagactcgtctccttcggatttgataagacctggagaggagtataacacataaatatctaaatcgggattaagtcttgctgcactttccactgcgcacgcttgccttgaattgatggtaattttgcctttgttgaaggatttacaggaagtttcgtggaagaaaattgacttccctggtctagggcttatttcagaaatatcgggaagggaagctaaacttgtttctctgtagcagtgtatatcggcactaggagtagtactaatggaagtagcagtagcagtattagtagttgtagaagtactagtagcagtcgtcttagtcgtattatttatggtatatgatataatggcatgtttctcttttatttcactatttgtcttaatacttatttctgttacgtgatcgtctgagaacataaatataatagttacacttaatatcacaaatataaacaagttgatccacgctcgtttatttattttgatgaacatttttgacgaaagggttgaatgttaatgttgatgaataccgtttggtatattgagaacctccattccactattatgtaaatcctactgaaattctatggccacggttaaaaaaatttaccattttttaaaatcaactccaaatgcagttttcgattcaaaaataact

SEQ ID NO: 5169 - DNA, 258 bp, Diabrotica virgifera
aaacatttcaaatctgcaactttccaatatcttgatacatgccaatgctgccttaaacatttttagagctcttgcaaattattatttactataagatattccaattccagatctgtataaacctgcccttgtccagatgtctttatttcctccattccactattatgtaaatcctactgaaattctatggccacggttaaaaaaatttaccattttttaaaatcaactccaaatgcagttttcgattcaaaaataact

SEQ ID NO: 5170 - DNA, 1280 bp, Diabrotica virgifera
tgcagtaggatttgcatgaatggattcgtctggaaattgcagtcatttcgtatcgttgcgccaactccgaattttgattgataacggcgtaaattgatataaataaatctaaaatcaaatgggcatgtacgtgagtcagagagagaaaatatgttgtaaaccaccagttcataaatctttcttcaggtattaaagcaaggcttactcttttcttatagataataaactaaatatgtatgatggtctgtcgtaacaaagtatatagttcctctaatcggcttagctcacactgggaagctgttttcaatagccactagactaatagtatttatgaatgacagttttatggactacaaaaatgtgatttggtaaacatgtaaattttattgcatttgagtgacattgtattttccataagatgtgtgcggtgtctttttaagaaaatgagttcaagaaggtattttataataatggtcgaccctgtatatacctaaattttaatttttattacgagtcttggctcacataccgattgttgatgcatgtagatatttaaagcaatgttaaaagtattttactgagcagctgtacctctgtagatttttaatactaggaaataattggaaaaagttaatgaatttagataatttaatagttcgctggggattgtattattttgtattattttgatatttgtattatttgatgtattattttgtattattttgatatttttttcgtaaataaaacacttttattggcgttggaagactctaaaggcacgtatccattacgttagtgctccgtgtaactgctcgaatggatacggcatgctctcctctatatacagcgtgtttctgtatacagaaatacttttttttcattaagaaacagaattctgacaaaatacgtactttttgtacatattttgtcggaattccatccgaattatcttgcaacggatagtactacatttttgccctgccgacttttgtagccgagttgcagggtgttttgtcgattttgctcatttcttttctaacccataactttggaaccgccttgtatatttttttgatatttggtacccatatgtctcattctaaacgtcccgaacgaccgacatataatcactggaagtccaggtccggattagcaaaaaatgctgaagagattgtgaccttgaaacaacaccctgtatattggaaattttgaaaatatgtttgcatatttgaaaggagcactaaggagaactaagtttgttggttcgcttcaatttt

SEQ ID NO: 5171 - DNA, 405 bp, Diabrotica virgifera
tgcagtaggatttgcatgaatggattcgtctggaaattgcagtcatttcgtatcgttgcgccaactccgaattttgattgataacggcgtaaattgatataaataaatctaaaatcaaatgggcatgtacgtgagtcagagagagaaaagaaagtctgtgagtctacagttctacggcagaggcttactcttatcgtatagatatgtaataaagtaggtataatttggtcagccgtaccaaagtatatagttcctctaatcgccttagctaccgctgggttaagttgttttcaatagtgactagactaatagtatttgtgaatgacaattttatggacttcaaaaatgttatttccatatactgtaattacaattacgccgttaataatcaaaattcagagttgc

SEQ ID NO: 5172 - DNA, 1298 bp, Diabrotica virgifera
  SmartBlast Evalue=0; Info=Ribosomal protein L3 n=1 Tax= Chrysomela tremulae RepID=D1M828_9CUCU
caacgtcgtgatgtctcacagaaagttcagtgcaccacgtcatggatcgatgggattctaccccaaaaagagatcccagagacaccgtggaaaggtaaaggctttcccaaaagatgatccctcaaaacctgtccacttgacggccttcataggttacaaagctggtatgacccacgtggtaagagaggcagacagacctggatcaaagatcaacaagaaagaaattgtagaggctgtaacaattttggaaactccacccatggtaattgttggtgttgtcggttacatcgaaactccacatggtcttagggctttagccacagtttgggctgagcatctctctgaagattgccgcaggcgcttctacaagaactggtacaagagcaagaagaaggcatttaccaaagcttccaagaaatggagtgacgatttaggaaagaagtccatcgaaaaggacttaaagaagattgttaaatactgtaaagttgtcagagttattgctcatactcagatgaaattgttgaaacaacgtcaaaagaaagcccatattatggaaattcaattgaatggtggtagtgtagctgacaaagtagcttgggctaaagaacatcttgaaaagcctatccctattgccaacgtttttgctcaagatgaaatgattgattgcataggtgttactaagggtcatggatacaaaggtgttacttctcgttggcacacaaagaaattgccccgtaagacacacaaaggtcttcgtaaagttgcctgtattggagcatggcatccttcaagagtatcattcacagttgctcgtgctggtcaaaagggttaccatcatagaactgagatgaacaaaaagatctacagaattggtgctggaatccacactaaagatggcaaggttgttaaaaataatgcagccactgcctacgatcttagtgaaaaaactattaccccaatgggtggttttcctcattatggtgaagttaacaatgactttgttatgattaagggatgttgtatgggaccaaagaaacgtgttattacattgaggaagtcattgttagtccacactaaacgtattgctttggagaagatcaatcttaaattcattgatacctcatccaaattcggtcatggtagattccagacagctgctgacaaagctgcgttcatgggtcctctcaagaaagatagagttaaggaagaagagaaggctgctgctcctgccgcagctgcatccagttaaagtgtaaatgtttttattgtttgacaataaacagatatataactactaa

SEQ ID NO: 5173 - DNA, 990 bp, Diabrotica virgifera
tttggtcagtgttctgggtggtttagctattatctggagaaacttggtggagtagatgctttactcaaggctggcgtacattagatctaaatggacttgtaggtgcagacaacggtatcgaagctcttatcaacatccttcttgctttaggaggtaaagtcgatctggcacccttggcaggcattcttaataacgttgagagtcttttgggattaattttacaattaggaggaggtttagtaacaggagttactggtgttgtaaaagtactacttacaattcttggagtagtttcaaagaaacttgatcttaaagatctgttgcaagtacttattgaattcgctgctgccaaaggagaaggagtcaccatcgaaattaaggtatatctcggtgccttattgaatgtcttaaaacaactaaatcttggagagctactatctggactcgtttcaacagtggagaagattctaggcggaactttgataatacttggtgtcaacattgcggcaattttggacctattaatatctgtagaactattaaaactcacattaatcgtgagagtattattggtgcttggatcagttgtgaagacagtactatcacttcctgctcttctcttccatctaataggactacttacatcaacagttggaataactcttctgctttctcttggactcgtcaaaaagattgtgtcagttacagatattgttaaggagatcgccaagagccaagtaaaaattctcttaaacgtattaaatccaattggactactgaagagtattcctttcgttggagacatatatattgaagttagtgttaccgttaaaactgctagcggtggcaaagaggacttggattcttcagtaaaatctgatcatagcttcttaggaaatcttgtaatttgggttaagggattactaggcgtcgatggtgttactacaccaaaacctaccacaactacaactgatgcttctggaaggctgg

SEQ ID NO: 5174 - DNA, 720 bp, Diabrotica virgifera
tttggtcagtgttctgggtggtttagctattatctggagaaacttggtggagtagatgctttactcaaggctggcgtacattagatctaaatggacttgtaggtgcagacaacggtatcgaagctcttatcaacatccttcttgctttaggaggtaaagtcgatctggcacccttggcaggcattcttaataacgttgagagtcttttgggattaattttacaattaggaggaggtttagtaacaggagttactggtgttgtaaaagtactacttacaattcttggagtagtttcaaagaaacttgatcttaaagatctgttgcaagtacttattgaattcgctgctgccaaaggagaaggagtcaccatcgaaattaaggtatatctcggtgccttattgaatgtcttaaaacaactaaatcttggagagctactatctggactcgtttcaacagtggagaagattctaggcagaaattgatactgatggatctggtaccgtagatttcgatgaattcatggagatgatgactggagactaaaatatttatattatggaattatggacagggtcactatttggactaattttagggaaattatagtattgaaaaaaattccaatctagggttactcaagaagacaaataatgtgtattcattacttataaataaaacatgttgaaattgttgttaaattaataaattattttttgaatc

SEQ ID NO: 5175 - DNA, 965 bp, Diabrotica virgifera
agcacatagagaaaattaaacagattgcggacgagcggcacacggtggtcctttttcataatctatgattgcaaaaggtataaaattcatcttcaaataatcggttgtaatgacactcattgaatacctagataactaggtaaacaaaataaatcgttcttagaactcaactcccacctcgaagtgaacaattgaaaccgaaagttgtacttctttaccgaacttacgctcagtagtttcaggcaatttaccaatttaccagcgcccgtgccctttcaaagtgaatttaagtgtacctaaaactgttattttaatattttttgaaatggaagtaagcgaacaggtatatttacaatattataaaacaatagttgtacctttgttgataaaaaaaaatatttgattgtaaagatgatgatagattagcactaaaataagaatttgtaaagattttaatagagtagaacttttgggattgttcgggattgttgctaaactatttttttattgttactttattcatttatctctcagaaaaagttactcttgtgtgctcgaacgtgctctttctatatttttttaatttttgtaggttcttgtattttacatatacaacaatgttttacctgtatacgaattttcagtcccttatatttctgtggttccaaggaaaaggggcatgagtcacattgtttcttgaaatcgtcaaaacggtttaacgaaaattattttaaatgttctatttggtaaaaggccacatgtctgaaaaatgtaatgcatttattcattagggccattcaaaaattaggcatgagtcaatattttatctacaccaataaagaacagggactcgacttaaattacgcctattaaatggcacgcagcgcagggttttagttttggaataaggcatcttgtcgacttagttctgtaatgcgctacggaacggctcagaactcacaggc

SEQ ID NO: 5176 - DNA, 754 bp, Diabrotica virgifera
agcacatagagaaaattaaacagattgcggacgagcggcacacggtggtcctttttcataatctatgattgcaaaaggtataaaattcatcttcaaataatcggttgtaatgacactcattgaatacctagataactaggtaaacaaaataaatcgttcttagaactcaactcccacctcgaagtgaacaattgaaaccgaaagttgtacttctttaccgaacttacgctcagtagtttcaggcaatttaccaatttaccagcgcccgtgccctttcaaagtgaatttaagtgtacctaaaactgttattttaatattttttgaaatggaagtaagcgaacaggtatatttacaatattataaaacaatagttgtacctttgttgataaaaaaaaatatttgattgtaaagatgatgatagattagcactaaaataagaatttgtaaagattttaatagagtagaacttttgggattgttcgggattgttgctaaactatttttttattgttactttattcatttatctctcagaaaaagttactcttgtgtgctcgaacgtgctctttctatatttttttaatttttgtaggttcttgtattttacatatacaacaatgttttacctgtatacgaattttcagtcccttatatttagtctaagagctgggagcggattctgtgcatgacaagcaatatgaaaaaaccacacggggatatattgaattagttgtgtacatgactttccccaacg

SEQ ID NO: 5177 - DNA, 939 bp, Diabrotica virgifera
gtgccgattttaaccttgtcatgggcgtactttcgatttttttaaggggtgcggattttgaatagatatggggatggtaatatgaggtttgtgcttttggacttaagttttttgaattatttgtgaatttttcgtgtcaaatttatctctgtcagtggcgtggtcacggatttttttaaagggtgtcagttttgtatgggcgtgaaattaaaaaaaataaaaaatgagatttgtgcttgtggaaaagctttttgattttttgcgaatttttcgtgcccggtttaaccctgtcagtggcgtcgtttcggattttttaagggtgcagttttgtataggtatgaacgtagcaatatgcggtttgtgcttctggacctgaccttttaaaataattgagaatgttttgtgtctattttagccctgtcatgggcgtactttcgtattttttaaggggtacgagttttgaataggtgtggggatggcaatataatgtacttttggccttaagctttttttaatttttttgctaatttttgtgtcgattttaaccctgacagtggcgtggtttcggattttttaagggctgcgagttttggatacgcgtgggagggcaatatgaggtttgcaagttttggacttaatctttatgaattttttgcgattcgattttgccgatttcgaccctgtcagtggcgtatttttaaggggtgcaagttttgtatatgcatgggagagcaatataaggcttgtggttttggacttgagctttttgaattttttgcgatttgtttttaccgatttcgactcttgtcagtgacgtactttcgtatttgttaaggggtgcgagtttgtacggaaaacgtgagaattttgacctcaaaaataaggtttttgagtagtaaatggaagtaccgttttaaactcactaaaatagtataagca

SEQ ID NO: 5178 - DNA, 752 bp, Diabrotica virgifera
gtgccgattttaaccttgtcatgggcgtactttcgatttttttaaggggtgcggattttgaatagatatggggatggtaatatgaggtttgtgcttttggacttaagttttttgaattatttgtgaatttttcgtgtcaaatttatctctgtcagtggcgtggtcacggatttttttaaagggtgtcagttttgtatgggcgtgaaattaaaaaaaataaaaaatgagatttgtgcttgtggaaaagctttttgattttttgcgaatttttcgtgcccggtttaaccctgtcagtggcgtcgtttcggattttttaagggtgcagttttgtataggtgtgtaagtagcaatatgaggttgtgcttctggacttgggcttttaaaattcttcgagaattttttatgccgattttagccctttcatgggcgtactttcgtattttttaaggggtgcgagttttgaataggtgtggggatggtaatatgaggttcgtacttttggtcttaggctttttgaattttttgcgaattttttgtgtcgattttaaccctgacagcggcgtggtttcggattttttaaggggtgcgagttatggatacgcctgggagggcaatatgaggtttgcatttttggacttaatctttatgaattttttgcaatttgattttgctaatctcgaccctgtcagtggcgtattttcatatttttaagggtagagagtttggcataggcgtgggagggcaatatgagg

SEQ ID NO: 5179 - DNA, 864 bp, Diabrotica virgifera
  SmartBlast Evalue=6E-34; Info=Probable RNA-directed DNA polymerase from transposon X-element n=1 Tax=Drosophila melanogaster RepID=RTXE_DROME
acgattggcagggataaccagactcatgagctgaagaaaagaatcggtcttgggtgggcagcatttggaaaattgagagaaacttttaaaagtgagttgtccacatgcctaaagagaaaggtatttgatcagtgcgtccttccagtcttgacgtacggatcagacgtacctccaacaacatctagtgaaaattcaggactggacaagaaactggagaatcaaagtcaacgaagtaaaatcagtgcaggttacatttaccaaatgcagaggtacagtgccacctgttacactaaatggacaagatctgcctcaatctgacagcgttaagtatttagggatgcacttggataaaggactgacctggagaaagcacatttttaacaaacgaaaacaacttggcttaaaactcagcaaatactactggctattgggaagacagtcaaagcttagtttaaaaaacaaattattggtgtataaagtagccttaaaaccaatatggacatatggtgtacaactatggggtacggctgcaaactcaaacatagagatattggaacgcttccagtcgaaggtactacggaccataacaaatgcaccttggtttataccaaacagggaaattcgatacgataccaagtaggcacatttaaggaaatatgtagtaagtgaatacagcagccgctatttttggtgaaattgaaaaaaccaccaaaacaatcttgcactaatcttgatagataatagtgagcactgagcagactcggagactgaagagccaaaaaaccattggagctaccatataggtacttaggtcctaagcagcagtgaagtgaagtgcagtgaagtacttagcgttaaaggcac

SEQ ID NO: 5180 - DNA, 828 bp, Diabrotica virgifera
  SmartBlast Evalue=1E-40; Info=Probable RNA-directed DNA polymerase from transposon X-element n=1 Tax=Drosophila melanogaster RepID=RTXE_DROME
tgttcttggtccacttctctattttatgtacacagctgaacttccagtaagcaacccaacaatcacagcttcctttgcagatgataaagcgataaatgtcaaacacaaagacccagtcatagctgcaagaattctccaacaacatctagtgaaaattcaggactggacaagaaactggagaatcaaagtcaacgaagtaaaatcagtgcaggttacatttaccaaatgcagaggtacagtgccacctgttacactaaatggacaagatctgcctcaatctgacagcgttaagtatttagggatgcacttggataaaggactgacctggagaaagcacatttttaacaaacgaaaacaacttggcttaaaactcagcaaatactactggctattgggaagacagtcaaagcttagtttaaaaaacaaattattggtgtataaagtagccttaaaaccaatatggacatatggtgtacaactatggggtacggctgcaaactcaaacatagagatattggaacgcttccagtcgaaggtactacggaccataacaaatgcaccttggtttataccaaacagggaaattcgatacgataccaagtaggcacatttaaggaaatatgtagtaagtgaatacagcagccgctatttttggtgaaattgaaaaaaccaccaaaacaatcttgcactaatcttgatagataatagtgagcactgagcagactcggagactgaagagccaaaaaaccattggagctaccatataggtacttaggtcctaagcagcagtgaagtgaagtgcagtgaagtacttagcgttaaaggcac

SEQ ID NO: 5181 - DNA, 1022 bp, Diabrotica virgifera
atattgatttataaatcgatgccaatatagaaagtaggtagtacatttcgaaacatgaaactgatagtagtgattttagccgcagtttgtctctacgacgtatctgctaaacaagatgactacgtgcaatgggtgagttatgatggtacaatacccgccaatgttgtggaaggaactacatccattgatggtagacaattatatattgcccgtgcctttgttagtttagatgagtctgatctttataatgacaatcaaggttacatagtaggcccagtggaagcaggagttttacaactcaatgctagttttcctgatttaacttaccatattaccgacaacattgagatcctaactgttgtggatggagccaaagtcgaatgggttagcacaaatcaaacatttttaccaaaatggttcgatagtgatgactaccatccagtgcactccaactggcatcaaattgttaatataaattcaaccatttatataggaagaatccacgactcggatataggtggtacatttggacatataccggtctccactgagttatacgaggacgaggatgtggcatactatgcttttggcgatgatgtccgcgaatctaatgtatacgatattttactgtattatttcaaataataggtaacgtaaaatatacttgttaacaatatctcggacacataatgagaaacatcactaaatacagattactgaaggtaatccttcaagataaagtattcggaaaacgaggaattgggagaagaaaaatatcatggttaaagaacatgaggaaagggttccccacaacaaaaactaatctatgtaaagcatcagttaataaaataattatagccagaataataggccaatattcgaaacgaataggcaccaaatgaagaagaagttgttcccccactgcgacagagagaattgtttgtatttaggataggcatctctttctaatcgacgagatttatccaatgacgttggctttatcgaccacgtgactttcccac

SEQ ID NO: 5182 - DNA, 679 bp, Diabrotica virgifera
atattgatttataaatcgatgccaatatagaaagtaggtagtacatttcgaaacatgaaactgatagtagtgattttagccgcagtttgtctctacgacgtatctgctaaacaagatgactacgtgcaatgggtgagttatgatggtacaatacccgccaatgttgtggaaggaactacatccattgatggtagacaattatatattgcccgtgcctttgttagtttagatgagtctgatctttataatgacaatcaaggttacatagtaggcccagtggaagcaggagttttacaactcaatgctagttttcctgatttaacttaccatattaccgacaacattgagatcctaactgttgtggatggagccaaagtcgaatgggttagcacaaatcaaacatttttaccaaaatggttcgatagtgatgactaccatccagtgcactccaactggcatcaaattgttaatataaattcaaccatttatataggaagaatctacgactcggaaataggtggtacatttggacatataccggtctccactgagttatacgaggacgaggatatggcatactatgcttttggcgatgatgtccgcgaatctaatgtatacgatattttactgtattatttcaaataatagataacgtaaaatatagttgttaacaatattt

SEQ ID NO: 5183 - DNA, 887 bp, Diabrotica virgifera
ggcagatggctccgaattgaggtgtaaaccaaatcggataggtatttgtagttaaattaatgatatattgtttaattgcatcccttaaactagcaaacatcgtttacattcgtgacaaattcttttaaaagtacactcttatgtgaacattaattgtttttaagatttttttatgaaaaaaaaaaaacaagtatacaacctgtaatcatctactaaactaaatactatgagtatcgcattttaaccaatcgttaaagatatacagtgcgtgctctaattattagagccacacaacaaaaatggagttttgcatcaaaatgatttgcaattgaaccacaacatacttaataatgtttacttcaccaataagtaaagtattacactttatgaaacaaataaatgaataggctagcacgactttttgacgtaccgtagacccaaaagatgtcgaggagtgcaaaatgtattattgccttgagttactgtattcctcaaactagcatagaggctcagcatgcgagtctcaatgtctagtctttataattaacttaatcggttacaatacagtaaccgccacgctactagacacacgggaacattgagctaatacagtcctgggactcctcacttgttacactgtttacttttatgtctagtgacgtttagaacgtcagaaaatgtatggaaaccgaatattaacacagaaagttgacagttaatagaacagctgtatttgacgtttatagttgtcattgtgttaacgttttaaaggtaaagtctataagtatgtaatattattggtgtttgaataaagttattttgaagcagagtaacaatattattaattaatgtatttgttttatggaaaaacaattattttgaatagt

SEQ ID NO: 5184 - DNA, 812 bp, Diabrotica virgifera
tgccacatgtcatctgtctatgacacacataacagtcaagcatttccttcctcagtggcggatccaggggagagcgatggcggcgatcggtcacccctcgcaaaccaagttatatataaagattataaaaccattcatttatttttcatagaaatttagtcaatcggccctcctcttgacgatgctggatccgccactgccttcctgttatctatccagttacctctagtatgacgttcacaatagattggtagcttcattcatatactatcataaagtaagtatagcaaataaagtatcatagcacaagaataaaagcttaacgaattatatattacaagataggcactgaaatagacattacaattaaacgtatgctagtgtttaattgattaatgtttctccacaaatctggtgtataaaacagttgaaaatccattgtaagtacaaacttatcaaacaacacggaataaagtgaaattagatatacagtaaccgccaccctactagacacacaagaatattgagctaatacagtcctgggaccctgcacttgttacactgtttacttttatgtctagtgacgtttagaacgtcagaaaatgtatggaaaccgaatattaacacagaaagttgacagttaatagaacagctgtatttgacgtttatagttgtcattgtgttaacgttttaaaggtaaagtctataagtatgtaatattattggtgtttgaataaagttattttgaagcagagtaacaatattattaattaatgtatttgttttatggaaaaacaattattttgaatagt

SEQ ID NO: 5185 - DNA, 873 bp, Diabrotica virgifera
  SmartBlast Evalue=2E-21; Info=Putative uncharacterized transposon-derived protein F52C9.6 (Fragment) n=2 Tax= Camponotus floridanus RepID=E2ALS0_9HYME
agtacaaataattggatatgcggacgatataaccatagtagcaacaaataaaagagcattaaagaaaactttccaagaaatagaaaacgaatccaaactgagaggactggaaataaatgaaaataaaacaaaatacatgaatgtaagtaaaaaaaaagaagacgcaactgacagaaatgacaatagacgcacacagcttcgaagaggttgaaacattcaaatatttgggagtattagtcaacagaagaaatgaaagtgtagatatgaaaagaagaattcaagcaggaaacaaagcattctacagaaataaaaaaattttcaaagataagaagataagccgaaatacaaaaatgaaaatctacaaaacgaccataagaccaatagtgctatatgctttggagacattcacattaacagcaagagaagaagagcagctgaaagtttttgagagaaaattatgagaaaaattctgggaccaaagagggaaaacgaagaggatgcaaggcaatggatgaaccacgaaatacaagaatggatgggtcaagagaacatagtaagagcaacaaaagcacagagaattagatggtatggacacataatgagaagagagaagaacaatccgttaagagttataaccgaatggataccaccaggtacaagaaccagaggcagacctaaactcagatggagacaacaagtggaagaagacttaagaagtataaagagagagaagaatggataaaggtagtgaaaacagcgaagtcacaccagcaactgtaaaacctaagtcagaatgggatgatcccccacaaaaggatcttcaagtgaaaacagcttcagcttcttcgggagcgtatagcttgtataatatat

SEQ ID NO: 5186 - DNA, 824 bp, Diabrotica virgifera
  SmartBlast Evalue=9E-22; Info=Putative uncharacterized transposon-derived protein F52C9.6 (Fragment) n=2 Tax= Camponotus floridanus RepID=E2ALS0_9HYME
agtacaaataattggatatgcggacgatataaccatagtagcaacaaataaaagagcattaaagaaaactttccaagaaatagaaaacgaatccaaactgagaggactggaaataaatgaaaataaaacaaaatacatgaatgtaagtaaaaaaaaagaagacgcaactgacagaaatgacaatagacgcacacagcttcgaagaggttgaaacattcaaatatttgggagtattagtcaacagaagaaatgaaagtgtagatatgaaaagaagaattcaagcaggaaacaaagcattctacagaaataaaaaaattttcaaagataagaagataagccgaaatacaaaaatgaaaatctacaaaacgaccataagaccaatagtgctatatgctttggagacattcacattaacagcaagagaagaagagcagctgaaagtttttgagagaaaattatgagaaaaattctgggaccaaagagggaaaacgaagaggatgcaaggcaatggatgaaccacgaaatacaagaatggatgggtcaagagaacatagtaagagcaacaaaagcacagagaattagatggtatggacacataatgagaagagagaagaacaatccgttaagagttataaccgaatggataccaccaggtacaagaaccagaggcagacctaaactcagatggagacaacaagtggaagaagacttaagaagtatggaaattaaaaatataggaaggaaaatcagagagagagagaaagagagagagagagagaagaacaatccgttaagagttataaccgaatggataccactaggta

SEQ ID NO: 5187 - DNA, 999 bp, Diabrotica virgifera
gagatcaattggtccaaataaataaatgaaaaatggtttttacaatatatgagcccatcagaaacaaaacctgctaaatcctaaatttttcgttctgctaaatccaacttaaagtataaatttgtgaagatgtaaggggcatgcagaaaatgacaaattagtgtgccaattcaggatatttcttgatgctcctttgattgagaaatgccggatactttttggaaaatttacatttttaatgtttttttaacctcctgacaaaatttcaaaacatggatctaactggttttgattctataggcctcatatgtagtaataataaactagatgtcgaactggagggcaataagggaagctgatttttaaagtttagtgcgcgtgttgcccgctaggtggacgcaaataagggagcaaaaatgtaaatttaatattgtttgaaattttactacttgtttcccgtgataattacctagggtcatattacccgtatatgggagaatggtgaatattaaattcttaattgtatatcaaaaaatgcggaataactacctcttaaaacccagcagatttcatttgcatatcttaaccggttttagagcaatacataaatcgtcaggtcagaaaaattgcaacaccccctatctcggaaacgaagcatttgcggacatacgtttataaagcaaacaatcattattttttcatgcagaattatcccttaaagtttgccatacttatgtaaaaacaccctgtatttacgaaaaacaagactagttgttaaagtacctaacttttttattatccaacataagcgaatgaaccaaaaaccgaatgttaagaaagcattaggctatagttgggttttcatttcagtaataaatgctagaatgttccacagggtcacgcgaactttgagaaaaaatcagtttgattggtacacaatgacaatttacctgtctaggaacgatattattacagcgatattgttaaagaataaggcta

SEQ ID NO: 5188 - DNA, 689 bp, Diabrotica virgifera
tgtagtaataataaactagatgtcgaactggaggacaataagtgaagctgtttttttttaagtttagtgcgcgtgttgcccgctaggtggacgcaaataagggggcaaaaaatgtaaatattgtttgaaattttactacttgtttcccgtgataattacctagggtcatattacccgtatatgggagaatggtgaatattaaattcttaattgtatatcaaaaaatgcggaataactacctcttaaaacccagcagatttcatttgcatatcttaaccggttttagagcaatacataaatcgtcaggtcagaaaaattgcaacaccccctatctcggaaacgaagcatttgcggacatacgtttataaagcaaacaatcattattttttcatgcagaattatcccttaaagtttgccatacttatgtaaaaacaccctgtatttacgaaaaacaagactagttgttaaagtacctaacttttttattatccaacataagcgaatgaaccaaaaaccgaatgttaagaaagcattaggctatagttgggttttcatttcagtaataaatgctagaatgttccacagggtcacgcgaactttgagaaaaaatcagtttgattggtacacaatgacaatttacctgtctaggaacgatattattacagcgatattgttaaagaataaggcta

SEQ ID NO: 5189 - DNA, 885 bp, Diabrotica virgifera
gatataaaacaaagtgatgttaaacattaatagtaatgttaacaacgtaccaaaataacatgtttttagacgttctttttctgacatttttgtcattgtttcgtataatagggactcactttactcgtagttaaacacgcttttacgtgcgtagaaaaaaatctaagatcacgttgtttttgttccttacatacttacttttttgggtccctttggtatagatatacttctttttcagatgagacaattacctattgacaacgtttaatatcgaactaaactgttacagtaataatctaccaatgttttgaacatctgtaacgttgtgtataaatttgtacctttaagaattacataaaatacatatatttatatttggttctaatataaagtagtaccaactatctaaaagactcattaatttccaattcagtgaggtgctattgttggaggtgtggaatttcataaacaagggattacctgttttatgaaattatgctttgtttatgtaagtacacatttcgaacaatagtactccgctgagccgaacattattgagtctcttagacacttggtacggatatacaaaaacagactaattgaaatgtaaactttgctaataatattgaattgcgtgtttatatgacttaatttcgtaaatcaggggtgtgtcgtaaagaattaggtaatgaaattcgactccccttgcatttacgtgcagctaattacgtcgttcatggacactaattaactttaagcgaggggcgtaggtatctttatttttaagaaacacgtctttgtaaataaacggcgacggtcttttgtgtccctcctaaagaagagcccatgtttatatatgtttgactgatttagaatgcatgaatt

SEQ ID NO: 5190 - DNA, 793 bp, Diabrotica virgifera
gatataaaacaaagtgatgttaaacattaatagtaatgttaacaacgtaccaaaataacatgtttttagacgttctttttctgacatttttgtcattgtttcgtataatagggactcactttactcgtagttaaacacgcttttacgtgcgtagaaaaaaatctaagatcacgttgtttttgttccttacatacttacttttttgggtccctttggtatagatatacttctttttcagatgagacaattacctattgacaacgtttaatatcgaactaaactgttacagtaataatctaccaatgttttgaacatctgtaacgttgtgtataaatttgtacctttaagaattacataaaatacatatatttatatttggttctaatataaagtagtaccaactatctaaaagactcattaatattcagctcagtggggtgtgctattgttggaggtgtggatttccatatacaagggatctgcctgttttatgaaatggtgatttgtttatgtaagtacatatttcgaataatactccgctgagctgacattaacgtcttttagacacctggtacgggtatacaaaaacagactaagggcgaaaccagacggaccactctgcgacgctgctctgtggatccacaaagcagcttccgatgattggctgtgggttcttatgtgaagtggacgttgcaccccagaccgagcgactgtggccagccacagtcgcccatcctcgctgctagtggcgtccactagccgcaaaacctattcagacggaccacttttgtag

SEQ ID NO: 5191 - DNA, 966 bp, Diabrotica virgifera
  SmartBlast Evalue=7E-16; Info=Endonuclease-reverse transcriptase n=1 Tax=Bombyx mori RepID=D7F170_BOMMO
tttataatatatataaaaccatcatacgaccaataccaacatttggcgtagacacttagaaacatggatcataacagaaaagacaataaaccttattaatacttttgaaataaagataataaggaggatattgggacccatttgcgacaatggtatatggagaataaggttcgaccacgagttgtactaatattacaaagaactctctatagcaaattatgcaaaaatacaaagattgcgctgggcaggtcactttataagaatggataatgacggaacacctagtaacacacttatcggaactattatgagacgtcggccagtatgaaggccaaggaagaggtgaatatacgtagtgagaacctactaaagagatattgagggtggacaactagcgaagagtagctagggacagagatacttggaaaaggatactgggggtggccaaggtccgatttgggttgtaacaccataggaggagagaaaaaaacttacttttgtacatacagtggtgttaaaaagtcctgcatcaccttaccaaatacgcggtctgtcgtcgatttttccttgttcagcatacttcttaatgactctaattactgtagatttgtcgtttttatggtgaaaaataatttcaaaacgcttttcgttcgataatttagtttgtttggtctgggatgacattgtgacctttttattaaaaatcaaagagcgaataaatgtgttagggtaactacagtgtttatatagtcaaaatatgtggcaaatttgtcattaagattcaatttaatagtactttaacgacttaataatcacctcataattttctcggattatgggaaatcccttcaatcagattattttaatcttttctgtagaattttgagctagtaattaaaaaaaacattagtaagtataccgataatgctaattacaagcacaaacttaaaatgaattagcaaaaat

SEQ ID NO: 5192 - DNA, 715 bp, Diabrotica virgifera
  SmartBlast Evalue=2E-22; Info=Endonuclease-reverse transcriptase n=1 Tax=Bombyx mori RepID=D7F170_BOMMO
tttataatatatataaaaccatcatacgaccaataccaacatttggcgtagacacttagaaacatggatcataacagaaaagacaataaaccttattaatacttttgaaataaagataataaggaggatattgggacccatttgcgacaatggtatatggagaataaggttcgaccacgagttgtactaatattacaaagaactctctatagcaaattatgcaaaaatacaaagattgcgctgggcaggacatcttataagaatggataatggcagaacacctagtaaaacgcttagcggaactatggtgggacgtcgtccaggagaaagaccaacgaagaggtggatagacgaaaagagaaccaatactaaagaaatattgaagctagataactggacgagtgcagccaggacagagatacttaaaggcagatgctgggggaggccagggtcagacttgggctgtagtgatttaggagagagaaagatgattactttgcttaattctaaagtctcatttctttaatttaagtcgggcgctctgctttttatcactccggcactctagtacacgtagtattttgagtgtgagagaattctgctctagcaaatcacaatcttaagaagtttacgggaagcaccattttcaattttgcggattgtcgcgctctgcggatcatcccctttgcggatcatccgctcgcggataatcggg

SEQ ID NO: 5193 - DNA, 1087 bp, Diabrotica virgifera
  SmartBlast Evalue=7E-35; Info=Reverse transcriptase family member n=1 Tax=Glycine max RepID=Q1AKH8_SOYBN
ctgagctttatagacatggaaaagccttcgactcagtcaaaagaaaagatatatgggaaagcctaaagaagaaggaagtaagcgaagaactgatagaagcaacaaagagtatatacatgaaaacaacaaatacagtaagaatgttaaatatacagtcagaaccatttgaaacaactcaaggagttagacaagggggaagtctcagcccagtgctattcataaatgtaatagatgagatagtgaaagaatgtaagaaaactttcaagaaatactgcatcggttggaacagaatgcaaatgataaacgctgagatgtgtatatttgcagacgacatagtattaattgcggaaacagcagaaaaactgaaatacaacttagagaaatggaacctagaagcaagcaaatacaacttaaacgtaaacaaagagaagactcagataatgaaaatatcaaggaaacaagggacggaagatcaaatagaaataatgatagaccaacatcaaattaatacagacaaattcatacaaatacttaggaacagtaatcaacaacaaaggagacatagaggacgatcttaacaacagaatggaaaacacaggaaaactattccaagcactaaatagaggattccttaataacaaagaaatatcaacaaagaccaagatgacaatatacaaaacaatatatagacctacggtgacatatggagcagaaaattggatattaaacaaaagacatcagagcagaattcaggcagcagagatgaaatacctcagaagaacgatcggagtaaaaagaactgatagaatcagaaatgaagaaataagagaaagactcaaaatcaaaccgatactcgactcaatcaaggagaaaaaattggcatggttcggacatctaacccggatggacaataatagacaagtaaaaagagtgtgggacgccaaaccaataggaagaatagaagaggaagacccattaaagaatggaacagtgacatttcgcagatactgcagagtaagggtaagacttggcaggaagcaacacagatggcatccaataggaaggaatggagaaagttcgttaagag

SEQ ID NO: 5194 - DNA, 595 bp, Diabrotica virgifera
  SmartBlast Evalue=8E-14; Info=Reverse transcriptase family member n=1 Tax=Glycine max RepID=Q1AKH8_SOYBN
tttaacatgccacaagaaaatagtttcagaaccttactaacatatatttattcatattgtaaatatgtaaatatccgatttaacccctttacctagcagcctattctgaaaacaaagaacttaaaacatttttaatttaactacaacaaagaaatatcaacaaagaccaagatgacaatatacaaaacaatatatagacctacggtgacatatggagcagaaaattggatattaaacaaaagacatcagagcagaattcaggcagcagagatgaaatacctcagaagaacgatcggagtaaaaagaactgatagaatcagaaatgaagaaataagagaaagactcaaaatcaaaccgatactcgactcaatcaaggagaaaaaattggcatggttcggacatctaacccggatggacaataatagacaagtaaaaagagtgtgggacgccaaaccaataggaagaatagaagaggaagacccattaaagaatggaacagtgacatttcgcagatactgcagagtaagggtaagacttggcaggaagcaacacagatggcatccaataggaaggaatggagaaagttcgttaagag

SEQ ID NO: 5195 - DNA, 1118 bp, Diabrotica virgifera
  misc_feature (47)..(51): n is a, c, g, or t
tatttccgtaataaatccctaaaaatccagcacaagaaacgtacagnnnnnactactctgtggagataatataaaaaaaaacatatgtaaaaatcaaaatagaatgagtcaatcatactaacagtcacattttaacaagaatactaacatatttttgataaaatggtttcttgcgcaaatggtaccttgtcggttaaaaaaatcagtcgatatcgttcagctgaacacatttttttattagtttaagttatgtatatgctgcagaatatatcttaattcgtttacataaaaaaactcgatagttgcatggtatttgcttcaattttttgtttgtgttatccatatttataaatgggcaaagtatcaaagactaacaaactttgaagaatgtttggaagagttacttagttttttttacgggatgcgtcacagccaaccttacgccattccttcttgacctgaatttctcagatgccgtgagtcgatgccatgatatctcctgatacttttcatcatttactttctttgccccgcttagctttcatatagcttgtttaacagtacgactaacctcttcttacccttctgcaactcttctgctcatattcgacccatttaattctacgacaatcattctccattcattgtaaatgctgtaacactactagactgccttaatgtgtcaaatatacatatatctaatacactggcagcgatagatctttcagaaaagtaaggttgttatcgtaatatcatttgatatcttgcgtgttactctttagatacttctctttataggtatgagtaaagtcatctatagtgcaattcaaaatacagtgtttcatttgaaatctgttgttttatttttcctggtttgtattttaaatcaatttaaccgtcaaaaaacacatttgctcctcatcctggatgacagatctggatactttttctcgcaatagagacctaaatataagaactaaagtatttgtctcaatattatgtactttggacatatctaactacaaattttatcaaggagtacatgcatttacagagcatgaaataacaatgtatttttttattaataaggcagacaaaaactttttcttcgagaacta

SEQ ID NO: 5196 - DNA, 533 bp, Diabrotica virgifera
  misc_feature (47)..(51): n is a, c, g, or t
tatttccgtaataaatccctaaaaatccagcacaagaaacgtacagnnnnnactactctgtggagataatataaaaaaaaacatatgtaaaaatcaaaatagaatgagtcaatcatactaacagtcacattttaacaagaatactaacatatttttgataaaatggtttcttgcgcaaatggtaccttgtcggttaaaaaaatcagtcgatatcgttcagctgaacacatttttttattagtttaagttatgtatatgctgcagaatatatcttaattcgtttacataaaaaaactcgatagttgcatggtatttgcttcaattttttgtttgtgttatccatatttataaatgggcaaagtatcaaagactaacaaactttgaagaatgtttggaagagttacttagttttttttacgggataggtcacaaccagccttacgccattccttcttctcagatgccgtgagtcgctgccatgtaatcttctgatacttttcatcatttactttctttgtcccgcttagctttca

SEQ ID NO: 5197 - DNA, 1092 bp, Diabrotica virgifera
cgtaagtagtgtttacttcatcaactcctatcgtagggggtaaccaacccccaaccatctgagatggtccagatgatgaggaaccaccatagtatatgtaatatttcattcttcttcatattatattctagcttcagtggttgtcgatagtcgttttttcaagtattattatgtagatatgtctaaattcacgtgtttttaaatttttattaacttttgtccttaaattctctctttacagacagctctggaaggcgtcatttattatctgtcaaaatatggattaaatatggtatgaatattgtattgttaatcagcttaccaatcatcaaacaacagagttattagcgtaatagaataataatcattttgcatagtgtgttaaaatgaatgacttgttactgagtaaaaccggctgctctgttttcacaataaattgcttatgatacccgataacaacgactctcgcgactttttgagcttccactcaaagttaccgcttgagccattggactaccgaggtatagttgccatcgggttattgcagaaacctcaatcttaagcttattacaacgtcatttgtctttgagtggtgtggataaccttccgatacaggtagaaagtaataaatgttaatctattgtatatttaattattatacctgctattcagtatgtttacctcttgaaacttaacgacaccactgaaaatgcaaatagctttgtaatgtgattaagattaaggttttctgcaatatcttgatggcaactgtacaccagaatttctgctacatgcttattgttgactgcagaaacgacggttgctaatcaaagactttataatgaaaagttggctaatgaacgaatgggtattttgaaagaaccggaatcattgtttacaaaaactgactgattcattgaagtaaggtatacatgtatttataatcaaaaatgattaggaaatgtacttctgttcatggtatttggtcctattttgttttatttacaaatagtacttgtgtatttaacgaatttttcttcaaccaataaaaaatatacaaaatatagtacaaaattgagatttgttgaaagc

SEQ ID NO: 5198 - DNA, 562 bp, Diabrotica virgifera
ctattgtatatttaattatatacctgctattcagtatgtttacctcttgaaacttaacgacaccactgaaaatgcaaatagatttgtaatataattaagattgaggttttctgcaatatcttggcaatatcttgatggcaactgtacaccagaatttctgctacatgcagttgcagtttctgcaaataactttgtaatatgattaataataaggttttctgcaatatcttgatggcaactgtacaccagaatttctgctacatgcttattgttgactgcagaaacgacggttgctaatcaaagactttataatgaaaagttggctaatgaacgaatgggtattttgaaagaaccggaatcattgtttacaaaaactgactgattcattgaagtaaggtatacatgtatttataatcaaaaatgattaggaaatgtacttctgttcatggtatttggtcctattttgttttatttacaaatagtacttgtgtatttaacgaatttttcttcaaccaataaaaaatatacaaaatatagtacaaaattgagatttgttgaaagc

SEQ ID NO: 5199 - DNA, 835 bp, Diabrotica virgifera
gtattttacaaaccatctacgtttggttcataatccacgctgtatgcttgtcccgttaggtaaattattccgattaatttttttgcacaaacttactcaaaaacaggtacttataacaaataatccacaaggtgccaggcagtaccgcggtcggaaaattgtttaaacatttttttaaacgaattcaaaaaatcaattttttcacttcggacaaatttgttttagattctctggatcaagctgagcaaaataggtatcttgtgatttttctataaaattgactgttgtcgagttacatgcattttcaaatttgaaaaacgcgaaaatggccattttaaggcttaataactcgattaaaaattattattatgaaagtcataaaggaaccaactcaaagtttaaagccccccctgcaataggctaaagaaatttttgtcattattttattactattatttttaataattaaaaataagcgctaagcatgtattaaagcggccgtccgcgagagagagatgtacaatattcattggacgttttaaaaaaatatcgatttgaagtcaaaaatacgttttaaaaaaataaaaaaggaattttgaggttatatgtattgtacactcgacctacacgggtctataaaaaaatagatataggttttgtagaagcctcataaaaattttaaattaattgcatctttaaacaaaaaaaaaatagaaaaatttacgtttttgtggggacagggggagggggtggtgggctaaaaatgcgatttgtcttattttttaatcacatataacgtaaaaaatgaaaaaaaaataattcaggctgcatcgat

SEQ ID NO: 5200 - DNA, 820 bp, Diabrotica virgifera
gtattttacaaaccatctacgtttggttcataatccacgctgtatgcttgtcccgttaggtaaattattccgattaatttttttgcacaaacttactcaaaaacaggtacttataacaaataatccacaaggtgccaggcagtaccgcggtcggaaaattgtttaaacatttttttaaacgaattcaaaaaatcaattttttcacttcggacaaatttgttttagattctctggatcaagctgagcaaaataggtatcttgtgatttttctataaaattgactgttgtcgagttacatgcattttcaaatttgaaaaacgcgaaaatggccattttaaggcttaataactcgattaaaaattattattatgaaagtcataaaggaaccaactcaaagtttaaagccccccctgcaataggctaaagaaatttttgtcattattttattactattatttttaataattaaaaataagcgctaagcatgtattaaagcggccgtccgcgagagagagatgtacaatattcattggacgttttaaaaaaatatcgatttgaagtcaaaaatacgttttaaaaaaataaaaaaggaattttgaggttatatgtattgtacactcgacctacacgggtccatcaaaaacagatatgttctgtagaagcctcataaaaattaattgcaactttaaacgaaaaaaatagaaattgacgcttttgtgggggcaggggagggggtggtgggccaaaagtgcaatcagtcctatttttcaatcacacataacgtaaaaaaaaacaaaaaaatattcaggctgtatcgatc

SEQ ID NO: 5201 - DNA, 918 bp, Diabrotica virgifera
ccactatcactggccaagcaaaagtattaaaatcaaaatccaaatcaaaagtccgtcagaatagcactaagtccttacaactaaaaagttagtaattatttcctaaattgaactacgctagagtgagatccacaacaagaacgctacggttaccaaaaataataaagatctcacctagcaaaaacactaataagtaaatatataatgagttatataaatgagttatataaatgagttatataaatgagtgatataaatgagttgtataaatgagttggtcagttactctttatatacaatgtaaaaacctacaagacatattccctatttgaaatccgcgacaaacctttaacgaccccttccctatcaaatttttaagctacaattattatttataatgattattgaacaagacctaattttatttattggaaactactacttatattaaatcaaaaaaaaaaaaccaacgacctaaaaccctatctatcaagaaatatgtacctagtttacctcaattgtatgcatacaagaagtttacagtgcaagcaactatagagtacccaaaatatgtaaataataagattaaacaacttatcttaaccacaagtcctatttaaaaaggtccagataggaatgaatttcctcttggcacggcaaaaactagtgggctgctgtggtgataaatccaatcctggatgttgtgaaataggtactatccaatccaatcaaaagtaactctaggggtaacccataccctagctgcttacagtaactggcacatatttatatgatggcacattaaatgatgatacaatctatataaattgactaggctaagtgtctatgtgacaagtagctaagggacggaatctaaaataaattttatcaatttaattacattatttataacactat

SEQ ID NO: 5202 - DNA, 737 bp, Diabrotica virgifera
gatacgtacacgacaagaacgctacggttaccaaaaattaagtatctcatctagcaaaaatactaattattatataattaatttatataaatgagctggtcagactcttaatatacaatgtaaaaacctacaagacatattccctatttgaaatccgcgacaaacctttaacgaccccttccctatcaaatttttaagctacaattattatttataatgattattgaacaagacctaattttatttattggaaactactacttatattaaatcaaaaaaaaaaaaccaacgacctaaaaccctatctatcaagaaatatgtacctagtttacctcaattgtatgcatacaagaagtttacagtgcaagcaactatagagtacccaaaatatgtaaataataagattaaacaacttatcttaaccacaagtcctatttaaaaaggtccagataggaatgaatttcctcttggcacggcaaaaactagtgggctgctgtggtgataaatccaatcctggatgttgtgaaataggtactatccaatccaatcaaaagtaactctaggggtaacccataccctagctgcttacagtaactggcacatatttatatgatggcacattaaatgatgatacaatctatataaattgactaggctaagtgtctatgtgacaagtagctaagggacggaatctaaaataaattttatcaatttaattacattatttataacactat

SEQ ID NO: 5203 - DNA, 885 bp, Diabrotica virgifera
  SmartBlast Evalue=2E-69; Info=RNA-directed DNA polymerase from mobile element jockey n=1 Tax=Drosophila funebris RepID=RTJK_ DROFU
ggcatgtgttgtggcggtttgtaaacgttatttgagatgattttgttttatttacttttgttcgccattttgtataccattcactgagtatgtccagatggtgtcgcaggtcttgtgaggcttgtatgtgatcttcatttactgctagtattgctacgtcatcagcaaaggaagcgatcgtagtattatgagactctggtatatcggctgtgtagagtgagaaacgcagcggcccgagaacactaccttgcggtactccggagttaataggacagaggctggattgttgttctttgaattttactgagaaatatctatttgataagtaggatttgattaggaggaaatagttactagatagtgctaattttactttgtaaagcagacctctgtgccaaactttgtcaaacgcttgtgagatatctaggaatacagcgttgcagtatttcttttcttcgagagtttttgatatttcatttactattcgatggacttgttgtgtagtagagtgattttcccgaaaaccaaactgatgttctggtagtaatgttaggaattcatgatctgcgtatattctttgtagcaccaatctttcaaaaactttgctaacgattgggagtaggctgatgggtcgataagatgttacttcattgggcgctttgcctggcttaaggatcattatgatttctgcaaatttccatatttttggaaagtatgataaacttagcatgcgattaaatattactgttagcataataatggccttacgaggaagttgttttagtacttgtgccgagattaagtcataacctggagcctttcgtgagttgagtttgattatttctttcttgacttctataggaaaaacttttgattggaagggac

SEQ ID NO: 5204 - DNA, 762 bp, Diabrotica virgifera
  SmartBlast Evalue=8E-48; Info=RNA-directed DNA polymerase from mobile element jockey n=1 Tax=Drosophila funebris RepID=RTJK_ DROFU
ggcatgtgttgtggcggtttgtaaacgttatttgagatgattttgttttatttacttttgttcgccattttgtataccattcactgagtatgtccagatggtgtcgcaggtcttgtgaggcttgtatgtgatcttcatttactgctagtattgctacgtcatcagcaaaggaagcgatcgtagtattatgagactctggtatatcggctgtgtagagtgagaaacgcagcggcccgagaacactaccttgcggtactccggagttaataggacagaggctggattgttgttctttgaattttactgagaaatatctatttgataagtaggatttgattaggaggaaatagttactagatagtgctaattttactttgtaaagcagacctctgtgccaaactttgtcaaacgcttgtgagatatctaggaatacagcgttgcagtatttcttttcttcgagagtttttgatatttcatttactattcgatggacttgttgtgtagtagagtgattttcccgaaaaccaaactgatgttctggtagtaatgttaggaattcatgatctgcgtatattctttgtagcaccaatctttcaaaaactttgctaacgattgggagtaggctgatgggtccttatatttaaacaaattttaagggttgacaaaaaaataaaattttcagtgatctataaatagtacgctggcatataatggactaaagaaataaaaattattatataaaaaatacacagactactcaaa

SEQ ID NO: 5205 - DNA, 1086 bp, Diabrotica virgifera
  SmartBlast Evalue=1E-19; Info="Ankyrin repeat protein, putative n=1 Tax=Trichomonas vaginalis RepID=A2FMT6_TRIVA"
ttgagttacgcaatagttaaacgcccattagagtgcgttacgtagggggagagggggtaaaaaatcttcaaaaatcgcgttacgtaatacttgaacgctttctaagagggagggtccccgtaaggtgaaatgtaaataaaaatggtcaaaaacaaatggagccttaaattactttttttggtgcatttttttgctagtgcaaatttgtctagattttttatagttagagcctcccctattgtaaaactcacgagccgccactgcttctactaaatatagtagaacgtctaatgcaccatattcagcggctgtatgaacaagtctatacttatccttgttggaaatgcttagatttgccccttgctctttaacatacttcaaagctgtaagtgaattattagcagctgcgtagtgactgggtgtgtttccatagttatcacagaagtctacataaaaaaattatgttcatttttaagaaaatttagaacatcgacggcatcccccgcagctgcgaagtgcactaaagtctctccagggtggttacattgatttaaatcactcccaattgatttaagatatcttaaaacctcaactttattaaaaagagctgccagataagccgaaaattccccattatctgaagaaacgatattatccattttacaatcttctactaaatactgcaaaacctctaatgcgcctccttttgagccgctaaatgaacaggtgtacgtttatccttgctaaaaatgcttaggtttgccccttgctctttaagaaaccttatagctttaagtgcattatgataatctgcgcagtgactgggggtaaatccatcattatcacgtaagtctaaatttaaagaaacattacattcatctttaagaaaatttagaacgtcaaccgcatcaccttcagcagccaaatgcactaaagaccgtccttgactattacattgatttatatcacttccaactgatttaagatatcttaaaatctcaactttattagaaagagctgccaaatgagccggtaaattcccaatatttgtagaaacgttaatgtccattttacaatcttccacta

SEQ ID NO: 5206 - DNA, 566 bp, Diabrotica virgifera
  SmartBlast Evalue=4E-13; Info=Protein tyrosine kinase (Fragment) n=1 Tax=Codonosiga gracilis RepID=B3XVY4_9EUKA
gccccttgctctgtcagatacttcaaagctgtaagtgaattattagcaggtgcgtagtgactgggtgtgtttccatagttatcacagaagtctacataaaaaaattatgttcatttttatctgaagaaacgatattatccattttacaatcttctactaaatactgcaaaacctctaatgcgcctcttgagccgctaaatgaacaggtgtacgtttatccttgctaaaaatgcttaggtttgccccttgctctttaagaaaccttatagctttaagtgcattatgataatctgcgcagtgactgggggtaaatccatcattatcacgtaagtctaaatttaaagaaacattacattcatctttaagaaaatttagaacgtcaaccgcatcaccttcagcagccaaatgcactaaagaccgtccttgactattacattgatttatatcacttccaactgatttaagatatcttaaaatctcaactttattagaaagagctgccaaatgagccggtaaattcccaatatttgtagaaacgttaatgtccattttacaatcttccacta

SEQ ID NO: 5207 - DNA, 956 bp, Diabrotica virgifera
  SmartBlast Evalue=5E-55; Info=3-oxoacyl-[acyl-carrier-protein] reductase n=3 Tax=Culex quinquefasciatus RepID=B0WCC9_CULQU
tggatgtattaggtaatcgaaaacaagattatatttttttgattggtattcggaatagagataaataagtagctagacgtgtgactctgtttggttaaaaaatccgcgatggttctttctatggacagatgggtaggcaaagtagccattgttacaggggctagttctggaatagggacagcagttgcagaacttttggttgagaaaggacttttggtagtgggcgcagctagaagaaaagaaaatgtagacgctttagcacaaaaacttcaaggcaaaaaaggcaagctgtacgcagtgaaagcagacgtcaccaaagaagaagacatcaaagaactcttcaaatggacttcagcaaatgtaggtcctgtatctatcctaataaataatgctggatgccatcacaaaactggtctaataggtggtgatacaggagcatggagagccaccatcgatgttaaccttatagcattgtgtatagcaacaagagaggcaattgatattatgcaaaagaataatatcgatggatatattattcatattaacagcattgtcggtcacactgtacttaatgttcctaacgtaaatgtctatccagcaaccaaacatggaataactgctttaacggaaacattaagacacgaactaaatgcacggaaatccaaaataagagtcacgagtataagtcctggtgtagttgatactgaactaatatccgatatcaaaaaatccgatgcatttgccctcattaaaaacgcaatgttaaaatctgaagacatagctgatgctatttcatacgttctttccacaccactacatgtacagatccacgacattatcatcagacctcagggggaagttttttaaaatattcttaaagaagtatcaagctgcttggaatatctagtgtgaataatgtgaatatattgttatatgtgttaaatatttaataaacg

SEQ ID NO: 5208 - DNA, 707 bp, Diabrotica virgifera
  SmartBlast Evalue=3E-38; Info=3-oxoacyl-[acyl-carrier-protein] reductase n=3 Tax=Culex quinquefasciatus RepID=B0WCC9_CULQU
tggatgtattaggtaatcgaaaacaagattatatttttttgattggtattcggaatagagataaataagtagctagacgtgtgactctgtttggttaaaaaatccgcgatggttctttctatggacagatgggtaggcaaagtagccattgttacaggggctagttctggaatagggacagcagttgcagaacttttggttgagaaaggacttttggtagtgggcgcagctagaagaaaagaaaatgtagacgctttagcacaaaaacttcaaggcaaaaaaggcaagctgtacgcagtgaaagcagacgtcaccaaagaagaagacatcaaagaactcttcaaatggacttcagcaaatgtaggtcctgtatcaatcctagtaaataatgctggatgccatcacaaaactggtctaataggtggtgatacagcagcatggagagccactatcgatgttaaccttatagcgttgtgtatagcaacaagagaggcaattgatattatgcaaaagaataatatcgatggatatattattcatattaacagcattgtcggtcacactgtacttaatattcctaacgtaaatgtctatccagcaaccaaacatggaataactgctttaacggaaacattaagacacgaactaaatgcacggaaatccaaaataagagtcacggttcacgagttaacaatcaagccagtggg

SEQ ID NO: 5209 - DNA, 847 bp, Diabrotica virgifera
  SmartBlast Evalue=6E-19; Info=Glycerol-3-phosphate acyltransferase n=1 Tax=Aedes aegypti RepID=Q173M5_AEDAE
tgttaagaagcaaggaagcagtttgttaacaaacccatgatgtaaacttaagtaaaaagtctgatagtgtcgatctcatatcaaccagcaacttcttcgcgcgctgctggttgtttttcaacagcttttggtaaaactcttcatcgctgttgctggcatcgtggaactgctgaatagttgccttgtcgatggcttctttaagtcgggcatcttctaatactagatctgccacctgaggatatttatatgtcttgatttgggacacttgatacaagtgagaaaaagtttttcggataaacccgctgctgattggtaactggtagtccaagatgtttcttaaagctaagatttcggttgttttgtttactaatgattccctactagttaatgtacaattttgacagctaagtcccataaatggtcttcttttgcctgcttgcacatctggcacattgtccttgctgtcgaatagttggttttctgcagcctgttgatcagcctctctcgttaatgttctcttgaatttttggtctctagaaaacgttctcataatcgtcgacgttgccacagattggttgtgattgttattcgacggagaaaatttgttgtatgtgtcaaagacacggtttgtcactatgtccaccattttgttaactccttgtagaagtataataaaataagtgaactgtaacaccaagaacaactgaaacgatccatagagaacatcaaagaatccgtatttcagaaaagccagcgatgtggctagtgccagattgatcccgactatcgatataagcatttctaatattttctacaacgtacctagcacacttcaacatttataact

SEQ ID NO: 5210 - DNA, 806 bp, Diabrotica virgifera
  SmartBlast Evalue=7E-19; Info=Glycerol-3-phosphate acyltransferase n=1 Tax=Aedes aegypti RepID=Q173M5_AEDAE
tgttaagaagcaaggaagcagtttgttaacaaacccatgatgtaaacttaagtaaaaagtctgatagtgtcgatctcatatcaaccagcaacttcttcgcgcgctgctggttgtttttcaacagcttttggtaaaactcttcatcgctgttgctggcatcgtggaactgctgaatagttgccttgtcgatggcttctttaagtcgggcatcttctaatactagatctgccacctgaggatatttatatgtcttgatttgggacacttgatacaagtgagaaaaagtttttcggataaacccgctgctgattggtaactggtagtccaagatgtttcttaaagctaagatttcggttgttttgtttactaatgattccctactagttaatgtacaattttgacagctaagtcccataaatggtcttcttttgcctgcttgcacatctggcacattgtccttgctgtcgaatagttggttttctgcagcctgttgatcagcctctctcgttaatgttctcttgaatttttggtctctagaaaacgttctcataatcgtcgacgttgccacagattggttgtgattgttattcgacggagaaaatttgttgtatgtgtcaaagacacggtttgtcactatgtccaccattttgttaactccttgtaagaccttcggaaaataatccaggaaagacccaatacaaaatacccacgaaaatagttaactccaacatagtttccatagtccaagaagcaacgaaaacactattcaaatacaccattttcccaatagtcactataaaatctct

SEQ ID NO: 5211 - DNA, 929 bp, Diabrotica virgifera
  SmartBlast Evalue=8E-31; Info=Nucleoplasmin isoform 1-like protein n=1 Tax=Maconellicoccus hirsutus RepID=A2I421_MACHI
ccattacaaactgaactcaacaacctcttttcatcttcgacccgtttgccggcgttagcttgtaaaacatttctgttaaaatcacgaaccatccgttaaaagaaatggcagatgaatatttttttgctttaaccctcaaaggtaaaaacagtgaaatctgggatccagaagcgaagggagcagaggattaccaagggggacacaaattgatcattaaacaagctttgttgggacccgaagcccaagaaggtgaagtaaatgttgtacaagtagaagctatgacgtggaaagactcagttaaaatcccaattgccacactaaaagccggaggcccaaataaccaagtattgttagatctgtcattcccagacccaccagtcacattttcacttatacaaggtaatggaccagttcacattgtaggccatcatttaattggtagtccgatggaagaattcgatgaaatggatgaattagaagaggaaatgttggatgatgaagaaggggaagaaggagccgaggaagatgaggatgaagatgaacccaaagccaaaaaagcaaaatcagcgactaacgccaagggcaaaactcccgtaaaaaacaattcaaaggctgcaaagaaataaacaagttcatctaatccccaaaccacctcctttgtaatgttaagttagttttttaatgtatctcgggagttgttatacatccattaacagatcaaccgtaacaatttctcttaaatataagtataatattttatgtttcttgacgtcataagattttgtgaaagtttcttttattccaggtgtaactcttagttttaatgtgatcaatatttttaagctggaaacgtatttatttcctttgaaatcatccaattttgttgtaaatatgcagccctcattaaaccattttttgtagtaaaaaaa

SEQ ID NO: 5212 - DNA, 725 bp, Diabrotica virgifera
  SmartBlast Evalue=5E-31; Info=Nucleoplasmin isoform 1-like protein n=1 Tax=Maconellicoccus hirsutus RepID=A2I421_MACHI
ccattacaaactgaactcaacaacctcttttcatcttcgacccgtttgccggcgttagcttgtaaaacatttctgttaaaatcacgaaccatccgttaaaagaaatggcagatgaatatttttttgctttaaccctcaaaggtaaaaacagtgaaatctgggatccagaagcgaagggagcagaggattaccaagggggacacaaattgatcattaaacaagctttgttgggacccgaagcccaagaaggtgaagtaaatgttgtacaagtagaagctatgacgtggaaagactcagttaaaatcccaattgccacactaaaagccggaggcccaaataaccaagtattgttagatctgtcattcccagacccaccagtcacattttcacttatacaaggtaatggaccagttcacattgtaggccatcatttaattggtagtccgatggaagaattcgatgaaatggatgaattagaagaggaaatgttggatgatgaagaaggggaagaaggagccgcgaacataaaaaaacggaaatcgaatggaaaagtaaaggtgtgacttgagccccaatccctctagaaccaatatttttttatatttcaggaggaagatgaggatgaagatgaacccaaagccaaaaaagcaaaatcagcgactaacgccaagggcaaaactcccgtaaaaaacaattcaaaggctgcaaagaaataaacaagttca

SEQ ID NO: 5213 - DNA, 1038 bp, Diabrotica virgifera
attggcccttaaaggtacgattccgaaagaggctgcagactgcagaccgcaaaccgcagactgcagcgacagtgtcgtctgctgtcagaccaattccgagcagaactgcatctaatatcgacaacagcattgcgcgatgcgaagtcataatagtatagaattaaaagtcgtgtaagtaagaagtcagacatactaaacgacaatgagttaattttatttttctgtggtctcagggtaaaagttcgtaagtcagaaatcatcgtattgagattctatttgagaaatcgcaagatttgacttatattattatttccgccgtatattctgtatactttaatctttgtattcaaaatgaccaaaacttgactgaagaacttttgccctgagaccacagatttgttgatggaagaagatcacaatgattttttgattttgcgttataaaagaaaaataaagtcgactagggctgtatttaaaaatagacgatttaaaggaaattattcaatagtcattaaaaatcatccaatggccaatgaagttgtgaaaaactcatttggaaccagcaaacatatgtgttatcactttacggtcggcaacactactggttctggagcagtactgcggctgtactcgacatacagctcataggaaaccatatgatgcaacgttacaaacgtcacatctttgatattttatttttaaataattattctactttattttcttaaactaataattttcttctatgtgtttaaaagttttcttcgttaaaaactctttgtcgccctcttttattatcctctatttaatatatctcttttcatctaaaatctaaatcatcatactgaacgtaccccgtgtattcttactctgtaaatatctgttttaatacggaacatgcctacctttctacagttcacgctgtcatttcaattctcaaaataggtggtggtaatcttataaaaggcaattacagagctgataatagctatctatttgcagacttattattctcttggggtgagttttgttctaagc

SEQ ID NO: 5214 - DNA, 587 bp, Diabrotica virgifera
attggcccttaaaggtacgattccgaaagaggctgcagactgcagaccgcaaaccgcagactgcagcgacagtgtcgtctgctgtcagaccaattccgagcagaactgcacttcatctacataatatcgacaacagcattgcacgatgggaatttataatagtataatattaaaagtcgtataagtaggatgtcagacgcaatgaacaacgatgaattaatgttatatcttttgatggaagaagaagatgaggacgatcttttacttttgcattataaaagaaaaaggaagtcaattaggtctctgtttaaaaatagacaatttgcaggaagcttgcgtcggagataactgaatattttgctacaaaattaattaaatgctcttcttcttcatttgaaatactcattttcaaaagaattcaattcttttcacttttcagtcaatttggaaacaccaaaaatacatgttgtcgctctgcggtcggcgacactactggttctattctggtgcagtactgcggtctgcgtgcagtggcgatgttctgcgtgcggcggcgacagtgccgctctactcgacatacagctcat

SEQ ID NO: 5215 - DNA, 1128 bp, Diabrotica virgifera
tgttgggattatattatagcttaacacctttgtaatttaatgttaatgtcctttattcatatttatatcattatatccatgtttacttacacgttttttttcttgaaccttgtttatttcataaaaactttgcagtgtatattttgacctttctgtcatgcttataatccggactttaatcataatcaatattgattaagaaagaaatttgttaatgtaaaattatattccatctctgagagatgggatatagaacatattgggaagctgtttgaagacgaaagaacagaaactcaatatcgacctgatgaaaggtaatctttgacgagatggaaatggttatcaaactagtaaaggatatgaaagcaaccagaccgaccatacaaaattcctaacgaagtagttaaattgatgatgccgtggatatagtgatttaatgagtcatgtattgaacattttcttaagaatactgcactctaatagaatttacaatagtttgatttaaaaaaatttgccaccaaataagtatttcagtttctagatcatggagctcatgtagagatatagtatcttcgtgtgttttatcgacttcaataaggcctttgtctgggtcaataacggcaaaataatgtatgtctggcaacagattcctaccagttaaagaaaaatctctgactgtcaggctaaaattagaacatttataatccagaagtcgtgtgcgtcgatatgacgaacatgtcagttaatagaccagggcgcatctgtaaaaatattagtacatttggatgttgagaggtgacttatatttttttgcagaaatcgcttgaaaatatctcatataacaatacttcagccatcctcccactcaaaagggttaataaagagactattaagactgtgtgttccttaagacattcatgcggtatattcgctgttggtatacaaatttatataaatcataaattgctacagacaaaatttcaataatagagaaaaggatagaagtacatgtatgcaattccatataaattgacgaagcatagaatatttgagaatatcaactactacccaagaaaatttatgacaatgcgtaattgtgattattatatgattatatcattttttctt

SEQ ID NO: 5216 - DNA, 506 bp, Diabrotica virgifera
gtggaaatgatcaatagtgcaacaattagagattcttttaactttaggcatctccacctatcttcctcatcactgaggttcaaaaccatttgatgattatttacgtatcgactctaatttataatagaccagggcgcatctgtaaaaatattagtacatttggatgttgagaggtgacttatatttttttgcagaaatcgcttgaaaatatctcatataacaatacttcagccatcctcccactcaaaagggttaataaagagactattaagactgtgtgttccttaagacattcatgcggtatattcgctgttggtatacaaatttatataaatcataaattgctacagacaaaatttcaataatagagaaaaggatagaagtacatgtatgcaattccatataaattgacgaagcatagaatatttgagaatatcaactactacccaagaaaatttatgacaatgcgtaattgtgattattatatgattatatcattttttctt

SEQ ID NO: 5217 - DNA, 1312 bp, Diabrotica virgifera
tatactttgacaagaaatgattttacaaattcataaactattgcaagacatcccgaacactcttcatcatacataccattccaaacagacaacgttcatacccacaaaaaaccaagctcctatatattttttaaattgccattagtatagtatgttaactgaacaaatacgcaaagaaagcaagatttgcatttgcacgttctctctttctttctcgttcaaggcaatttcccgccattcttagagtgacaagaaatttccatgcagggactttcatacattcgggccaattactttagacaagaatattttatgtcattgcaatccaggaaattattattcacaagctaatatatatttactcaaataatttattatacagtacttaaaaacaacaactgtgtaaccacaaaatataaacaatttaaaatatataactattagtatatcaaatgcaggttcgtataaatatagaggcacatatgaggcgtataaatgcaaaactcgctttttgcaaaaaataccaaatatgacttgattgtagtttaaaattcattcaccaacgtacatttagaaaacttaccaaatatttgcaaaactgtctccttaccggctattttgtgacgtaaaaatcagataaatatgcaaagctctctttttataccgttaaagaaacatttttattgattatctcacaagagtatagcttccataaggcgagttttgcatttacacacctcatatacactatgttcgcgctcctcttgcgctccgcgctcctgcaactgctccacatagtggatacgtacgcgctaccggatcgtgcaacggtgcgcgttcttcttcagcgcgccaatcggtgtcggtttatacacttctccaagaaattaaagcaccaacctaaaaattaatcacctttgatgtctcgaattccctaaacctgttgtccaatttaagtgattttttaaatatgttatagtcttattccttaacaatatcgctgcaataatactgctgctaaacaggcaaactgtcactgtacaccgggtgcaccaatcaaactgtaattttttctaaaagttcgcgtcaccctgtggaacataccagcatttataaaacactgcaattaaaacccaaccatagtctcatgccttcttaacattccgttccttgatccattcgcccatgttgaacaataaaaaagcttaggtacttcaacaactggccctgtttttcatcaatacagggcgctttcaaataagtatagcaaactccaaagggcaattctgcatgaaaaacaatgacagtttgc

SEQ ID NO: 5218 - DNA, 312 bp, Diabrotica virgifera
tcgctgtaataatattgttaaacaggcaaattgtcactgcatactgggtgtaccaatcaaactgtaaccccttctaaaagctcgcgtcaccctgaggaatataccagcatccataaaacactgcaattaaaacccaaccatagtctcatgccttcttaacattccgttccttgatccattcgcccatgttgaacaataaaaaagcttaggcacttcaacaactggccctgtttttcatcaatacagggcgctttcaaataagtatagcaaactccaaagggcaattctgcatgaaaaacaatgacagtttgc

SEQ ID NO: 5219 - DNA, 843 bp, Diabrotica virgifera
aacattaatatcaatagtacaacttacgcaatttgaaaaaggtggtttaaaaggttttttaaaatttaatttaaactgtattattgcatttttaacacgtttgtagaaaaaaaactattaaaatttgttagaatatacaacaaataaaagtaagatgttattctatagttgttatgatttacgtattgacagtataggcagttttgatgtaatgtcaagaaaaatataaaaatggaatgtcagtcaagttcaagtaaaagtttttgtagatattgtccctgtaattgagaatgaataaattataattgttgatatataagacgtttgtagaaaaaatattgtatgatatacgtgttaaaaagtacatttttaaggcactcatgtgaattgcagaattcgcttcgctcattctgcaaactttcatgtgcgtgccttaaaattgtacttttaacacttatatcataaataactattagactaatagtattatttatgaataggagagtttaatggacttgaataatgcgatttccacaaactttgtatttgagtgacattaaattttccgtaagatgtgtggggtgtctttcaaaaagtgtcgatctttctagtaaaaatgctgaacaataaattaaactagaataaaattactaattaatcattgaaccgatcgtaaagaaaaaacatctaatgtgtttatagggacaacataatacataagatatgcagtagatgttaacataggttgacagcaacgaactaaatggctttttatttcagtttgtgaatgtttttggataattagttacttgcataatcgcgtaaattattcattaatttaat

SEQ ID NO: 5220 - DNA, 779 bp, Diabrotica virgifera
aacattaatatcaatagtacaacttacgcaatttgaaaaaggtggtttaaaaggttttttaaaatttaatttaaactgtattattgcatttttaacacgtttgtagaaaaaaaactattaaaatttgttagaatatacaacaaataaaagtaagatgttattctatagttgttatgatttacgtattgacagtataggcagttttgatgtaatgtcaagaaaaatataaaaatggaatgtcagtcaagttcaagtaaaagtttttgtagatattgtccctgtaattgagaatgaataaattataagtgttgatatataagacgtttgtagaaaaaatattgtatgatatacgtgttaaaaagtacatttttaaggcactcatgtgaattgcagaatgagcgaagcgaatctttcacatacgtgccttcaaaattgtgcttttaacatctatatcataaataactattattataatttttgtgtatttggacttgtctacctcgggaataagataataagtaataattaaagtattttataattcacttcgtatgtttgtcacgtcactatgtctgacaaatcttgtagcccgtataaacaaaagggtatagctcagtggtagagcgttgggctggagatcaagaggtctccggttcaaatccttgtgttttctaatcttttttttaattttttgtattgttttaataaaaatttttggaaaagtagtaagtaaaaattaatttaatctttaaataaaatacgaaagtatatttatttca

SEQ ID NO: 5221 - DNA, 994 bp, Diabrotica virgifera
cagaattagaaaaaatgtaaaatacaaaagtcattggagtttccaaccatgattccctgacatatatatcgtactagtgacgtcatccatctgggcgcgatgacgcaatcgatgatttttttacataagatcattatttatacagggtgtccaaactttttccaattattaattaaacaattaatttaattaaaaaatttttttggacaccctgtataattaatcatgttatgtttatattactgaatagggaattaaataacctttcaaatgagctagcactcgacccctattaccatttaaaaaaatagtcgattacacgtcatcacgcccaaatggatgacgtcaccagtacgatatatatgtcaaaaaatcataattcaaaaatcgaacaacccttgtattctacatttccttctaattctgtatataaaatatagtgaataaccctgtaccaatgtttatatagggagatagttggtcagcccaataggaaaatttgtttgattcaaattgagacagtcaccagatgtccccacaatttttgtcagggtcgcaacgtcaaaatgcgtagacaccaagctggacacgatcccattcataacaccccaactcgcatacatattaagaaaaataaatatatggaagaatatatttagaaattgaattaatgatatcatgctactataattatacatataattaattacattagtctcaattagaataaaacaaatgtgttcattgcgttgaataactattcttttttaaacaatgataatagtaggaatactgaatagcatcaataaatataggattgttgaaacgttaatgttaagcataacaaaaggcatttttagttttacagtatttattcctcaattgaaataaacaaaaactagattatcttcttctctaggtctcttctaaagtataatttaccaataattgaagattgtaaacgtaattcgtttttgttctttaaatttataac

SEQ ID NO: 5222 - DNA, 621 bp, Diabrotica virgifera
cagaattagaaaaaatgtaaaatacaaaagtcattggagtttccaaccatgattccctgacatatatatcgtactagtgacgtcatccatctgggcgcgatgacgcaatcgatgatttttttacataagatcattatttatacagggtgtccaaactttttccaattattaattaaacaattaatttaattaaaaaatttttttggacaccctgtataattaatcatgttatgtttatattactgaatagggaattaaataacctttcaaatgagctagcactcgacccctattaccatttaaaaaaatagtcgattacacgtcatcacgcccaaatggatgacgtcaccagtacgatatatatgtcaaaaaatcataattcaaaaatcgaacaacccttgtattctacatttccttctaattctgtatataaaatatagtgaataaccctgtaccaatgtttatatagggagatggttggtcggcccaatgggggaatttgtttgattccgtaggcaccgggttggatgctattctattcataacaccccaactcgcatacatgttgggaaggatagatatatatggaagagtatatttggaaattgaattaatatcatg

SEQ ID NO: 5223 - DNA, 889 bp, Diabrotica virgifera
  SmartBlast Evalue=4E-35; Info=Endonuclease-reverse transcriptase n=1 Tax=Bombyx mori RepID=D5LB38_BOMMO
ggtcatgctgatcaaaagttctcagaaaagaaacgatagcaactgaacaattcatccagtgaagcgggacgaagaaaaatctttattgggctaagataatgacaaattaaaggaaacatcctgtgtttctaacatttaatgtgcctgtccagcattcagtcttacatgattctaagctgatcttattgcggttttatagaattttcccctcagtttcattggaatctttctaccacacaacacattacgggctttcttccacttcagtccattataattctactgcaagcatttctatacatttccccattacatgaaataacttcttcttcttgcagtaccgtctcctatcggaggttggctaccatcacagcaatcttaactttgttggctgcagctctgaacaactgtattgaactgcacccataccactcccttaaatttcgcaaccaggaaatcctcctacgtcccacatttctctttcccgagatttttccttggattatgagtcttagcagagagtacttttctcctctcattatgtggcctagatattccagttttctcgtttgtatggtttttatgacttcgcattccttccccatcttcagcaaaacatcttgatttgttactctttctgtccatggtattttccacattctcctgtagcaccacatctcgaatgcctcaatgtttttgatgtttatctttttcagtgtccaagcttccatgccgtacagcagaacggagaaacatagcaccttaacattctcgttcttaagtttatatttatgtcccggctgcataggaactttttcattttgacaaacgattgtctcgctatctcaattcgcctcttgatttctcttgtctggtcattagtatcagt

SEQ ID NO: 5224 - DNA, 714 bp, Diabrotica virgifera
  SmartBlast Evalue=2E-35; Info=Endonuclease-reverse transcriptase n=1 Tax=Bombyx mori RepID=D5LB38_BOMMO
gttaagaaaatctgaggttttagttggatttaatttcaatattttataactttgagaaaaaaacacagtatgattggtacacccggtatataatgacaatttacctgtctagcaacaatattattacagcgatattgttaaaaaataaggcttcttcttgcagtaccgtctcctatcggaggttggctaccatcacagcaatcttaactttgttggctgcagctctgaacaactgtattgaactgcacccataccactcccttaaatttcgcaaccaggaaatcctcctacgtcccacatttctctttcccgagatttttccttggattatgagtcttagcagagagtacttttctcctctcattatgtggcctagatattccagttttctcgtttgtatggtttttatgacttcgcattccttccccatcttcagcaaaacatcttgatttgttactctttctgtccatggtattttccacattctcctgtagcaccacatctcgaatgcctcaatgtttttgatgtttatctttttcagtgtccaagcttccatgccgtacagcagaacggagaaacatagcaccttaacattctcgttcttaagtttatatttatgtcccggctgcataggaactttttcattttgacaaacgattgtctcgctatctcaattcgcctcttgatttctcttgtctggtcattagtatcagt

SEQ ID NO: 5225 - DNA, 1011 bp, Diabrotica virgifera
  SmartBlast Evalue=1E-122; Info=Putative eukaryotic translation initiation factor 3 subunit n=2 Tax=Formicidae RepID=E2BKC5_ 9HYME
gccggctttgtttaacaaatccaaatactttgcatgtgtcagaacagtttttccaaaatcaatggatccgtacaccaccgactgttcctgttctctttctaaaattcccggaataattgactgtgctgtcactctgtagcctctatagtcaattacgaccgttccaagtgtgtaaagaccaggcaaatctactgcgctgtagacacgtactccttgtagatcatttctcggagcaacaaaagcagcagcatcgcctcctaactccttataatggtctcttacgtcaaatccaagcgaaaagaatatattattccaaataaacatctgcattttagcttcttcccctggattgatggccattacatttccgtctatgacagccatagcacctctggtagcagcggcaacaaaatcactgtgcactttaaaatagcacgttctcgtagaagtctttcaggcaaggttttcttggaagttcgcggttgtttggagttcttcgttccagtctctcgtttggcctggaatgtgttcctcgtatcccaattttgaagaaaatgtgtcttctgccctgatggcgtccaaagtatgatccatagtgggggcagtccaggcatataactgataaggagtggctaccctttcaaaaggatgtcgctgacttctttttttctgaagcgttgcaaagtttcttttgaactgtggcgaaatctggttaagaagttctatcagtgagtggcacaaatgactaagaaaagcaaaagcacgatgaaaatgtcaaagccatagaagaaaccaaaaaggatgatgccagtaaagataataaagaaaccgaagaaataactaaagataatgatacagaaaaggacaattctgaagagaagaaaagtcaattagaagatgcagaagctaagaaaattgttgaaagtataacggatggtagcaaacttgagctagaagaaagcaccaaaaacatagtgaaaactgcttccatggctgtaggatctctcaagg

SEQ ID NO: 5226 - DNA, 595 bp, Diabrotica virgifera
  SmartBlast Evalue=1E-61; Info="Eukaryotic translation initiation factor 3 subunit, putative n=1 Tax=Pediculus humanus corporis RepID=E0VTU9_PEDHC"
caattgaagatacttccacatcatgttataaatgaaaagggtgaatctgtagagttatgttcaagtgtggaatgtaaaggtattatcgggaatgatggaagatattatattttagatttgttgaggacttttccgccagatgtcaatttcttaaaattggaaggagaagagttgagtcgcgatgttaacctgtttggattcccaattgaacataaacataaactttgttgtttgaggcaggaactcatcgacagctttgtggattcgcgctatatgatgttcattaagtatgcagcctatcatttgcaacagttgaatttgaaaaagaccgaagaaaagcaaaagcacgatgaaaatgtcaaagccatagaagaaaccaaaaaggatgatgccagtaaagataataaagaaaccgaagaaataactaaagataatgatacagaaaaggacaattctgaagagaagaaaagtcaattagaagatgcagaagctaagaaaattgttgaaagtataacggatggtagcaaacttgagctagaagaaagcaccaaaaacatagtgaaaactgcttccatggctgtaggatctctcaagg

SEQ ID NO: 5227 - DNA, 801 bp, Diabrotica virgifera
  SmartBlast Evalue=3E-15; Info=Peritrophic matrix protein 9 n=1 Tax=Tribolium castaneum RepID=D1MAJ7_TRICA
gtcgagacggaaaaaaccacttatagttacaattaagctcgtagataaataatataaaaaatctttttaaatatccatataaaaagggcgtcttgatgaagcttttatacattagtcttgacaagtagtgataaactgatacatacaatgcactctgcaggtttattatttatcgccatactgtttgttggtagcaccacagcacgtgatcctgattgcgataaacaccaatactggcccgatgtacacgactgctcaaagtaccttgaatgtaatcctaagggcgaaaagattgaaatgagttgcccagcaggtctttggtggaatcccctgttaacgacttgtgataacccagaaaacgttgattgtaaaccggtaccaaatcaaagtcttggatgtacggaaggagaatattttccagacacaaccaattgtcaagcattttacgaatgtattaacggagcaaaacaacatcaattatgtcccgatcctctcttgtggaatgttcatctacctggatgtactactagttctgactgttcgcaagtcgttccaacacctactacttgcactgaaggagacctgacaggtgacgttgatgactgtcatagattcttcatctgtcaaaatgacaaatgggtaggacctctccaatgcccaaacgatctctactggagtgaaaaagccaaagggtgtgtcgatattaaggattctgactgccaaaaataaaacaaaatatattatctaaataattatattaatattgtacgtttcacaaagaaataaattttaatattatat

SEQ ID NO: 5228 - DNA, 802 bp, Diabrotica virgifera
  SmartBlast Evalue=8E-15; Info=Peritrophic matrix protein 5-A n= 1 Tax=Tribolium castaneum RepID=D1MAJ5_TRICA
tgtcgagacggaaagaaccacttatagttacaattaagctcgtagataaataatataaaaaatctttttagatttccatataaaaagggcgtcttgatgaagtttttatacattagtcttgacaagtagtgataaactgatacatacaatgcactctgcagatttattatttatcgccgtactgtttgttggtagcaccacagcacgtgatcctgattgcgataaacaccaatattggcctgatgtacacgactgctcaaagtatcttgaatgtaatcctaagggcgaaaagattgaaatgagttgcccagcaggtctttggtggaatcccctgttaacgacttgtgataacccagaaaacgttgattgtaaaccggtaccaaataaaagtcttggatgtacggaaggagaatattttccagacacatccaattgtcaagcattttacgaatgtattaacggagcaaaacaacgtcaattatgcccggatcctctcttgtggaatgttcatctacctggatgtactactagttctgactgttcgcaagtcgttccaacacctactacttgcactgaaggagacctgacaggtgacgttgatgactgtcatagattcttcatctgtcaaaatgacaaatgggtaggacctctccaatgcccaaacgatctctactggagtgaaaaagccaaagggtgtgtcgatattaaggattctgactgccaaaaataaaacaaaatatattatctaaataattatattaatattgtacgtttcacaaagaaataaattttaatattatat

SEQ ID NO: 5229 - DNA, 921 bp, Diabrotica virgifera
  SmartBlast Evalue=1E-61; Info=Muscle M-line assembly protein unc-89 n=1 Tax=Harpegnathos saltator RepID=E2B5C2_9HYME
ttggaacaccagagctagagagtcttcatcatcgcccataagaaccttaaaacgttcctcgggctcgaagggttgaccatccttcttccagtggaatactggtttttctcctgctgggaggatttcaccttctggcatttcttcgaaaatctttttgttatctgtgactgttaagttagcttcagaagaagcttctccgtgtttgttggtagccacacacttgtagacaccagcatcttctttctttacaactggaatcactaattcgtaaaatccaatgtgggccttttctttaataatttggtatctttctgagttttctgggattttcttcccttgcttgaaaaaggcaatgtctggatgaggttctccagcaacttttaccatgaagcgaagatatgtttcctctaacagttctgcgtttttcatagataccaaaaattctggtttatcagtgctgctcttcgcagctctttcttcggtcgttagttcaatgcaccacaagctgcgcagagcaagttgattcccctttttcgtttttagctacagctatgtacatgccactgtcttccttagttgtttccttgattgacagtttacactcgtgagttttttcattatacgagacctggattcttgaatctgcgttgctaatcggcttgttgtttttcagccaagcgaaagaggcaggtttggagctgagagttattccaaattgtgcagtttcgccaggttcaatgctggtaccacgaatagtttgaataaatttgggtcgtccatccaccagttcttctaatttttcttccgcagacttctcgtgaatgcttgtagcttcaacagatgtcgttttgcttacctcttttcttttctgacttggtttctgcctattttagaactttccttagtagtacttctctgatg

SEQ ID NO: 5230 - DNA, 677 bp, Diabrotica virgifera
  SmartBlast Evalue=1E-45; Info="Unc-89, isoform B n=4 Tax= melanogaster subgroup RepID=Q59E65_DROME"
ttggaacaccagagctagagagtcttcatcatcgcccataagaaccttaaaacgttcctcgggctcgaagggttgaccatccttcttccagtggaatactggtttttctcctgctgggaggatttcaccttctggcatttcttcgaaaatctttttgttatctgtgactgttaagttagcttcagaagaagcttctccgtgtttgttggtagccacacacttgtagacaccagcatcttctttctttacaactggaatcactaattcgtaaaatccaatgtgggccttttctttaataatttggtatctttctgagttttctgggattttcttcccttgcttgaaaaaggcaatgtctggatgaggttctccagcaacttttaccatgaagcgaagatatgtttcctctaacagttctgcgtttttcatagataccaaaaattctggtttatcagtgctgctcttcgcagctctttcttcggtcgttagttcaatgctggtaccacgaatagtttgaataaatttgggtcgtccatccaccagttcttctaatttttcttccgcagacttctcgtgaatgcttgtagcttcaacagatgtcgttttgcttacctcttttcttttctgacttggtttctgcctattttagaactttccttagtagtacttctctgatg

SEQ ID NO: 5231 - DNA, 1353 bp, Diabrotica virgifera
agttatacccgtttgaagttataattttcttgaaaatattgtacattcatttgttatagagtttcaggcaagtttgagctgtgaccatttatactttgatgaacaataatgatagaaagactcagaaggaacaatttgagcttgcgaagctgttcgtaagtttatttttggctaagatgtcgatattttaatggcgcgctatgaggcgcaagattggctcacagcgtaaaggttcacgcgctaagatctcgatgcaaattataatttctatgtatatatacgttatcttcatttttcatttttgaagatcctaataaaattttatcatatacttcttataattaaatcatcatactgtatctcgtttcacctttcattctatttaatttgtcttctattttttgtactaaatgagaaaaaaaaacacattaaaaactaatatttcagaaatataactaaaaagtgagttgatattatttattattactatttttacaaacattttctttcatacatctgcatcgagatatacagggaatctcagcttttttacatctgcatacattcttcaagcaatttttacagacacatggtggtattaaatctgattttgaaggcattaaaattaaaactttttggggcttcagagtttcattatctataagatatccatatacaagtggatcaagttcttttgcagaatcttcgaggcacgttaattgtgtgtacaccacatacaatgctcgttttatatgtaagtagattgagtttgatgttggtggcatatctttaacaagagaaatgcctccttcaacaaaagaaaacaagagaaaaatctttacgaatatttgctgtttcaattatacgtgcacaaccgttctcagtagaagacactttgatgttgatatttttttgacatataatacataatttattattaactaaattattcattattgcaacgaatcaatatcacattacactattaagagacaatgactttgttgtaacaaatagacagaattgacagtagtatattatattattgtagacattgatagacatattaagaatagtcaaggcttcctgagcaaaatagtgtaacacgagaggagttgatcggtatatttaccatgatatttattacttgactgtgagttgatcttgagcctcagagcgtgctattatattatcaatatcttggccaaaaataaacctactaacactttcctaaactcaaaatacaccttcttagttttctattctattattagttttaatcaaagtgtaaatgtttattgctcaaattgactaaaaacccttatacaaaaattaatgtacaaattatttaag

SEQ ID NO: 5232 - DNA, 219 bp, Diabrotica virgifera
agttatacccgtttgaagttataattttcttgaaaatattgtacattcatttgttatagagtttcaggcaagtttgagctgtgaccatttatactttgatgaacaataatgatacaaaagctcaagaggaacaatttgaggttatgaaagtgttcgtaagtttgtttttggccgggatgtcgatgttttaatggcgcgcgctatgaggcgcaagatcgg

SEQ ID NO: 5233 - DNA, 813 bp, Diabrotica virgifera
  SmartBlast Evalue=1E-30; Info=Endonuclease-reverse transcriptase n=1 Tax=Bombyx mori RepID=D7F170_BOMMO
aacattgcaaacaaggatatacatttcttgttctgtggatcaacagttttttaatattaaggataacaaatttaaagatataaaatttttatactgagttttagacaaatctagaaaatgtgccataaattgagctaaaatatcaatgatttatctaaaaatcttctggtacatttatataatgactccttgtttatcaataccagataagagctttacttcaaattaatttgattcataatactttttaactcattcactaccagagtcttttgtatggtttttatattcagacaggcagtatattccagataggaaaaacttttcattcttttggccaagctagcatcatcatcatcaatggcgctacaactcttcgtgagtctttgccacgtttactattgccttccatgtttgtcggtcctgtgccactaattcccattgtcgcactcccattttctctagatcttctttgactgcatctttccacctttttctaggccgccctacagaccttcttccatctggcctttcccagaacacattgtttataaggcgattgtcgttactgcgtatcacatgccctgcccatctgagtctattggcctttatatatctgactagattttcttttccgaatagagactctagctcgttattgtatctgcgcctccattcgtttgtcacgctgtctctgcaagggccatatatcattcgaaggattttacgttcccacaccagcaatttatttacttcttttttttgttagcgtccatgtttcgcttccatacgcgactgctggtcgtattatgg

SEQ ID NO: 5234 - DNA, 762 bp, Diabrotica virgifera
aacattgcaaacaaggatatacatttcttgttctgtggatcaacagttttttaatattaaggataacaaatttaaagatataaaatttttatactgagttttagacaaatctagaaaatgtgccataaattgagctaaaatatcaatgatttatctaaaaatcttctggtacatttatataatgactccttgtttatcaataccagataagagctttacttcaaattaatttgattcataatactttttaactcattcactaccagagtcttttgtatggtttttatattcagacaggcagtatattccagataggaaaaacttttcattcttttggccaagctagcccattaagaaatttgtggaaatgtgtctctactgtggaaataaaaaaacttctcagtaatattgacctcgctggcaagtgtaaaagctactttctctgctgcattgactgaagcagcagtgaacaagttaatcagctgaaaggactttcacagaacccactcaactcttattttgacatcttataactaaaggatcatgtcaattacatgtcgatcagattagcaaagcggactgaggcgcacgattgacaaatctatagtggatatgcggtcgaggcgatcgaggttcgtgccccagcccggtgaatagaaaataaaaaggctgacgtcgtagtctaaaattctaaaagaatctacgacttggtctggaataagctggtgtctgattaacctatgaaggagcggtacgcaaggg

SEQ ID NO: 5235 - DNA, 894 bp, Diabrotica virgifera
taatgtggatgtccacactactcaaaaaatttggtttcggcctgaagggggacgcgtcacgagaaaaatcttatttctctggactattaaactcaattgacgttgtctgatcatattttcctcagtcgtcccaatgatctttcatttggcgatttgtctcttgctattcgtactacatattctattttctgtcattatctctatgtgttgattccattgtatttttcttcttttggtccacatgtttatttcctctatacgacatctcgctcgtatttcctcacttcttactctgtgttttagagtttagttggttatttttcgtaagacttcatttctgctgtttctagcagtctttttgttttcgctgtatctgctcttgtttcgctgtgtacgtcattatcggtgttattattgatttatatatcctggttttcgtttccgttgtgagatatttgtttctccagattgtgttgttgagacatctctgttcgccatgttgacagttttattcccaagtattccgtttccatcacttgttctattattttgttatttacgaccagtttagatcgtctcggatccgctgatatcaccatcgatttagttttctctgttgagatcaccatgttgtatatgagcgccgtgccttcgaatttagatagaagaaatatcctgatctcgttaatatttttatttttgaaatcgggatgtttcaagagaactgtagaattacaagtagccaaaaaaggattctaatgttcaaatttaacatctgtgtaaagctgtactttactgcattaaaacaagagaggccagtttcattttttgattaaaggttttgcttgacaattttaacaatatttcaactttacagatattattataccgtct

SEQ ID NO: 5236 - DNA, 689 bp, Diabrotica virgifera
gaattgtctgtactgcataatttattttgtacagaaccattaggtagcattttattattaattagagtttggtttgttatttttcgtaagactttcatttctgctgtttccagtttcaatcagctcttgtttccgctgtgtacgtcattatcgatcttattgttgatttatatatcctggtcttcgtttccgttgtgaggtatttgtttctccagattgtgttgttgagacatcctgctactctgttccccatgttcacttgtttttgtacttctgcttccacttttccatagcctgacagttttattcccaagtattccgtttccatcacttgttctattattttgttatttacgaccagtttagatcgtctcggatccgctgatatcaccatcgatttagttttctctgttgagatcaccatgttgtatatgagcgccgtgccttcgaatttagatagaagaaatatcctgatctcgttaatatttttatttttgaaatcgggatgtttcaagagaactgtagaattacaagtagccaaaaaaggattctaatgttcaaatttaacatctgtgtaaagctgtactttactgcattaaaacaagagaggccagtttcattttttgattaaaggttttgcttgacaattttaacaatatttcaactttacagatattattataccgtct

SEQ ID NO: 5237 - DNA, 823 bp, Diabrotica virgifera
  SmartBlast Evalue=5E-39; Info=Endonuclease-reverse transcriptase n=1 Tax=Bombyx mori RepID=D5LB38_BOMMO
cgactgttccaaggtatatatacgaatcaacgtgttgaattaattggttttttattttcaattgtctgacaggtttttgagttttgctgaccagcatccattttgtttatttatgttgaggttaagtcctctttgttcattcgctctttgtaccctctccataaaatactgaagttcatcgatactactggcaagtacaactctgtatcgtccgcatatcggatattagtgatcaattcttcattgatttttataccttcgtttgcttcatccagtgcttttttaaaaatttgttcggagtacatattaaaaaggagaggggagagaacattcctgtggaacatcttttctgatatcaatgctctttgtagacgaattgccaacttttaccctggctgtctgattccattagagacttgtcacaattcggatgtgtttatcatcaattcctatgttttgtagaatttcaattagttggtcatgtctcacattgtcaaagcccttcgagtaatctacaaagcacatgtagacatccttgttcatatctctacacctctgtacgaatacttacagacaaaacactgcctcccttgtgcccaatgcgttcctaaaaccaaattgtgactcgttgatttccgcttcacacttgttgtagattctgttgtatatgattttggttgaagacttggtgatatgattaattaggcttatcagtctatgttggtcgcacaatttagtgctttggttttttaggaatggccacgaaggttgattgtaaccaattttccggaattccgccgctgtctgtgctgttagccgtggc

SEQ ID NO: 5238 - DNA, 748 bp, Diabrotica virgifera
cgactgttccaaggtatatatacgaatcaacgtgttgaattaattggttttttattttcaattgtctgacaggtttttgagttttgctgaccagcatccattttgtttatttatgttgaggttaagtcctctttgttcattcgctctttgtaccctctccataaaatactgaagttcatcgatactactggcaagtacaactctgtatcgtccgcatatcggatattagtgatcaattcttcattgatttttataccttcgtttgcttcatccagtgcttttttaaaaatttgttcggagtacatattaaaaaggagaggggagagaacattcctgtcgcacaccttttctgatatcaatgctctctgtggacgcattgtagacttttacgcaaatcagtgttgctaaaccacgtgttgctactagacaactggactgtcgatataagattcattcggcgcgtttctatcgtccataagaaatacgtagccctatctctgcaacgttccgttcttaacgcgaagctgtctatagtgcggtacaaatttattttttactagcaataaaacaagtaaaaatgttacattactttattttgccaaatatttcttttggggttaacgtcagcccaataaacccgttacttaggaaaattaagagaactgaatgcatatgtcttttatgtagttaagtttatctttttatgtctcttggttggtgtttaattggaagttcacctcatccctcc

SEQ ID NO: 5239 - DNA, 1046 bp, Diabrotica virgifera
tatattcctgtacttatacataatatacataaatgttttctagagtatgtatagaagtaaatatctaaaaatataaacggaatacaaagatgtcctttcaaaacatggaaggtcttgaatattattattttgtaacaaaaaattaaaatgcacatttgacacagttataaattgtaaaacctttatatgcgcgtacaaattttattgggaaaaatcaaattgaaaattatgtgccaattaatttgatcgaacatacataccatgattcaaaatcagcttgcataaaatagattacaaaatgaaattattatccgactacacttcttcctttcatggaatatttctaattcctttaagttttgttcagagttgaatcgaatctttcctttatattttataaacataaaggtactttactcttcatcgaaatgcatatttgttgacaaacctcgtataagattgattaccttcagattagcaatgaaaaaacaaaagtaatgagagttgggacgctcctgagactgaaataaagagcagagtagtacaaaccggaaatgctttttgaaacttcgtaaatttctgactgatcgcaatttggtcttcaacctgagatacaagatgctaaagtgctacgcttggctcgttctcttaaacgaaatggaagcatggacgttaaagtccagatccattaacaaacttcaagtttttttaaatgtagtgtctgcgccgaatgcttagaatatgaaatgaaataaaaaacaaatgaaatgaaatgaataaggtagtgtggagaagttggtgttcacatatatttcgcagaacttgcttgcctgtcaaggtagtaagatttttcttcacaaaaaaaaactaataaggagggtcttcaatgttataacacaaagaaattttggtttaaacattttactagattctattcttttactaggttttattactttatttattgtatttagttgctcaatatactcctatagtaaatatgattattgcttaaattgtataaacacttgtgaattcataaattt

SEQ ID NO: 5240 - DNA, 528 bp, Diabrotica virgifera
ctgagaaataaagagcagagtagaacaagacagaaatgcttttttgaggcgtcgtaaatttctgactaatcgcaagtaggatttcaacctgagataggagatgctaaagtggtacgcttggcctgttctcttgtacagattggaagcatggacgttaaagtccagatccattaacaaacttcaagtttttttaaatgtagtgtctgcgccgaatgcttagaatatgaaatgaaataaaaaacaaatgaaatgaaatgaataaggtagtgtggagaagttggtgttcacatatatttcgcagaacttgcttgcctgtcaaggtagtaagatttttcttcacaaaaaaaaactaataaggagggtcttcaatgttataacacaaagaaattttggtttaaacattttactagattctattcttttactaggttttattactttatttattgtatttagttgctcaatatactcctatagtaaatatgattattgcttaaattgtataaacacttgtgaattcataaattt

SEQ ID NO: 5241 - DNA, 1042 bp, Diabrotica virgifera
  SmartBlast Evalue=2E-13; Info=Novel protein (Fragment) n=2 Tax= Danio rerio RepID=Q1LV84_DANRE
tctaaggagtttttaattatttttattctatttcaaaggagaaacttcacggatgcgaggccttagacagaacccctcattcaccgctcttacggtggttcatatcccaatgacttttcataaggcaaaatacaagtcaccacccgccccgctacccgctatagcccacaagtttagatggccacaagagcacaagttggatgtgatcttatggtgtgcacggcacacgtacctttaaattttgctttcgtgaagttcgaatttcggaacaatattaagaatagaaggagttgtggatgtaaatgttagcgtggaatatttaaaatcaattaaattttcttcattatatttagaagaaaaattaaaaatgccggaaccaaatttgttaattaaaaatgtaccaaagtgcaaaggtcgggattagaaatgattatttaaaatggagatttgtgtaaaaacttacaaattgtgtaggtgtgaagcacatatttggagaagaggaagcataatgaataaaatagaagatacgattttaactatccggcgcagtccacttaacaaaatttttgattaaaaataatttacaagatgatttttctgaaataatttgaatttttcaattacttgttacgatgccagtaacaactgcagaaacagaacgatgtctctctgcattgaaacgtatcaaaactttccttagaatagctatgggccaggatcgattaactgcactcgcaatgttttcaataaaaaaaaaatgattcaagaaattccaaattttactgaatttgtttgtgaataatttatctaaaaaataacaggcgactgactttcgttacaaaacttgcttgtaacatttaaacactaaattataattttaagtcaataaaatacattatttattgtaatttttaataaggtcctttgatttttacaatttgaagacactcaaaaacctttacctacggaaatagggtctcaaggtctttttatatgttaacattatgtgtgcacccccaatattttacaccaggcgccgcca

SEQ ID NO: 5242 - DNA, 529 bp, Diabrotica virgifera
aggtgtgaagcacatatttggagaagaggaagcataatgaataaaatagaagatacgattttaactatccagttggaattccagattggaattctccaattatgtacctacttgttacgatgccagtgacaactgcagaaacagaacgatgtctctctgcattgaaacgtatcaaaactttccttagaatagctatgggccaggatcgattaactgcactcgcaatgttttcaataaaaaaaaaatgattcaagaaattccaaattttactgaatttgtttgtgaataatttatctaaaaaataacaggcgactgactttcgttacaaaacttgcttgtaacatttaaacactaaattataattttaagtcaataaaatacattatttattgtaatttttaataaggtcctttgatttttacaatttgaagacactcaaaaacctttacctacggaaatagggtctcaaggtctttttatatgttaacattatgtgtgcacccccaatattttacaccaggcgccgcca

SEQ ID NO: 5243 - DNA, 990 bp, Diabrotica virgifera
  SmartBlast Evalue=4E-15; Info=Endonuclease-reverse transcriptase n=1 Tax=Bombyx mori RepID=D7F159_BOMMO
tatttattttatatatttattatttatatatttccatatttatgaaagtcaaatttcctcaaccagttaggttcataaaatgctgttggtacgaaagaggtttttgtctggttgattacgagaaagcgtttgatcgagtacagcacaccaagataacgcaaatctcaaaagaagcaagaattaataaccaagatttgaaaataattggaaacttttactggaatcagaattcgaatatgaagaaataagaagacaatcaaaagtaaaagatgcaatccaaaatattgtcatgttaaaatggagttgggcagggcacatagcaagaatggaagacaaccgttggacgaagcgagttgttaaatggagaccaggaacaaataagagaagtagaggcaggcctcacaccagatggagaaatgaatggacacatctaagggggcttacattcgacaatggatggaatagatgttgatcatgataactggaaacagactgcaaatctcagaattgaaggtggacataaaatatgtgataattatgcgtggagtgaggcaaggcagtattttgtctcctctcatcttcaatctgtggcgacacgtttcaattactactttttaaatgctaattttaattcttaataactttttcaaaatgaaataatgcgtcccatttaaaattcacatttaatatacaaaccatatgcatagaagggcctgttaagttttaagaaacgaaatatatccctattcaggtaaaatgcctttgcagtttttaaaacaccagatctaataaattgtcgcctgtctggccatatggtagaaccacataatgacagattagtgtttgtggtctagttcagtagtcacagcggacaccccgtcgcggtcacaccctcgctaaaataacacaccctctttcgagacattgtcacgttcttttacagagacagcacggtactttgtcttttacattttcatcaccaggctcatt

SEQ ID NO: 5244 - DNA, 565 bp, Diabrotica virgifera
acagtgtcatcagcgtagcatatggtttcagttatttctgcatttataaatattccctcgtctatatgaatcagcgctagaatcataatgtgctctggtgtgaaaaaataatgagggtagtatacatccctgttgcacactacgttttatgtttatgtttctgtggcgacacgtttcaattactactttttaaatgctaattttaattcttaataactttttcaaaatgaaataatgcgtcccatttaaaattcacatttaatatacaaaccatatgcatagaagggcctgttaagttttaagaaacgaaatatatccctattcaggtaaaatgcctttgcagtttttaaaacaccagatctaataaattgtcgcctgtctggccatatggtagaaccacataatgacagattagtgtttgtggtctagttcagtagtcacagcggacaccccgtcgcggtcacaccctcgctaaaataacacaccctctttcgagacattgtcacgttcttttacagagacagcacggtactttgtcttttacattttcatcaccaggctcatt

SEQ ID NO: 5245 - DNA, 792 bp, Diabrotica virgifera
  SmartBlast Evalue=4E-35; Info=Small heat shock protein 21 n=1 Tax=Gastrophysa atrocyanea RepID=Q3LGX2_GASAT
caacggtgttgtaaactattcgttaaatcaaaaagttcagtgttattaaattattttgaagtgtacaattatccaaaatggcatttattcctgtagtgtttcgtgaaaaccagtgggcccctcattgccctcgtcgtcaagttgctgtgcccaatcgaaattttgttgaagacatcacccatgacgtcctgaattccattgccttagcccaggcgttatttggcccagaacaagatagaggagatacagaggtaatgagacagaattctaaattattgaatcaatccagatcatctgttacaattgatgaacacaaattccaagccaatttcgatgtacagcatttcaaaccggaagaaattactgtaaaggtaaatggtgacaggtccattactattgaagccgaacatgaagagaagcaagatgagcatggtggaatttacaggcattttgttagaaagtataagttgccagaaaattgcgatatagaaaaggtagattccaaattgtcgtctgatggagtcttaagtattacagctcctaccattggacagaaatcttccagtcatagaaccattccgattattcaaactgggaagccaattaagccagcagaaaaaccgcaggttgaacagaaatcagcttaaatagtaggttaatattatttaaaatatattacatcaaatgttctttaatttcaagactgatttttgaatgttttattaattcctatttttttgtactgtataactatttttttatttaaataaatacatttgtgaataattaaaa

SEQ ID NO: 5246 - DNA, 774 bp, Diabrotica virgifera
  SmartBlast Evalue=3E-34; Info=Small heat shock protein 21 n=1 Tax=Gastrophysa atrocyanea RepID=Q3LGX2_GASAT
gctgtttcttaaatcaaatagtttagtgttattaaattattttaaagtctaaaatgtccaaaatggcatttattcctgtagtgtttggtgaaaactattgggcccctcattgccctcgtcgtcaagttgcagtgccccatcgaaaatttgttgaaggcatcaaccatgatgtcctgaattccattgccttagcccaagcattatttggtccagaagaagatagagcagacatggtaataagacagaattctagaatattgaatcaaggaagatcatctgttacaattgatgaacacaaattccaagccaatttcgatgtacagcatttcaaacctgaagaaattactgtaaaggtaaatggtgacaggtccattactattgaagccgaacatgaagagatacaagatgagcatggtggaatttacaggcattttgttagaaagtataagttgccagaaaattgcgatatagaaaaggtagattccaaattgtcgtctgatggagtcttaagtattacagctcctaccattggacagaaatcttccagtcatagaaccattccgattattcaaactgggaagccaattaagccagcagaaaaaccgcaggttgaacagaaatcagcttaaatagtaggttaatattatttaaaatatattacatcaaatgttctttaatttcaagactgatttttgaatgttttattaattcctatttttttgtactgtataactatttttttatttaaataaatacatttgtgaataattaaaa

SEQ ID NO: 5247 - DNA, 809 bp, Diabrotica virgifera
  SmartBlast Evalue=2E-14; Info=Endonuclease-reverse transcriptase n=1 Tax=Bombyx mori RepID=D5LB38_BOMMO
gttgttgttgtggagaaccatttcctcagattctttaaccatgatattctttttctcccaatttcctcgctttgtgaatacttgccttgaaggattcccttcagtaatctgtatttattgctgtttctcattatgtgtccgagatattatttctccttttaatggtatacatcacctctctttctttccccattcttcgtaatactgtctcgttggttattttgtctgtccatgatatccttaggattcgcctgtatagcctcatctcgaaggcttcaagttttttctccatcgcttcgtatagagaacaatacatgaacaataatgagtatttcttaagggcttcaaaacgcagaaaatatagggtaggtgggggcaaaagtacacacggggcaaaggtacgcacttacatttttcagtaacttctaatatgttggcgacattttgtggcatataagaagtgacaaatcttcaaagtgaatatcaagttgagcttgatattctatcagctaattttgtctcaattgcaaaatgtctcaaatctgcaaaaaaacggacatgcacaaaaataatattgaagaatttccatttgcctaatatgattacaaaatgtatcaatttcactttcatctatactctgtgccaattcaagcattaggagattcaccagacatgaaaatttagaaaatgcgtacctttgcccccacttaccctacagggtgttccatttgaaataagaaagttaattagatttccagggaaaaattaggatctggcatccatgtaaatttcaccataacatctaccgc

SEQ ID NO: 5248 - DNA, 747 bp, Diabrotica virgifera
  SmartBlast Evalue=2E-14; Info=Endonuclease-reverse transcriptase n=1 Tax=Bombyx mori RepID=D5LB38_BOMMO
gttgttgttgtggagaaccatttcctcagattctttaaccatgatattctttttctcccaatttcctcgctttgtgaatacttgccttgaaggattcccttcagtaatctgtatttattgctgtttctcattatgtgtccgagatattatttctccttttaatggtatacatcacctctctttctttccccattcttcgtaatactgtctcgttggttattttgtctgtccatgatatccttaggattcgcctgtatagcctcatctcgaaggcttcaagttttttctccatcgcttcgtatagagaacaatacatgaacaataatgagtatttcttaagggcttcaaaacgcagaaaatatagggtaggtgggggcaaaagtacacacggggcaaaggtacgcacttacatttttcagtaacttcttatatgttggcgagaacatcttgtggcatatgtttgtactactcagtagcattggatgaaaaactttggcgcaatcagggcgaacacaaaaaaaaatgaggtaaaaattattttgtaccttttgatctaatttttcttaaaaattgattgattctaattcttaatctttcaaattcagattattattggttaggcaagttgaaagtttattgttagaagtcttcttctacatgaccgtttgaagttcatatgtgcatagtttcatattgaggttagatatattattggttgccggatggggcaaaagtactcacacaaat

SEQ ID NO: 5249 - DNA, 771 bp, Diabrotica virgifera
gttctttactttatttatttaataaaaaagcgtcttacaatttaagaagtggcacaaatgattactttatttaagagttttccagcgctggtacaaaagggatctacttgactggcaacgcattgcttgcctgatacagcaaaagcattagcagcatcaacgacaggttgaaagtcgtttttcacagcatcgggcacctttgttgcaaccttaagtatatctgagatgacctgaacaacacagagaagagcttgttgatcagttccttggcattgatcaatttcgttggcggcttttttggcctcttcatggataccagatagatctttgagcaaaggtgcgacagtcttaaccaaagcgacgagatcgtcctttatgcacttaccgacgcctgctacgaaattgacgcgaagtgccatgatgccattttcttgttcttcgatgcaagaaatcaatttctttacagaatcagtgctttgtgcagcgatttgatctaaaataggttcaagtgcttctaaagctcttgtaatagccgttcttgtatagtttaagactttagtgaggtaccaatggtacttgtcagcgaaagtttcgataaaatttggacctgtagtgaaaagctcatcaatgagaccttcaatcgtgtggacgatctttttgacgtcgtcgatgaaattgtcgtcagctactttgtttggcaaagcggcaaccgaagccaagataatggcgcagaagaagagtgtaatttttttcattgtgtgtggacgtacc

SEQ ID NO: 5250 - DNA, 772 bp, Diabrotica virgifera
gttctttactttatttatttaataaaaaagcgtcttacaatttaagaagtggcacaaatgattactttatttaagagttttccagcgctggtacaaaagggatctacttgactggcaacgcattgcttgcctgatacagcaaaagcattagcagcatcaacgacaggttgaaagtcgtttttcacagcatcgggcacctttgttgcaaccttaagtatatctgagatgacctgaacaacacagagaagagcttgttgatcagttccttggcattgatcaatttcgttggcggcttttttggcctcttcatggataccagatagatctttgagcaaaggtgcgacagtcttaaccaaagcgacgagatcgtcctttatgcacttaccgacgcctgctacgaaattgacgcgaagtgccatgatgccattttcttgttcttcgatgcaagaaatcaatttctttacagaatcagtgctttgtgcagcgatttgatttaaaataggttcaagtgcttctaaagctcttgtaatagccgttcttgtatagtttaagactttagtgaggtaccaatggtacttgtcagcgaaagttccgatgaaatttggacctgtagtgaaaagctcatcaatgaggccttcaatcgtgtggacgatctttttgacgtcgtcgatgaaattatcgtcagctactttgtttggcaaagcggcaaccgaagccaagataatggcgcagaagaagagtgtaatttttttcattgtgtgtggacgtacct

SEQ ID NO: 5251 - DNA, 823 bp, Diabrotica virgifera
ttaaagtgatctaaatcatattgaatataatgagaatataatgtatgtaagtcaaaatagttctaaaactggtattttttagcgaatttctaagcagttggttacactgtgacgatgtataaatgtcatagataaaaatttaaaagcaaattcaggtatgtgatttgttttagttattatagacctatacgaagaaaacctaagttgaaaatatggcattttttacaataaattgttaattatttaaaaaaaggcgccaaaatctctacagaaaatgtatagcttttatttatatacataagcctacaataactaaaaaagttcagatacctggatttgttaaatttagtttgtcattttttctgcacgatttttcctgatcctactcaattctcactatgtattttacctacatatccacgaaaaattagtaatagtgcaaaaatagatgttcaagatcggagaaaattaaaaacatcatgaaaaatgccaaatctatttggcatctaactttgaattgttattgagaagttttgttaattgtacaaggtcaccaacgccaaccaaattcgttaaaaatcgtaatcaaggtacaaataataatcaatatacagtaaccgaccacgctactagacacacgggtacattgagctaatacagccctggatccttcacttgttgtattgtttacttttatgtctagtgacgtctagaaaatgtcagaaaatgtatagaaagctaatataaacatagaaagttgagagtttatagaacagctgtatttgaagtttatagttgtcattgtgttgttgtaaaagttaag

SEQ ID NO: 5252 - DNA, 708 bp, Diabrotica virgifera
aaatcaaccccatcatcgggggtaacaacccccagtaccaagatagcagtgactgagatggctgggacacatagagaaaagaaaaaacgacctactgattaagaaggtcaccagatggtagccagaaactgaaagaccaaggggaaggcccagagaaagatgggaggaccaggtgatgagcggtatcaaatcctgaaagtgagaaactggatacaactatgcacagatcgaaatgagtggaagaaaattgtaacgaaaaccaagtcacacaatatactttgacaatgcataagaagaatgtggagtgatccactgcaataagtaaatcagagacttctaagtaagagcggtaaacattccatcaggaatgagaggccatgtgatgatgtcacatcaacctttggtaataatttactagtagctaaaatttagaagcaacttgcatataattgtactgacatcttcaaattggtcctctgtttatttctacaatatacagtaaccgaccacgctactagacacacgggtacattgagctaatacagccctggatccttcacttgttgtattgtttacttttatgtctagtgacgtctagaaaatgtcagaaaatgtatagaaagctaatataaacatagaaagttgagagtttatagaacagctgtatttgaagtttatagttgtcattgtgttgttgtaaaagttaag

SEQ ID NO: 5253 - DNA, 814 bp, Diabrotica virgifera
gccaggctgtagcttttaccgtctactactagatgacaccaaaaatcacttttttgcaaaaaatggacttggacaatttgcgtattagatcgacgataagttgattaacgcacaaattgattgtccaagtctcttaagccaaactgattgtaatgttctctatcaggccatgcgctatcataaaacattgagtgtctcttaccacagaatatcctatggttttcatagcccagtcgataggtatatgggattattgaatagtagtaatgttgatgttttcaatatttcattggatcaactgaagagatctctggctttatgatgttcactgttgtaaaaacgtctgtttcgttattgtcaatacgtcttgttaaatttactgttatatgatatatttgttacattttatattttacatatattgtgattgtttgtattattgcattgtatcttcttgtgagaactacttttattgtgttgatgttagttattattatttacattataattacactatgaatgaggttttcccatatgattaataaataaaataaaaaataaaagttattgttgattactggaatgtatgaaggagaaaacatgtcagagactataaaagaagtggtcttgatatccgcatttttttatatccagatttgtctgtcgccacattgatctggatattacaagttttactgtatatacattgtaaatcccttggtttgtttatctccactgcatcccgaatgtaaacttagcatagtgccatatacaataaaatagttgcaattcttagtacctaattacaggagac

SEQ ID NO: 5254 - DNA, 706 bp, Diabrotica virgifera
gccaggctgtagcttttaccgtctactactagatgacaccaaaaatcacttttttgcaaaaaatggacttggacaatttgcgtattagatcgacgataagttgattaacgcacaaattgattgtccaagtctcttaagccaaactgattgtaatgttctctatcaggccatgcgctatcataaaacattgagtgtctcttaccacagaatatcctatggttttcatagcccagtcgataggtatatgggattattgaatagtagtaatgttgatgttttcaatatttcattggatcaactgaagagatctctggctttatgatgttcactgttgtaaaaacgtctgtttcgttattgtcaatacgtcttgttaaatttactgttatatgatatatttgttacattttatattttacatatattgtgattgtttgtattattgcattgtatcttcttgtgagaactacttttattgtgttgatgttagttattattatttacattataattacactatgaatgaggttttcccatatgattacgctacggaagtaacgctttaatgtctacagaagcgataggtcatcttcaaccagtgcctattctagaggaggaggcgttcttattgccgtatccaagcaattgaatagtaagcatttgccatcttcacttgatatcgagcaactgtttgtagccattatcaatg

SEQ ID NO: 5255 - DNA, 1071 bp, Diabrotica virgifera
  SmartBlast Evalue=3E-66; Info=Endonuclease-reverse transcriptase n=1 Tax=Bombyx mori RepID=D5LB38_BOMMO
cgccgggataatcaagactaaacgactagtacaagctgctcttgaatggaacaacttaccacaacaaaatgttgacaatttgattaggagcatgcccacgcaaatccaagcttgcataaggctcaggggtggtaacactgactactaaaaaagcataaataaataaaaacaatttaaacattatttgtttgacattgaaatttctcatgctatgacttttgtagtacagaacatcagaagacaacgcaatacaggcatagtcgtagacgtagaaggtcagattttgactacaattgaagataaattaagaagatggaaagaaaatatgcaaggattattcgaagatgctgcacgaagtccgtatgaaatagacaatccctacggcccagaaataacaaacgaagaagtaactatggccattaagcggatcaaagatgggaaatcaccaggacctgatgaggtgcatggtgaaattttaaagctattagaggcacaacaaattacagctcttacgaagttattcaacaacatatacgagactggttacttaccaaaagactggctactatcaatattcattccacttcccaaaaaagccaacgctagaaaatgtgaagaacatagattaattagtttgatgagccatgtacttaaagtactccttactatcattcactcgcgcatatacaccaaattagaagaacagctgagtgaagttcaatttggattcagagcaggactcggaacgagggaagcacttttcagcttgcaagttctaatacagagagccagggatgtcaactgcgatgtgtatgcatgtttcatagatttcgagaaggcatttgataaagtcacacatggaaaactaatcgatatcctaaaaacatcaggactcgatggtaaggatataagactcgtttcaaacttatatctccaacaaaaagcaacagttcgattcgaaaatgaactgtcgaaatcttcacggttgaaaaaggagtcagacagggttgcatactgtcaccaacattatttaacatatactctgaaaacatctttagagagaccttggac

SEQ ID NO: 5256 - DNA, 446 bp, Diabrotica virgifera
  SmartBlast Evalue=3E-10; Info=Endonuclease-reverse transcriptase n=1 Tax=Bombyx mori RepID=D7F172_BOMMO
ccctctgaacatttaaaatcgaaatcaaaacgtcgtttctttggtaaaacaaaaaatgctgttgcctctataaaaacaaggaaggcatcatttttgctttcgaaatcactgaaaagttttcagagaaaaggtgtataaagcagagaacttgtaagtcagttttaatttacacatgctttagactacataatatgtttctttgatttcgagaaggcatttgataaagtcacacatggaaaactaatcgatatcctaaaaacatcaggactcgatggtaaggatataagactcgtttcaaacttatatctccaacaaaaagcaacagttcgattcgaaaatgaactgtcgaaatcttcacggttgaaaaaggagtcagacagggttgcatactgtcaccaacattatttaacatatactctgaaaacatctttagagagaccttggac

SEQ ID NO: 5257 - DNA, 758 bp, Diabrotica virgifera
  SmartBlast Evalue=8E-21; Info=Endonuclease-reverse transcriptase n=1 Tax=Bombyx mori RepID=D5LB38_BOMMO
gtcgcatcggaaggcaaaaagtgcattcttgactacgagctctgtgttcaagagccatgacatcaccctaaaaacaaaaataaggctccttaaatgttacgtgtactcagtgcttctatacggagtagaaacgtggacattgaaggcgaaactctatcgaaacttcaggcttttgagctatggttgtacagaaggatcctgaagataccatggacagacaaagtcaccaatgaagaagtactacggaggatgaacacaaccgcagatttagtcaacatcgtgaagggccgtaagctgcagtacttgggacatataatgagaaatcaaggcagatacgagctatccaatgcattttacaaggtaaaattgaaggaaaaagggccctaggacgaagaagaatatcctggcttgctaacctgagagcatggtatagaaagacttcaacacaactattccgtatagcaactaacaaagtcatcatagccagaatgatcgccaacgttcggaacggacaggcatcctaagaagaagaacactggagatccttatgcaaaattccgctcgtagtggtacagctcaatcccagatccaagcctcgtcgttgacagtgatcttcgaggactcgcgtttaatcaatttcgcaccgcttcaatattatgtggtgtgcgagcagttctgacactgccacacctcttttctgtgatattgaaccactactttcaaagttcctaacccacgtcttaatagccatgttagaa

SEQ ID NO: 5258 - DNA, 757 bp, Diabrotica virgifera
  SmartBlast Evalue=8E-21; Info=Endonuclease-reverse transcriptase n=1 Tax=Bombyx mori RepID=D5LB38_BOMMO
gtcgcatcggaaggcaaaaagtgcattcttgactacgagctctgtgttcaagagccatgacatcaccctaaaaacaaaaataaggctccttaaatgttacgtgtactcagtgcttctatacggagtagaaacgtggacattgaaggcgaaactctatcgaaacttcaggcttttgagctatggttgtacagaaggatcctgaagataccatggacagacaaagtcaccaatgaagaagtactacggaggatgaacacaaccgcagatttagtcaacatcgtgaagggccgtaagctgcagtacttgggacatataatgagaaatcaaggcagatacgagctatccaatgcattttacaaggtaaaattgaaggaaaaagggccctaggacgaagaagaatatcctggcttgctaacctgagagcatggtatagaaagacttcaacacaactattccgtatagcaactaacaaagtcatcatagccagaatgatcgccaacgttcggaacggacaggcaccctaagaagaagaacattctttgaaatcttctctataattgtaagcttattgatttacttctagattgaacctgtaatgattctaattactaaggatgaattagcaagatcttctgttttcttctccacttttgtgactgacaagccccccataagtatcttagtgaagtatcttttctgaactggtgaatagaccagttattcagaagttaggtggtcatcttttctccacttttgt

SEQ ID NO: 5259 - DNA, 1083 bp, Diabrotica virgifera
  SmartBlast Evalue=1E-94; Info=Protein LMBR1L (Fragment) n=1 Tax= Camponotus floridanus RepID=E2A3U5_9HYME
attcgtgcatatcattttttggggtcttgatgcttttagtatgtactcctttaggattcgtaagacttttcgacgtagtcggccagtttctcgtcaaaccccagtttcttcgcgatctcaacgaagagtatttctcgtgcgccttagaagaagaatgtctgcgcagacgcttcaaacaagctcaaaaaaccgggaagtcgtacgtagatccggcgcccatgtccatctacacagaaggaccaatcaaagacgccgactaccaattgcctgacaatttgttgagattgagaaacggagagttacagtttggactcgctaaaagactgactgaaatcgagaagaggagactaattttagataaacagagacaaacgtcttcatttcgaagaaacgtcgtttatccaatagctatgctcctacttctcagtttaacggtgatagctgtgctactagtagtacaaaacacgttatcactgcttataggcattaaagctttaccaatcagctcgaagcaatttactctaggagtaagttccttatcgaagctgggactgttcggagcctcattagaaatagtattgatcgtttacctaatcgtcacttcgtccatcgggctgtacacggcgccgtgcatgaagagaataagaccaaagcctaggagtaccccctttagcgtcgtgataggcaactgcgccctgctagttattatcagttctgctttaccattgttatcgaaaatattaggaataacaaatttcgatcttctgggcgacttcggaagcatcgagtggctcggcaacttgaagatagtcctcttatacaacaccctctttgccacagcgtctacgctctgcgtcgtcaacaagttcacagccaaagttcgtcgagagctctacaaccgatttttgactttcttggacatcaaaactgaaggaaacactgtgtctgttcctaacactccacgcccatctatccacaagtatgaataaaagaaatatagatttttttacagtaagtaataatatgttaaaaattaaaaaaaaatgttaaaaaattaactaaatctgtatggaattcatattt

SEQ ID NO: 5260 - DNA, 441 bp, Diabrotica virgifera
attattagtgagtttttcaacaaaaaatttagagtactacacagttggttaatcgtcatcgaaaaattgctctctacaaaaagctgtatgtttctaaaactgtactaataatcattttgtaggcttaaatatagacatagcattaaggagatcagtgcctttctgttatcattagcagcttactacatgtcatcatcaaaggtgtggtattttttgtcgttttataaacactatatgttgtgtgtttttgattacacagatttttgactttcttggacatcaaaactgaaggaaacactgtgtctgttcctaacactccacgcccatctatccacaagtatgaataaaagaaatatagatttttttacagtaagtaataatatgttaaaaattaaaaaaaaatgttaaaaaattaactaaatctgtatggaattcatattt

SEQ ID NO: 5261 - DNA, 1096 bp, Diabrotica virgifera
gcctctgtgtacttatcaggaagttactatataatttactcaattatcttgtattttaaacacaaattagtaaagccacagttttattttttaatcaaattaaaataatatcaaaaataaaactttattgggaccaattttctggtaaacaccttcgtggtttctaaaatttgcaaaccaacgaatgccggagcaaagaagctgagggagatctaaaagttgcatctcacttctcgcctgtccagcgcggtaaaattccaacgaaaatggtcccgcatactcaggagtaaaactaatataaatttcacaaaacactgttaaaagttcttcgctcataacccgctgaaaaaactcggttggccgcgcactttgatcacccactttacacgttagttatagtgatgttgaaaaagtaactattcgttacaaaatactcgttacttacgaataccgaaagtaacgattactatacagagaggtaagtcgttactttgattactctgattacttcgtaccaatcgtatcagagcgagtacctacatattttgattttgagtattgtatctactcggttgatatcggagtcggaccggtattccacgagggttcggtatcagtacagttaactaaaattttatctatgaagggcgaaggctatgaagagttttacaggattacagggcgccgagtagctgaaacagagggaggtatatcatttaacaaagcatgcacccagaaacagatgtctatacgatttgtcgaggtagataattcacagaatttcacagatgttagttcttttgaaaataaaaatgcaacacattagattttaataataaatacacactattcttatcaggctagaaaaaaatagcttagattgaccggaaaatatgtaagaaatgataatatttctagactatgatcatcaactttaattttacatgtaggtatggcattgtttttattagaccagggcatttaacactaaaaacacaggaataaatctatttttaaatatagtaggtacatagagacttgcaactttttgcattgtatttaggattaggatgacgtcggaaaaaagtctacaata

SEQ ID NO: 5262 - DNA, 402 bp, Diabrotica virgifera
gcctctgtgtacttatcaggaagttactatataatttactcaattatcttgtattttaaacacaaattagtaaagccacagttttattttttaatcaaattaaaataatatcaaaaataaaactttattgggaccaattttctggtaaacaccttcgtggtttctaaaatttgcaaaccaacgaatgccggagcaaagaagctgagggagatctaaaagttgcatctcacttctcgcctgtccagcgcggtaaaattccaacgaaaatggtcccgcatactcagttaggagtaaaatatgaaacattatttttaaacgcttttatttagttcaatagtttgcgtcaaatctctaaacgttaatttgactgccttttctccaatgcaaatgaatgaacatatg

SEQ ID NO: 5263 - DNA, 801 bp, Diabrotica virgifera
aatttagggataaaagtattagaaaacgtcacactcaactgtactggtggaaaactgtatccgaataggactatcgatttatcaaagttaactctactaaattcgacgaaatcggctaatacatcagttagtaatgttctacttttgccagatggtaaaataaaaacaatagggaatactatcaaaggaactggtggtactcctatattagtaacttctacaaaatcggtatctagacaaactacaaatcccggacaaaaatatataacatccaaaaagcaattaattgctcagaagcctcctacacctataaaaaaatctgcttacaaatacgcttcgaacacagaaccttccatacccacctccaacttgacgactcaagacatcatggatttacctataatatttgcggatgataatcagattattaattcaaatagttctactactccgcatatttcagctaacacgttaaatagtgtctcaagcgctgctgcaacttcagtatcttcagtgcccttagttagtcaggtgacaaagtcaggggcgcctatgacaaaatatatgttgctgaataaaaacactttgggccaatcgaacttcatacttacacctaacgttaagaaaactgttccaattacacatttcaataaacctgtgccaaagtatacgagaatactcttatcatcaaagaaaaccagcttgaatgaagagaaaacagcccccaaggttcagactaaaccaccagaaataacgtttaaaaatgtcactcctgggccattagaaaagcaaccaactata

SEQ ID NO: 5264 - DNA, 724 bp, Diabrotica virgifera
cagaaagaatagtatcaccagtgaagaatcaatcacaaccagcacgatctcaaggatttagtacgggtagaaacgtggtccaaggaaactctagtgtgacgaatttactccaaggtgggattaaaacgatatgcccatccccaactccttcaaatttagggataaaagcaaatcccggacaaaatatataacatccaaaaagcaattaattgctcagaagcctcctacacctataaaaaaatctgcttacaaatacgcttcgaacacagaaccttccatacccacctccaacttgacgactcaagacatcatggatttacctataatatttgcggatgataatcagattattaattcaaatagttctactactccgcatatttcagctaacacgttaaatagtgtctcaagcgctgctgcaacttcagtatcttcagtgcccttagttagtcaggtgacaaagtcaggggcgcctatgacaaaatatatgttgctgaataaaaacactttgggccaatcgaacttcatacttacacctaacgttaagaaaactgttccaattacacatttcaataaacctgtgccaaagtatacgagaatactcttatcatcaaagaaaaccagcttgaatgaagagaaaacagcccccaaggttcagactaaaccaccagaaataacgtttaaaaatgtcactcctgggccattagaaaagcaaccaactata

SEQ ID NO: 5265 - DNA, 798 bp, Diabrotica virgifera
  SmartBlast Evalue=1E-42; Info=Protein sex-lethal n=1 Tax= Harpegnathos saltator RepID=E2BWQ1_9HYME
tgaagttgaagattatttgatttgggtttttggtttttatccagtttgttttagtttgttagtttgattttataaaaaggccagaaacaacagctaggagacaacttccaacaatttgaatgaaaatattaggatggatgccaacaatggagctggagatactaatgatggttccatagataaaaccaaattaattattaattacataccaccatatgccactgaaggtgaactgtcccaaatattttcaactattggaaaaccggaagatgttaaaattatgaaagatttaagactggttttagtttgggatttggttttgttaaatatgccactgaagaagaagcagcaaaagcaattaaaactctaaatggatatactatgatggacaagaggttaaaagtcgcctactcacgcccaccaggaaaaggcacgaaagattcaaatctttacattacaaatattccaaaaaatattactactgaacaagaattagataacatatttagtaaatttggccaaattgtacaaagaacactggtaaaagataaaattactggaaaagcaagaggaattgcttttgtaagatttgctaagagcgaagaagcacaagcggcgatcaatggcttgcatggaacaacgttggcaggttcgatgctacctcttagtgtaagagtagctgaagatcatggaagacagaaggcacagtatgtggacgtgtgggatccgattgggttttaatagagaatctgaagaatcattttcatttggagacgaaggtcctgacttagaagaaat

SEQ ID NO: 5266 - DNA, 726 bp, Diabrotica virgifera
  SmartBlast Evalue=7E-40; Info=Protein sex-lethal n=1 Tax= Harpegnathos saltator RepID=E2BWQ1_9HYME
tgaagttgaagattatttgatttgggtttttggtttttatccagtttgttttagtttgttagtttgattttataaaaaggccagaaacaacagctaggagacaacttccaacaatttgaatgaaaatattaggatggatgccaacaatggagctggagatactaatgatggttccatagataaaaccaaattaattattaattacataccaccatatgccactgaaggtgaactgtcccaaatattttcaactattggaaaaccggaagatgttaaaattatgaaagatttaagactggttttagtttgggatttggttttgttaaatatgccactgaagaagaagcagcaaaagcaattaaaactctaaatggatatactatgatggacaagaggttaaaagtcgcctactcacgcccaccaggaaaaggcacgaaagattcaaatctttacattacaaatattccaaaaaatattactactgaacaagaattagataacatatttagtaaatttggccaaattgtacaaagaacactggtaaaagataaaattactggaaaagcaagaggaattgcttttgtaagatttgctaagagcgaagaagcacaggcagcgatcgctggcttgcatggaacaacgttgggagattcaatggtacctcttaatgtaagagtaaacgaagatcatggaagacagagggcacagaatttgaatatgagggat

SEQ ID NO: 5267 - DNA, 789 bp, Diabrotica virgifera
  SmartBlast Evalue=5E-53; Info=Cellular FABP-like protein n=3 Tax=Tribolium castaneum RepID=D2A4Y9_TRICA
attctatgcttttatttccatgagtatatattccactacatacataattacaaatcagtacaaatttaataaagtaataaaaagtatagataaacaaactcattttggtataatcactacgtatcggaccagtacaaaaaaattaaaaaatataataacttattaggtaagcataaactatcaaacttgaatcttgtagatcctggtggccttgacgttgttcaccgacatttccattttaatttcatcagcggaaaatgtcctatcaatcacagtttctgtcccactaggattcttttggacttcgtgcaaagtgtttccatcaattgtaatggtagattttaccttacggccatcaggagtttcttggtcaaattccactcctggtttgaatttcagaattacatttttaaaggttgatatcgatgacagaatatactcatcgccttccttttgtagatccactacaggtgaaactgttgctcccattttgcgggtcaccaatccaacacctagttttttcatatattcgtcgaaattctcgcttttgtcaagcttgtatttctttcccaggagttctgttaaagtcatcttgatttgccggctgtacacaaaaactaattaagattcactgtgatcaattgacccgttcgatctttgaatatcaactgacaacaactgacctctggaactccagcgcgatgcttcaactaagcaatagccgtatatgctttaaaataccgggtcaggacgatatctctggtttgtgttgtatacgtttgcactgta

SEQ ID NO: 5268 - DNA, 731 bp, Diabrotica virgifera
  SmartBlast Evalue=1E-49; Info=Cellular FABP-like protein n=3 Tax=Tribolium castaneum RepID=D2A4Y9_TRICA
attctatgcttttatttccatgagtatatattccactacatacataattacaaatcagtacaaatttaataaagtaataaaaagtatagataaacaaactcattttggtataatcactacgtatcggaccagtacaaaaaaattaaaaaatataataacttattaggtaagcataaactatcaaacttgaatcttgtagatcctggtggccttgacgttgttcaccgacatttccattttaatttcatcagcggaaaatgtcctatcaatcacagtttctgtcccactaggattcttttggacttcgtgcaaagtgtttccatcaattgtaatggtagattttaccttacggccatcaggagtttcttggtcaaattccactcctggtttgaatttcagaattacatttttaaaggttgatatcgatgacagaatatactcatcgccttccttttgtagatccactacaggtgaaactgttgctcccattttgcgggtcaccaatccaacacctaattctttcaaaaatgcatcgaagttttcgctttggtagagtttgtatttctttcccaaaaattcgtcaaccattttgacttcgtaagttaaggtggtggagagtaaaaagttaaaaaacacagcaccgggtagatactacttgcactggcaaagagcgttaaaaaactaaaatgcaatataacacctaactaccaaaccgccagttgttgtctccc

SEQ ID NO: 5269 - DNA, 824 bp, Diabrotica virgifera
  misc_feature (32)..(32): n is a, c, g, or t
  SmartBlast Evalue=3E-34; Info=Diuretic hormone 37 like protein n=1 Tax=Tribolium castaneum RepID=D7EJD2_TRICA
cacggccaatattataacaaattattataacncttttttctctatttttttctctacaagcaaattactgcgtgtctgttagatttctaggtatctcctgttgttcttgattctgtcgcggagcttgccataggcgtaggcttttctgagtgtctgaattggggcgttaatagaaagagagggagattcttcgaagttgtaaaatctggccaatctttgtggatttacgtcaatgttgtatcgtttgttgcggattctcttgatgtggttctcttgattatcgaagtcgttggattccatttccgtaagcaggtaaaatctgggatcggtgactccagtccactcgctgtttggccggtatttagcagccaatttgggcagaaggtaacttatggtttcttggtcggctgccatgttgactggttccagttgtcctcgattaaagtagttgccatttgccgtagggtcttcgcttctgatactcactaccaaagtggcacacacgaggtagaagggtgcgcgcatgatgtataaatacgtatcagcggagaaaagcaggatcttcaacctaagccgcaaagatccccaacaccagtcggcaagctcccacggagtcaatcaacaggttgtcttgtcgacaacgtgtacgaactcgctaccaaaaaaaaaatcccttaatctcccgatcgagaaattttcaaaaaataaaatttggaaaacttcttgaagattacgtacttgtccgaaacgtgtgaattttcaaaagaatcgagtgtcggttttcccggttattcggcccacttctgacttgtatcgtcgatgtg

SEQ ID NO: 5270 - DNA, 693 bp, Diabrotica virgifera
  misc_feature (32)..(32): n is a, c, g, or t
  SmartBlast Evalue=7E-34; Info=Diuretic hormone 37 like protein n=1 Tax=Tribolium castaneum RepID=D7EJD2_TRICA
cacggccaatattataacaaattattataacncttttttctctatttttttctctacaagcaaattactgcgtgtctgttagatttctaggtatctcctgttgttcttgattctgtcgcggagcttgccataggcgtaggcttttctgagtgtctgaattggggcgttaatagaaagagagggagattcttcgaagttgtaaaatctggccaatctttgtggatttacgtcaatgttgtatcgtttgttgcggattctcttgatgtggttctcttgattatcgaagtcgttggattccatttccgtaagcaggtaaaatctgggatcggtgactccagtccactcgctgtttggccggtatttagcagccaatttgggcagaaggtaacttatggtttcttggtcggctgccatgttgactggttccagttgtcctcgattaaagtagttgccatttgccgtagggtcttcgcttctgatactcactaccaaagtggcacacacgaggtagaagggtgcgcgcatgatgtataatttttaaatttaaaaacaaaaatttttccacttaatcacaatatatttaaaattccaaaaatcactttgatcacctcacaatagacattttcaaataattccactcttgcgaactgatgaaaataattttaatatttcataatttcacaatctcgtgaa

SEQ ID NO: 5271 - DNA, 781 bp, Diabrotica virgifera
aattttatgacattttatttcattttatttaatgttatttaattttattttatttaatcaacacctatagagctggaaccaccccgaacccaatcataaatacagggttgttttgaatgtagataaaattaagctgttatattcattataagataaacaaatttcagattgtaactgttacactacagactttattttgttacttctaactaagctttattacttcaaaacagtatgtgtaattaattaaaaataataataaaacctcattcacatcgagcattttttgtttattaattacgaattccttttgtttattttaagtttattgtatacaaaagtttgtttttatctattgaggcagtacgaagtctgccgggtcagctagtattttataaaaaatgaatataatagttcaggtaaataaacgaagagttgaaatactaacttttgggttcccagacaaagacgagtattaattagtaatatcgtagtgttgataactcaatttgtgaaaaatttccatttgtatcactgttttcccaaaggtttgatatataaaaaatattaattgtcttttatgtacttcactcgatagttttgcatttctcaactgtaagtaaaagtaaattttcttaacaatagtgacactggtgacttttttttatttatttattaccgttctatatttatctttatattcataacagtcagtatggtgatcaagctgtttaatgttgaatccatcaatctcctcaatcgtgaaaaaagattacacttc

SEQ ID NO: 5272 - DNA, 733 bp, Diabrotica virgifera
ttttgattaatcaacacctatatagttgaacaaccccgaatccaattttaaatacggggttgttttgaatgtaaaaaaaataaagctgttatatcaattatcagataaacaaatttaagattgtaacgcttgcactacaaactttattttgttacttctaactaagctttattacttcaaaacagtatgtgtaattaattaaaaataataataaaacctcattcacatcgagcattttttgtttattaattacgaattccttttgtttattttaagtttattgtatacaaaagtttgtttttatctattgaggcagtacgaagtctgccgggtcagctagtattttataaaaaatgaatataatagttcaggtaaataaacgaagagttgaaatactaacttttgggttcccagacaaagacgagtattaattagtaatatcgtagtgttgataactcaatttgtgaaaaatttccatttgtatcactgttttcccaaaggtttgatatataaaaaatattaattgtcttttatgtacttcactcgatagttttgcatttctcaactgtaagtaaaagtaaattttcttaacaatagtgacactggtgacttttttttatttatttattaccgttctatatttatctttatattcataacagtcagtatggtgatcaagctgtttaatgttgaatccatcaatctcctcaatcgtgaaaaaagattacacttc

SEQ ID NO: 5273 - DNA, 869 bp, Diabrotica virgifera
  misc_feature (853)..(853): n is a, c, g, or t
ataccaattttcgtttttctgaatagaggcgttctggaggtattttagaggaactgattgcatggcgccgtcttcaaggagctctggctcccttaggaagcattttcggactgggtggattgggttaaattgtcttaaaattgtctgaggaatctcctgtcttcgtttgtcggtggagtttctggataccctgtatataaatgaaaaattaaagacagctatgtttcatttcggttcagagatgatccaccatccccatacgtccgtttcggtgtctccaaacctcttcagtgaagtctactactactgaaggggctactcatacatctatgagttacgaaatatcaggaaaatataatatagttatatctcagttacgttttcttgaatattttgtttcaacaaagatcatcaatgcgttaatcttccactatttctgtaattgttattcgagatgacctacataatttctattaggaatcatacggaatagaaaattatggagaaaatattcggatttgggataggaaaattttgagaaaagattttatgtggtataaagcaggctaatggtaaatggcaaaaagaacaaaccaaaatctaatggagatgtataagagtcataaaataacacaaaaaatcaggacgcagaaagttgaatacttgggacatctttaacgaatgccacaagaaagaaaaagttttgcaagcagaagaacaagggaagaatagaagagggagatcaagaaggaaatggtttgatgccgtccggactgacatcgaagaaatgggtacaagggactagagagaacaagtgaaggaccggaaaaagtggaagaatctggtcaagacncgaagccaaagggggc

SEQ ID NO: 5274 - DNA, 614 bp, Diabrotica virgifera
  misc_feature (598)..(598): n is a, c, g, or t
  SmartBlast Evalue=3E-30; Info=Endonuclease-reverse transcriptase n=1 Tax=Bombyx mori RepID=D7F170_BOMMO
tataaatttgagaaggtaactgaatttgagtaccttggagtatcagttacaaataggggaaacgaagagagagagatagataaaccgttgttaaaaggtagcaaagcagtaggttcattaaacgcactgttgaaggcaaaaaacgtgtccagggcagccaagatccgagcgtatgaaacaatagcctgagaccaacggtttgtatgcatgtgaaacttggacaatgaaccagaaagtagaaaaaaagctagagatttgggagagaaaaatattgagaaaaatttttggtggtataaaggaggctaacggggaatggcgcagaagaacaaaccaggagctaatggagatgtataagaaacctaaaataactcagaaaatcaaggcacagagagttagatggttgggtcatgttttacgaatgccacaagaaagaaacgtcctaagagttttatcagcagaagaacaagggaagaatagaagagggagatcaagaaggaaatggtttgatgccgtccggactgacatcgaagaaatgggtacaagggactagagagaacaagtgaaggaccggaaaaagtggaagaatctggtcaagacncgaagccaaagggggc

SEQ ID NO: 5275 - DNA, 780 bp, Diabrotica virgifera
ttggaaaaaatgtcaccactctataatattttggattgttttcttctgttgcttttttaattgaatctctctagtatttttcttaaattgtaaacactctctcggttgtgtgtcacattcactgtagatctgagctcattcgccagaaatggtgcttgtgcaatctaaataagaaagaaagaagtaccgggtgtcccagtgagaatggctctcggccatatctcgggaaccgtttgtggtgcagttttgagagggaaatatttgtgacaaggttggctcgggaaaaggcctggaaattattttcataattgtaggtccaccgctagagggcgtaattgaatatcaaaaattaaaaaatcaaaattttacaaaatttacctaatgaaagggcactggaaatccaatcatcgtattcttcataaaattctgcgcatatttgatttcacaagtttaagtctacctttgcaaataagaggtgggggtgagtgggaaccttcttatggaaaaatggctagaagtccggttctgctaaatcgaattttgcatacttggacttgttgaaatcagctcttttttgtcaatgtaagtgtcttattttcgaaatagcctaataagtaatatgcaagctaggaggctttatttgattattttcagaaatctagttttctttggaaaatattaaatacaagtatgcatttttaatcctgtacatattacaaaattagcaacataataccgaaaaccgcatgtcgataccttttttctatctcgagatatctt

SEQ ID NO: 5276 - DNA, 714 bp, Diabrotica virgifera
actttaactacacttttgtccaatttttccacatctgaggaaattttcggttatgtgagcaaaattgagctctctgattagtcgaaattgtgaacatttttcagtattaaagtattgtactgggtgtctcaataagaatggctctcggccatatctcaggaaccgtttatagtacagcattgagaaaaaaatatttataacaaaagttgcatcgggaaaaggcctggaaattattttcataattgtaggtccaccgctagagggcgtaattgaatatcaaaaattaaaaaatcaaaattttacaaaatttacctaatgaaagggcactggaaatccaatcatcgtattcttcataaaattctgcgcatatttgatttcacaagtttaagtctacctttgcaaataagaggtgggggtgagtgggaaccttcttatggaaaaatggctagaagtccggttctgctaaatcgaattttgcatacttggacttgttgaaatcagctcttttttgtcaatgtaagtgtcttattttcgaaatagcctaataagtaatatgcaagctaggaggctttatttgattattttcagaaatctagttttctttggaaaatattaaatacaagtatgcatttttaatcctgtacatattacaaaattagcaacataataccgaaaaccgcatgtcgataccttttttctatctcgagatatctt

SEQ ID NO: 5277 - DNA, 787 bp, Diabrotica virgifera
  SmartBlast Evalue=1E-47; Info="Skeletal muscle and kidney- enriched inositol phosphatase, putative n=1 Tax=Pediculus humanus corporis RepID=E0V9K5_PEDHC"
acattaagtatataaagcttaattaatcgctgtctgctttaacgattgggaatatattgctaacgcccagaacactggttactttatcttcagtttggctaaagtatactaagcaatagttgcctttaaacttgttcggtagatccgggaatgtcacttcgtattttttggtttcgtgggatctactgctactgctgctctcgtcagttggagttgcgcatttgctaacgtattcgtaggttacgtagtcatctaaggcacagaaatcctccttaaaaagtccaatccaatcttcgtcactttccttaatgtccttggtgagtttgtagtatgctttattttctccttctacgtcccaactaataaccttgtcaaattcaatcacagactcagcataatctgaaaatacctggtcaacagatggttttgaatctctctgaacccttggaggtggtaaatatggcatgggtatctttataaaaaattcagcagtaactggtttatgatcactaaggacatagtttggatgcgacttgtacgaaagctgatctactttcagtgttacgttttcatagttgttggagttaactttatacagtattctgtcgcaccaagctggacgtctcttgtagtcatagcaaggagttcctacagtaaacttaaacgtaggaggaaacgttggatcctgctctgtcaattcgctgaatgcttcaccctttctcatcacgtaccgcaattggtcatgttcgaacaaagctttcatttcttttttcaccactagtctttc

SEQ ID NO: 5278 - DNA, 724 bp, Diabrotica virgifera
  SmartBlast Evalue=2E-51; Info="Skeletal muscle and kidney- enriched inositol phosphatase, putative n=1 Tax=Pediculus humanus corporis RepID=E0V9K5_PEDHC"
acattaagtatataaagcttaattaatcgctgtctgctttaacgattgggaatatattgctaacgcccagaacactggttactttatcttcagtttggctaaagtatactaagcaatagttgcctttaaacttgttcggtagatccgggaatgtcacttcgtattttttggtttcgtgggatctactgctactgctgctctcgtcagttggagttgcgcatttgctaacgtattcgtaggttacgtagtcatctaaggcacagaaatcctccttaaaaagtccaatccaatcttcgtcactttccttaatgtccttggtgagtttgtagtatgctttattttctccttctacgtcccaactaataaccttgtcaaattcaatcacagactcagcataatctgaaaatacctttataaaaaattcagcagtaactggtttatgatcactaaggacatagtttggatgcgacttgtacgaaagctgatctactttcagtgttacgttttcatagttgttggagttaactttatacagtattctgtcgcaccaagctggacgtctcttgtagtcatagcaaggagttcctacagtaaacttaaacgtaggaggaaacgttggatcctgctctgtcaattcgctgaatgcttcaccctttctcatcacgtaccgcaattggtcatgttcgaacaaagctttcatttcttttttcaccactagtctttc

SEQ ID NO: 5279 - DNA, 754 bp, Diabrotica virgifera
aacgacccaattactaatgacaaggaaaatccaggtccggattaacaggaggagataaagtgattttgaccttgaaccaacaccctgtatattgaagttttgaagatttgtctgcgcattttaaaagagcctaaaaaactgtgattaaaggttcattttaattttttgcgcatatgatttaattacatcaattttgaaattacatatattgaaattttaaagaactctgagattaaaaacccggtattattaacttttaataatttaatgtaaatggatcaatactcattttaaaaatacttaatacttattaactacgctggcttcatggattctcttaatttgaagctgtatgcacaatcattaaaaattagaattgcgagaattgggatattttaatgatttagtaaagaataaaaaacagctatatttaataaaaaaattcgtttaaacaattcaacaatttaacaaaattaaaaatatttgaatataacagttgctcaaaatgtccgccattttgttcgatgcatttccttgctcgttttaaaagatttcgaacgattttctaattacattgggattgttcttaatttttctggcagcttcttgtcaccttgacagaataatcaatcaatacgatttcaaaattgtcgtaatttaattatctgcgcaaaaatttgacatgcacattttaatgcagtttttatgctcttttaaaatgcgcagacggattttcaaagtttcaatatgcggg

SEQ ID NO: 5280 - DNA, 735 bp, Diabrotica virgifera
gccggcacctaatgacaagaaaagtccaggtccggattaacagggaaatgtaaagtggtcgtgaccttgaaccaacaccctgtatattgggatttggaaggtttgtctgtgcattttgaaagagcatagaagactgtgattaaaaggtccattttcattttttcgcggttgatttaattacatcaattttgaaattttaaagaactctgagattaaaaaaccaggtattattaacttttaataatttaatgtaaatggatcaatactcattttaaaaatacttaatacttattaactacgctggcttcatggattctcttaatttgaagctgtatgcacaatcattaaaaattagaattgcgagaattgggatattttaatgatttagtaaagaataaaaaacagctatatttaataaaaaaattcgtttaaacaattcaacaatttaacaaaattaaaaatatttgaatataacagttgctcaaaatgtccgccattttgttcgatgcatttccttgctcgttttaaaagatttcgaacgattttctaattacattgggattgttcttaatttttctggcagcttcttgtcaccttgacagaataatcaatcaatacgatttcaaaattgtcgtaatttaattatctgcgcaaaaatttgacatgcacattttaatgcagtttttatgctcttttaaaatgcgcagacggattttcaaagtttcaatatgcggg

SEQ ID NO: 5281 - DNA, 810 bp, Diabrotica virgifera
  SmartBlast Evalue=2E-20; Info=Proton-coupled folate transporter n=1 Tax=Camponotus floridanus RepID=E2B0I1_9HYME
aatttaatcatggtctggaaaattaagttaactgtagaaattccgctggttctgtcattcattagctttcaattagtagaagcggttttactgaaccttattatattccgtacgtgttacgtccttctcggtcacgacaaaacagagtgcggctatctgggaaacaccaacaatgaaactattacggaaaacttggaagaggaggttcagccttatgctaataccataatgatggtgagaacagcgaccgagcagtcctttaatttattgttgtgtatgttggtaggaccgtggtccgataaaattggaaggaaactgtttatcattacgagtctagcaggaatggccgttggtatgtctttactagcccttaacagttgttttgacacatctccatggttctttatgatcagcgatatcccttcaatgctaactggaggaggtactacatattttacagttgttttggcctatctttctgatttgtctacggatgaaactagaggtgtaagggtaaccgctcgacagtccttacaaacttcaaagaaatgttccaagtacttactaaacagagagagaacaataccagagcaataattatattatctgtaataactttaataatagttaattttgtcggaagtggagaatttggagtaatgtatctctttctattaaagaagctacactggaatgtcaccaaatatactctctatattagtgttactactatcgtttctgttactggaaccatgacaagtatttatgtattgcacaggaaaaaggcaatgccagaatccttgttggcta

SEQ ID NO: 5282 - DNA, 676 bp, Diabrotica virgifera
  SmartBlast Evalue=7E-34; Info=Adenylate cyclase n=1 Tax=Aedes aegypti RepID=Q17KH2_AEDAE
aatttaatcatggtctggaaaattaagttaactgtagaaattccgctggttctgtcattcattagctttcaattagtagaagcggttttactgaaccttattatattccgtacgtgttacgtccttctcggtcacgacaaaacagagtgcggctatctgggaaacaccaacaatgaaactattacggaaaacttggaagaggaggttcagccttatgctaataccataatgatggtgagaacagcgaccgagcagtcctttaatttattgttgtgtatgttggtaggaccgtggtccgataaaattggaaggaaactgtttatcattacgagtctagcaggaatggccgttggtatgtctttactagcccttaacagttgttttgacacatctccatggttctttatgatcagcgatatcccttcaatgctaactggaggaggtactacatattttacagttgttttggcctatctttctgatttgtctacggatgaaactagaggtgtaagaatggcaatctacgaggcaagcacagcattgggtaccgtaataggaactgcaataagctcttatatattttatgcaacaaattatacgacagtctttgccttggcagccggtagcactctattaggaattctttatacggttttctttataccggagtccttac

SEQ ID NO: 5283 - DNA, 790 bp, Diabrotica virgifera
caggtgctcacaggacacgggtgttttagagcctacctctctaggtttggaaaggttgacactgacgaatgtctatactgcagacacccggacactgttacacataggatgctagagtgcaacagatggatagtagaaagaaatagaatggaaagagagacaggtgtgaattttgtgacagtgcgagaaatgattgagagaatgattgaaaataaaactggttggactagcatacacaactatatccgtgtagtgatcaagaagaaagaagaggagaaaaacagctgtaccaacgataggggtgagagggaaatatactgtgagtagaaggcagagggaataagttttgacgggaggcgaatatatgagatatattgtatgagacagactgggaaagaagctctaataataaaaaaagcccaatcttgggaccaaaaaaggggggaatggggaaaatgaagggcctccttgcttacagtctgtggataaatgaaggtaaagtgcttcggaagcgatgtcgaccttgcagtggccattccgctttcggagcgctggatgacagaggagggtctggtttagcaggtaggcattcggcgtagcctcggcgacgagagagcgttttaaagtacctcgggaactatcgctggtactaccaagaatgaatcctgcactaaggtcagtcaggcggcgttctggactgaggtgtcttttgaagattccagacccccctctttaaagatgaaaaaagaaaaaggttggagcacgttggttctctctccacttgtaaaat

SEQ ID NO: 5284 - DNA, 695 bp, Diabrotica virgifera
tgtatattataacggacttaccttttttctatcatttgtgacgcactgaaaaatgctcatgaaaagaagcatatacgtctccctatgcttctttttccttggatcttttcctgtataatcagttggagcatggagcatacacaactatatccgtgtagtgatcaagaagaaagaagaggagaaaaacagctgtaccaacgataggggtgagagggaaatatactgtgagtagaaggcagagggaataagttttgacgggaggcgaatatatgagatatattgtatgagacagactgggaaagaagctctaataataaaaaaagcccaatcttgggaccaaaaaaggggggaatggggaaaatgaagggcctccttgcttacagtctgtggataaatgaaggtaaagtgcttcggaagcgatgtcgaccttgcagtggccattccgctttcggagcgctggatgacagaggagggtctggtttagcaggtaggcattcggcgtagcctcggcgacgagagagcgttttaaagtacctcgggaactatcgctggtactaccaagaatgaatcctgcactaaggtcagtcaggcggcgttctggactgaggtgtcttttgaagattccagacccccctctttaaagatgaaaaaagaaaaaggttggagcacgttggttctctctccacttgtaaaat

SEQ ID NO: 5285 - DNA, 835 bp, Diabrotica virgifera
  SmartBlast Evalue=8E-21; Info="CG4562, isoform A n=7 Tax= Sophophora RepID=Q9VDT3_DROME"
atgaaagagtgatagcctacatcttgcaaaatacaatattttattaaataaatagaaatctcgtccgcactcttctatttacaatattaaaacgaaattgataagtggcagttatttgaacttcgtattttttgtggaattacttatcttaaaatgttaaaacgtacatatatataataaaagagtaatcgttagtgtgaaagttaactgtgacattttttaacaaagtgagttaatactttgtgttgtgtactttagtgactattcgtactggaaataattgtaaatacttaaaagattgtgtaacaagtgatggaggaagtgtcatttttagaacagaagaaaagaaaacgacatccaatcgaaacaacaaactgcgtgtcaaaattatttttttgttggttaccagtctacctctttagaggactcaaaaatgaagtcaccgaagacgatatgtacgtcactgtcgaaaaacaaaaatctttatatcttggtacgaaactagaacaagcatggaagaaacaactgaaaaagaaacggccttctcttctactggctataggttcagtgttcaaatgggagttagcaatatatgcagtgttcaacgcttggttcgagctattgcggatagctcaaccattcttgatatcaaagctggtctcgtacttccaagatggcgccaaaagcgataatattgtggtttgtgccattactttaattattgtcacatttgctcaagtagtgagcatacaccactatcagttaaaagttatggttttaggaatgaaaataagagtagcggcatgtgctctaatatacagaaaagccctaaaac

SEQ ID NO: 5286 - DNA, 654 bp, Diabrotica virgifera
  SmartBlast Evalue=5E-21; Info="CG4562, isoform A n=7 Tax= Sophophora RepID=Q9VDT3_DROME"
gtttagtatattaatatattctgtatctgttttgaattttttacaaactgacaatttatttattcctctgaaactgggtggtatatgcaaattaaatttggatattcatcatacggattgtgtaacaagtgatggaggaagtgtcatttttagaacagaagaaaagaaaacgacatccaatcgaaacaacaaactgcgtgtcaaaattatttttttgttggttaccagtctacctctttagaggactcaaaaatgaagtcaccgaagacgatatgtacgtcactgtcgaaaaacaaaaatctttatatcttggtacgaaactagaacaagcatggaagaaacaactgaaaaagaaacggccttctcttctactggctataggttcagtgttcaaatgggagttagcaatatatgcagtgttcaacgcttggttcgagctattgcggatagctcaaccattcttgatatcaaagctggtctcgtacttccaagatggcgccaaaagcgataatattgtggtttgtgccattactttaattattgtcacatttgctcaagtagtgagcatacaccactatcagttaaaagttatggttttaggaatgaaaataagagtagcggcatgtgctctaatatacagaaaagccctaaaac

SEQ ID NO: 5287 - DNA, 1124 bp, Diabrotica virgifera
attaacgtcatagatttttgtgaagacgcttcggttttttcaatttcaagttccgaatgaggtaaaaataaaggaaattgggatactgtgtgataagaaatctaatgggagcacctgtacaacaagggaagccaaatagacgaggtcctggaaatatgagaggtcgtggtggaaatccaaaaatgcgaggacaagggcgtgcgtttaatggacaaccgccatttgggaatcctggaatgatgcgaggtggtttcagaggaaatatgaggcctccacaaggtcccccaatgcgcggtggaagaccccctatgagaggacgtccgcttccccctccgccaccgagaatgatggggccgagagggcccatgatgcccccaatgagaccacctccaccaggcatgaggccacccccaggtatgagaccacctccaccaatgatgatgatgggtcctatgcccccaccaatgagaggtggcatgtttagaggaggaatgagaggcaagggcccatttcgtccaggaccaccaatgatgcctaacaacaatttcagaggtatcaacaaaaaaagcaaaattatcagaaaaggtaaaactgttcctgttgacatagatctaaccaaatcttttgtgacagaagccattaaggcggaatttgaaaagaaagaagaattcttctataaagccaagacttctcagaagaaagaagattggataaaatacaaggagcaacgagataaatgtgcagatgtctatgaggaagccgaaaagggatctgcagggcagcaggaggtgcgtatcccgcagctattgcccgaaactaatttcacacgagttacggcacctattgattatacagcagacatccacttataggacagtagcaaaaagtcagctgaatcagaggtgaaaaaaaattctgaaaatcagccctctgggcaacaatagtcaagtctcagttcagtagctgagacttcagttaagaagtcactcctgcttaagttgggccccacatttaacgttaactgaaaatacatttggcctcttaatttaaaataaattcaatgtaattttaacttggtgtaattgtaaattatgaaattttgttctcgtatgtctgtggatcca

SEQ ID NO: 5288 - DNA, 363 bp, Diabrotica virgifera
attcattgcaagtatgataagtgaatagaaaactgctttgaactatttacaaatgttttatggaatgtcagcagtagctgaactatctaaattaattggatatctttacaggacagtagcaaaaagtcagctgaatcagaggtgaaaaaaaattctgaaaatcagccctctgggcaacaatagtcaagtctcagttcagtagctgagacttcagttaagaagtcactcctgcttaagttgggccccacatttaacgttaactgaaaatacatttggcctcttaatttaaaataaattcaatgtaattttaacttggtgtaattgtaaattatgaaattttgttctcgtatgtctgtggatcca

SEQ ID NO: 5289 - DNA, 818 bp, Diabrotica virgifera
gaatattgggagtttgaaactggccattaaggggaatggttgtgatctagagggtgaagagcttacatagaatctgtttttttttattgtttggaaccattttgtgttctgctgtatgtttgttaaaggttctgccagtttgaccgttgaacgtttttataagtggatacaaacttatatgtggtgacggtccaaaaacttacatcggccaaactgacacaacctttaacaaacgtatagcagaacacaaaagggctttcaatgaagaatagaaaaacaggttctacgtacgcacttcatcttctgaatcataatgattcttttattgaccagtttcacattctccatattcaaaataaaggcctcaagctatctttattagaatctgggtaaattggtgaattgagaaatacagatgtagttctgaattaccaatttgagacaaagagctatcccctcttcaacatattcagttaaagactataaagtgtagacacatagtacaaatgcatcacttgagaaatgcactctgccgaaactgctgcggtatctttaatttgtaatacattttgtggaagtattggaaacaaaagtattttgtgttttattattaggtaaaatgaacttccatcaagtaacagtcgcatccatcacctgtttagttttcattaaagtatttagtctgaattaggagcttttttgttttccagtaaataaaacttcactaatacttaacttaatacctacaaattagaacctgtagtatcgcatttaataattctcagtttttgacatatcgtgtttatgtatgacgtgta

SEQ ID NO: 5290 - DNA, 654 bp, Diabrotica virgifera
ttatgtatatataggtttttacttgattattttaaatcattgtgactttgtattctaataaagatagcttaaggcctttattttgaatatgaagaatgatccagaaggtaaagtgcgtacgtagaatcggtgtttctattattgagagcccttttgtgttttgataaaggttctaaactaatctaaaggtgtaaactatttgttaaaggttctatcagtttgaccgatataagttttcggacaatcactacatgtgagtttgtatacacatacaacactgtgtaattctcccctcctaaatttgttcagttaaagactataaagtgtagacacatagtacaaatgcatcacttgagaaatgcactctgccgaaactgctgcggtatctttaatttgtaatacattttgtggaagtattggaaacaaaagtattttgtgttttattattaggtaaaatgaacttccatcaagtaacagtcgcatccatcacctgtttagttttcattaaagtatttagtctgaattaggagcttttttgttttccagtaaataaaacttcactaatacttaacttaatacctacaaattagaacctgtagtatcgcatttaataattctcagtttttgacatatcgtgtttatgtatgacgtgta

SEQ ID NO: 5291 - DNA, 945 bp, Diabrotica virgifera
atgtatgttttcgccagaaatcacaaaagaaccaccgctgggaaaaatataatctttttctacgaccgtttaataacatggtcattattcgctattttttcatagataatagcacccattactgtacccgtgagtaataattcattactcacgggctgaagttactcacgggtcattactcacgggctgaagttagattcaagtagcgcatgccacttttaatattaatcgtatataaactgcaaataaaattacttaaacttgtttatttaatacaataattattgtaatttataccaataattaacttcgaaaaatttttaaatgaattttaactgtaacaatgtcagtctatttttgacgtttatatcttgtttactaaaaattttgacgtttatcatttaatttagtgacagtgacatatagcgcattttgtttatgttaattggaatttataactaacattgtgtttatttttcaagttatattgtgttaaatatgatataacatattatgtatagttatattattatattatatatacatagttaaatgtaaatatacattataactatatacgaagtacgtccaccgacaacagccatttattagattcactgacagtaggtacaaatttaagcttataatttttcggaaacgaatagaacttacattgactatttctagttgtatttttacaataaataagaatttagtaatagtaggcaaccaattattcagccacgtactaggggtaaatagcatttaggtatattcttgtaaattattataatttaaatctagagtagttgataattaaattttttactaattaaaataaaaaaaaaggtcgtagaaaaagtatagtattctactcgcatgtaatggctattactcactctgatgaattacgacactcgcctacggctcgtgtcgcaaacttca

SEQ ID NO: 5292 - DNA, 535 bp, Diabrotica virgifera
agtgacattagcgcattttgtttatgttaattggaatttataactaatgttgtgtttgttttaaagttatattgtgttaaatatgttataacatattatgtatagttatattattatattatatatagttgaatgtaaatatacattataactatatattatgaaatacgtccaccgacaacagccatttcctatttattagattcactgacagtaggtacaaatttaagcttataatttttcggaaacgaatagaacttacattgactatttctagttgtatttttacaataaataagaatttagtaatagtaggcaaccaattattcagccacgtactaggggtaaatagcatttaggtatattcttgtaaattattataatttaaatctagagtagttgataattaaattttttactaattaaaataaaaaaaaaggtcgtagaaaaagtatagtattctactcgcatgtaatggctattactcactctgatgaattacgacactcgcctacggctcgtgtcgcaaacttca

SEQ ID NO: 5293 - DNA, 1186 bp, Diabrotica virgifera
  SmartBlast Evalue=3E-75; Info=Translation initiation factor 5A n=1 Tax=Glossina morsitans morsitans RepID=D3TMH0_GLOMM
ggatatttaatttatatttaaccaattccaagtaaaaattattgcgcaaaaaccatgaataggttcactttgatcaagttttgtaattcaataaaaacttagtctaaacaatatcaaaacaagtctttaaaaatgctatgtttattcacttcaaaaaaaaatgtcaacaagagtctagaatcacctaattcttacttatttagtagtaaaaaaaaacaaaaactcacaaatatcatacagggaccagtaaagctgggtttcacagaaaaaggtggttctaaaaatggctggtaatcactgttaaaaaagaaaatttacagagaattaaaattaaattacgatttattgaacgaaaatgtagctttgcaagtaattttgccaacaaattacagatagatgtaaaattacaccacatcaacgtcggatgccggttgacagggcgtcgggcattagataagctttatttgtttgataactgatggtccaatatgataaatatattcataaaatataaaagcggggatccccagtagacaaaggatgacgcctgcgttctcgaccccgctgtcttacaaccggctattattatttatcaagagcagtatttgtttttactgcaataacgacttcttcaccacaagacttcagtacggtacataatatatccttgccggcagcatgttctgcacgtactgtaccaccaacttcaccatctggaacttttaaatcttcacgtaattcaccattatcagacataagggataagtagtcatcatcagaaatatctgtcaactgataatcttcacgtttaacatggggtacatccatgttgtgtgtagaaggacaaatatcttcatattttttacctgtgaagatatcaataccaaccaagtggactttagcgtgaccatgtttaccagttttggatgtggacatttcaacaatcttgcatggtctagacttcaacattacgaaaccgtttttacgtagggctgagcattgcatagggtatgttgcagaggctccagagtctccagtttcaaaatgtgagtcatcgagattatctgccatttttactactagttattgtttcaaccttgcaagatgtgatcaagatggaaactaatccaaaagaggcaaattgggcatgcgtcccaagaaataaacggttccgttttgaggcgcg

SEQ ID NO: 5294 - DNA, 860 bp, Diabrotica virgifera
tacatatgaatgggggtaagagcatgattacatctcaatccatttataactcttatgaaatggcgatttgatacagaatgaaaccatcttttaatgggaatttcaggtcgcatttgtttgtaattactaccagttctcgtgtttcgataatacctttgccaattttctttttggtgtcgtctactaataatatcaatatccgaaatgggtagtaagttcatgggaagttcttcgcctatttctagggcggatttggctagcctgtctactatttcgttacccctaatgccctgcgtgtccctttatccatgatataatgatgttttttcctaaatttgcaattttattataaagagtcataatttccagttctatatgattgagttgttggtacttatgtacgttagttagtctatcaacgacactcttactgtctgtaaatattatgcagctatagggttcgttactaaatatgtgtcttaaagcaaaaagtatcgctatcatttcagcggtgtatatcgatgattcacaaggcaatttgaataattttttaaatccactttgaatattgattattgcacatcctactttgttttgtactttggatccatctgtatagtaaaactgataatgtggccatttatgaagtataaatgattgaaaaacggctggatttaaattaatatccataaaaaagtattaatttgttttgagaaaatttcttctaatacatgggaatacataggtgaaacttgattttcataagtatagaaagtacttcggtattgagatattttcaagtaactatctacaagaagtgactattttttctttgtccaatatttatgagttagatctaa

SEQ ID NO: 5295 - DNA, 608 bp, Diabrotica virgifera
tacatatgaatgggggtaagagcatgattacatctcaatccatttataactcttatgaaatggcgatttgatacagaatgaaaccatcttttaatgggaatttcaggtcgcatttgtttgtaattactaccagttctcgtgtttcgataatacctttgccaattttctttttggtgtcgtctactaataatatcaatatccgaaatgggtagtaagttcatgggaagttcttcgcctatttctagggcggatttggctagcctgtctactatttcgttacccctaatgcccgcgtgtccctttatccatgatataatgatgttttttcctaaatttgcaattttattataaagagtcataatttccagttctatatgatttagttgttgggacttatgtacgtaagttggtctgtcaacgacactcttactgtctgtaaatattatgcagctgtaggattcgttactatatatgtgcaaaaactttaaaatgcataaacatatcaaaataagcatattaagccagattttgttactcggcggtgtttggggccgctgaacacgaattcgccatcagaactgataccctgatacgaagagatgcaaggt

SEQ ID NO: 5296 - DNA, 822 bp, Diabrotica virgifera
  SmartBlast Evalue=3E-51; Info=Death-associated LIM only protein DALP n=1 Tax=Manduca sexta RepID=Q9U6W9_MANSE
ctgttcgattagtaccgtgacaagtgcagtgttgttcaattcacacccacatttaacaatatgagttcagctgctaccgaaccaaaagtttgccacaagtgcaaagagcaggtcaaaggaggagtgctaacagctttaggtaagacatggcatcctgaccatttctgctgcaatgaatgcaaaaatccgataactgagaattcattccacactaaagatgattttccttactgtacgccttgccatactaagctttttgcgtctatttgccatgcctgtgaccaaccaattttggacaaatgcgttcaagcgatgggagtcaactggcacgaagaccatttcttgtgcgaagactgcaaaaccaaattaattggacaacaattcatggacgtcgcaggacttcctcgttgccagaaatgctacattgccaaacatgcagataagtgtaaaggttgtggcaaaccaatccctgataaggctatcgtagctttggatgctaaatggcatcaaatgtgcttcagatgttcaaaatgctcgaaacctatcatgaaggaccagtcattccaagtagatagcggcaggccccactgcgtcaagtgttaatttcagcagctatttatttcattggttatgttctagctaatgtatgatctatcgaacatggcctgtattttctacacaaacaatacaacacactctcgcaaaacgtattaaatttacacattgacaagttattattatacaaatattctatgtattatgtttattttataaaatttgagctttttatcatgttaaaataaagttttcgccaagaaaaaa

SEQ ID NO: 5297 - DNA, 645 bp, Diabrotica virgifera
  SmartBlast Evalue=3E-27; Info=Death-associated LIM only protein DALP n=1 Tax=Manduca sexta RepID=Q9U6W9_MANSE
tgttgggcgctttgtgcggagagtttatcggggatatcggaaattaacatcacaaaatgagttcagctgctaccgaaccaaaagtttgccacaagtgcaaagagcaggtcaaaggaggacaaatgcgttcaagcgatgggagtcaactggcacgaagaccatttcttgtgcgaagactgcaaaaccaaattaattggacaacaattcatggacgtcgcaggacttcctcgttgccagaaatgctacattgccaaacatgcagataagtgtaaaggttgtggcaaaccaatccctgataaggctatcgtagctttggatgctaaatggcatcaaatgtgcttcagatgttcaaaatgctcgaaacctatcatgaaggaccagtcattccaagtagatagcggcaggccccactgcgtcaagtgttaatttcagcagctatttatttcattggttatgttctagctaatgtatgatctatcgaacatggcctgtattttctacacaaacaatacaacacactctcgcaaaacgtattaaatttacacattgacaagttattattatacaaatattctatgtattatgtttattttataaaatttgagctttttatcatgttaaaataaagttttcgccaagaaaaaa

SEQ ID NO: 5298 - DNA, 922 bp, Diabrotica virgifera
agtatgaatagatagtatgaaaaatagaggatacggcaacggtgtttcaagtgatggtcggattcaatgccaaaatctacgcagacatattagggtgcactaatatccaaaatggtctttaatgaaaaattacgaattactgttttttaatgaggggctacgatacttccaaacaattctcctcttgttcaacgatacttccaaacaatcctcctctccaaaaggctacggtacaacaaaatttaaagctctgagtaaactggacgaataaaatatggcattcgaaaaggaagacagtgttacaaattacaataaaattttagatttaatgcagagattcgttgaaaattcacatatatcctcaaacagagctgcacaaatacatgatgtaaatcactattcagtcttgcacacattgcatacgaatttatttaaaccctacaaaatccatttattgcaagaattatatgaagatgacataaccgtagatttgactgaaactccaagccaaaactagacgtttcgggcacctcatgaaacctcataaaaatttatgcctgctatagaaaagcttaattttggtatccattttggatatattgaactatattttaaaatcgaaaaattttaacaccttccaaaccataatatttgttttttaacccattcgcatacacgactgcatatgcagacacttacaaacggaaattactgtctgtatatacagtcgtgttcttgaatgggctaaacagtctttgaaccgcacaattactctcttctcttaaggtactagtacactttagaagaccaagataatcatttttttcaagaattttcctctcagaacctctaataaaaatgaacataaagccatttacatattaatatctaactcttagagagtacaaaaaatatatcttcc

SEQ ID NO: 5299 - DNA, 537 bp, Diabrotica virgifera
agtatgaatagatagtatgaaaaatagaggatacggcaacggtgtttcaagtgatggtcggattcaatgccaaaatctacgcagacatattagggtgcactaatatccaaaatggtctttaatgaaaaattacgaattactgttttttaatgaggggctacgatacttccaaacaattctcctcttgttcaacgatacttccaaacaatcctcctctccaaaaggctacggtacaacaaaatttaaagctctgagtaaactggacgaataaaatatggcattcgaaaaggaagacagtgttacaaattacaataaaattttagatttaatgcagagattcgttgaaaattcacatatatcctcaaacagagctgcacaaatacatgatgtaaatcactattcagtcttgcacgcatagggcttttcattcacagtcatttgtttcgagcttctgtcacatgtcgtatagtccgtgtatattaatattatacacagattatacaacatatgacagaagctacgaacaaatgacaatcg

SEQ ID NO: 5300 - DNA, 839 bp, Diabrotica virgifera
  SmartBlast Evalue=2E-34; Info=Serine/threonine-protein kinase tousled-like 2 n=3 Tax=Aculeata RepID=E2BA69_9HYME
ggtggatatgtagacatgtgcggtgctagcaagttcgagcgctatggaagggctccttcaagctctcctggtccagcgatattgctacaacttcggctaccagtctagtaatccagtgtgttaatccagtccagtgctgtattggatcatacagtccacattattccagtccttccaacgctgtaagatcgttatacactatatgtaggtgtgcactaaaatgacaatggtgacgagaaagaagtttagaaattgtattaaaactgttaaattattactggtagaagaattaaccgaagaactaaacagaatgcagcggacttggatgtcagctggatctcagatacagatggcaccaaagtctacagtcaacacaactccacatagccaagactccaatatgagtacaggttcctctcatagtgacaaagaggtggatccgaatactccagaaaaactacccaggacgccgagcgaaaggaagcggaaacggaaagcggaagacagcggcggaggaggtgtgggtgggccgccgttagcgaaaggagccgttcgaagtcaacaggcggacaagaagatcaacgaatatttcaataaacattcgggtaacagtcacagccccatcagggcaacagtgaagagtccgtcacctcaacaaccctatgcaatggtttcttttcagttacctccttcaccgcaacaggtggggatgccgtccccacaagtcggttataatacggcttttgaattttataagccaccattgggggtgccacctcaaactatggttcacaaattaatacagactgaattaacatgtcataggatacaagagttcg

SEQ ID NO: 5301 - DNA, 617 bp, Diabrotica virgifera
  SmartBlast Evalue=1E-34; Info=Serine/threonine-protein kinase tousled-like 2 n=3 Tax=Aculeata RepID=E2BA69_9HYME
ggtggatatgtagacatgtgcggtgctagcaagttcgagcgctatggaagggctccttcaagctctcctggtccagcgatattgctacaacttcggctaccagatgtcagctggatctcagatacagatggcaccaaagtctacagtcaacacaactccacatagccaagactccaatatgagtacaggttcctctcatagtgacaaagaggtggatccgaatactccagaaaaactacccaggacgccgagcgaaaggaagcggaaacggaaagcggaagacagcggcggaggaggtgtgggtgggccgccgttagcgaaaggagccgttcgaagtcaacaggcggacaagaagatcaacgaatatttcaataaacattcgggtaacagtcacagccccatcagggcaacagtgaagagtccgtcacctcaacaaccctatgcaatggtttcttttcagttacctccttcaccgcaacaggtggggatgccgtccccacaagtcggttataatacggcttttgaattttataagccaccattgggggtgccacctcaaactatggttcacaaattaatacagactgaattaacatgtcataggatacaagagttcg

SEQ ID NO: 5302 - DNA, 736 bp, Diabrotica virgifera
  SmartBlast Evalue=1E-53; Info="ATP synthase subunit delta, mitochondrial (Fragment) n=1 Tax=Camponotus floridanus RepID= E2A9J2_9HYME"
ttcgtcattctgatacattttttttgggtactttgggttgtacttgggataaaagacctttttgtatttccaaatacattgtcatataaattaaaaaagaaatggctgccatcagatctatgtctcgccttcttattaatagatcacttcaaaccactgcaaagaggacctatgccgaccaaatgaacttcacatttgcagctggaaatcaggtttactatactgcaacttcagttaaacaagtagatgtgccatctttctctggtagctttggtatcctccccgcccatgtacccacactggctgtgctaaaacctggagtagtcactgtttacgaagatggtggtaatgttaagaaaatctttgtttccagtggtactgtcaccatcaatgatgattcatcagttcagattcttgctgaagaagcccacccagtagaaaacattgatgtcaatgcagcaagagacatccttaccaaagcccagagccagttatcatctgcaagtacagatgaggcgaaagctgaagcctccattgccgttgaagtgggagaagcgttagtcaaagcggctgaataataatttaatttttgtaattttatgtaaatttaataaattagtgtctcaatggtactgttcattttaaaacaacaacatattagatctatatctctatgagttacaatttttacaaaaacgagaatcaatccaaatacataatttttgtttaccgttaa

SEQ ID NO: 5303 - DNA, 721 bp, Diabrotica virgifera
  SmartBlast Evalue=1E-53; Info="ATP synthase subunit delta, mitochondrial (Fragment) n=1 Tax=Camponotus floridanus RepID= E2A9J2_9HYME"
atttttttttgggtactttggtttgtacttggaataaaatacccttttgtatttccaaatacattgtcatataaattaaaaaagaaatggctgccatcagatctatgtctcgccttcttattaatagatcacttcaaactactgcaaagaggacctatgccgaccaaatgaacttcacatttgcagctggaaatcaggtttactatactgcaacttcagttaaacaagtagatgtgccatctttctctggtagctttggtatcctccccgcccatgtacccacactggctgtgctaaaacctggagtagtcactgtttacgaagatggtggtaatgttaagaaaatctttgtttccagtggtactgtcaccatcaatgatgattcatcagttcagattcttgctgaagaagcccacccagtagaaaacattgatgtcaatgcagcaagagacatccttaccaaagcccagagccagttatcatctgcaagtacagatgaggcgaaagctgaagcctccattgccgttgaagtgggagaagcgttagtcaaagcggctgaataataatttaatttttgtaattttatgtaaatttaataaattagtgtctcaatggtactgttcattttaaaacaacaacatattagatctatatctctatgagttacaatttttacaaaaacgagaatcaatccaaatacataatttttgtttaccgttaa

SEQ ID NO: 5304 - DNA, 721 bp, Diabrotica virgifera
  SmartBlast Evalue=2E-45; Info=Sorting nexin-25 n=2 Tax= Formicidae RepID=E2AR00_9HYME
aaagtcgttaaaagttccgggacgttgttgacaaacatttcttgggccttctgggcagtctgaagcttctcctctttcgatctaatgggacccatctccgccaaggtaccacctggccagaaattcttcaggataacagtcaagtagtagtgaagcatttcttccgaaaaccaccatgaaatcgtatcataaatctgtcgattaatgttgcggccatacgtaacttgtacaaaacctaataagagtttttcggacatacttaaatacgcctctcatgtcaaatatttcgcttagcagcgcgtataaaggttcagctattgtatcatcagccatttttaaggaatttccgttacttttagtaaaatctacagtatctacagtatctaaacactgagatatgtcgtcctcttcgctttctttaaggattgagtacgtgtctttactttggtcactgccactcttaaagagcgttgaaaaagaaaatcttgatttcttagtatttggtgtagaatgcttcaaattttctgagctggggctcagaaatgcgtatatagcttcgctttgattcaatctgtcatcctttaagacaaactaaaaagcaaagaaaaaaattgtctagtaattaattatttatactacgatacctacaaaacacaaaaaaataagcaagaaaccctaagataaagtgagacaaggtaaaaagctacaattattatatgta

SEQ ID NO: 5305 - DNA, 723 bp, Diabrotica virgifera
  SmartBlast Evalue=1E-51; Info=Sorting nexin-25 n=2 Tax= Formicidae RepID=E2AR00_9HYME
aaagtcgttaaaagttccgggacgttgttgacaaacatttcttgggccttctgggcagtctgaagcttctcctctttcgatctaatgggacccatctccgccaaggtaccacctggccagaaattcttcaggataacagtcaagtagtagtgaagcatttcttccgaaaaccaccatgaaatcgtatcataaatctgtcgattaatgttgcggccatacgtaacttgtacaaaacctaataagagtttttcggacatacttaaatacgcctctcatgtcaaatatttcgcttagcagcgcgtataaaggttcagctattgtatcatcagccatttttaaggaatttccgttacttttagtaaaatctacagtatctacagtatctaaacactgagatatgtcgtcctcttcgctttctttaaggattgagtacgtgtctttactttggtcactgccactcttaaagagcgttgaaaaagaaaatcttgatttcttagtatttggtgtagaatgcttcaaattttctgagctggggctcagaaatgcgtatatagcttcgctttgattcaatctgtcatcctttaagacaaaattcaaatacttttgtatttgttgttttgtccttttccagagatactttatcattttttccgaacagaaatttaaaagtattcgtaggcaaatccaaattacggacatctgaacacagagggcgcaattttt

SEQ ID NO: 5306 - DNA, 1026 bp, Diabrotica virgifera
gagattcgcataaataaacaaaatatattagttaaactggtcaacgaaccaagggtacaaatttatctatagatataaaaataattttataaaatatatttaacatagtcccgagattcgcatcaattaacaaaatgtcccagttaaactggtcaaggaataaagaaatattctgacagtttacggatatgaaatctctatagtaaccatcaaactcgagtccaggttcatcataagtcaggttacatttaatgctaattgagagtggtggatgaacgactggaggaactagaaaaaagtccgctagtttcgtttctgctaggtggtcatttgtcaagaaaagatctaaaaggctgttgtgtattgtcacatgatgattacattggaaaagattgtggaaactgcaaacatttgacataatctggatgcaagacccttcgtgtaatggtgctctacctgaaatcgcaacagagctaaagggaccattttgccagagagcatgaggcaaattaaaatccacaaccatgtgtaggcttaacttaggcatcaataaagcgagtgataccagtgtctcagagaaagtgctatacaactgtgccggagtgttgggaggtaaataaactgctcctaatataaaactaaaaacactggatccaaccttaatgaagacctgttcaatgctatccggtacttggagacaagtacttggtattgacttgtgtcctcctcctcttttaaagattgcctgatagattagtggatagatctggcaatagagtcagaacgtttgaatttgcctttgccagattgcacattacgttactcgttacttggtttttttatgctgtgagattaccttgtgatttgcagataaattataaataattaaatatggctggttacagaagagcatacactattactgaaggataacttaatcctcagttggatacttaggtcaaaagcatattatcatatgagaggcaccatcctactggaagggacctggaacatgccgagatattc

SEQ ID NO: 5307 - DNA, 423 bp, Diabrotica virgifera
tgatcattaaaatatggcagcttgaagatacctcaaatgaagattcacggaatgaaatattggtgtttggcaatgttgccatgttcttgtaatatatctggcaagagcatgcgataagtatgaattataataaatcgggagagagcactctaaggcctaaggtatttgggacaacattaagtgtcagaacgtttgaatttgcctttgccagattgcacgttatgttacttggttttttatgccgtgagagtacattgtgatttgcagataaattataaataattaaatatggctggttacagaagagcatacactattactgaaggataacttaatcctcagttggatacttaggtcaaaagcatattatcatatgagaggcaccatcctactggaagggacctggaacatgccgagatattc

SEQ ID NO: 5308 - DNA, 877 bp, Diabrotica virgifera
  SmartBlast Evalue=8E-37; Info=Tudor n=1 Tax=Tribolium castaneum RepID=D6WEA3_TRICA
ctacatttccttgtacttctgtaacttgcgatctataccacatctggtcttcgctgtattgggcacaacatggaattcctggtttaacggaagaaaagtccataaaagcactttctagacataaactttgaagctcttccataagagttgttagttcctgttctttttttactaactgaacatagaatcggttacaactatacacaaaactaactttgactggctggctaaaacctctcactaacattactggctcgggatacgagtgttttgctgctctaattacgacatcgagtgcactggtcatagtttctggatcccacagttcgcatttgggtaaagctgttctagtaggcgatggtaaaaccttcatatgcaataatctagtgtctacgaactttttgaaagcgcttctcatatcaattgtgacagtttcttgcacacattgccgaacagttcgaacttggcattggaaagactaaccgagagaatttacctgttggtaaacaagtatgtgcaagatacaaagatggtaaatattaccgggcaaagataacgagcaacacacttggagctgaggaatttgttgaggttagcttcattgactatggtaatagagaaattttaccagtagaagcaataagatcggtcgagggacatttgagttctttgcaggccattccacccctagctacaggtttcatttttgctgaggctcattgtgtaggagggggagaatggaatgagacagatttcgaaagattggccaaagaaattaaatatagagaagtccagtgcactatcctaactaaagctacgcattattatcttattaagatattttttgaagggaatgatctgtgtcaccttttgattc

SEQ ID NO: 5309 - DNA, 570 bp, Diabrotica virgifera
  SmartBlast Evalue=6E-61; Info=Tudor n=1 Tax=Tribolium castaneum RepID=D6WEA3_TRICA
ctacatttccttgtacttctgtaacttgcgatctataccacatctggtcttcgctgtattgggcacaacatggaattcctggtttaacggaagaaaagtccataaaagcactttctagacataaactttgaagctcttccataagagttgttagttcctgttctttttttactaactgaacatagaatcggttacaactatacacaaaactaactttgactggctggctaaaacctctcactaacattactggctcgggatacgagtgttttgctgctctaattacgacatcgagtgcactggtcatagtttctggatcccacagttcgcatttgggtaaagctgttctagtaggcgatggtaaaaccttcatatgcaataatctagtgtctacgaactttttgaaagcgcttctcatatcaattgtgacagttgccttttctacgccgaacagtgagaaacgtatggccattactttcggcagaacatatttgaatggaatttgaaaaagggattccaatggtagtgtttcgtaatttccgaagtctacaaagaaaactttaaattgag

SEQ ID NO: 5310 - DNA, 783 bp, Diabrotica virgifera
gcctgcattaagatgaaaaacataataatatttactcttttgattgtggctattgttcaggtgcagtgtcaagatggtccttgtggtcccaatgcagaatttgtacaatgcaaatcttgttgtgaggaagaaacctgcgaacgtagaaatccaccatcatgtaacatttgtccagccgtgtgcaatccaggttgtgtttgtaaaccaggatatatcagacagagaaaggatgaaccttgcgtgaaaaattgttgaaaatttaatataaataataattatagttgaactaaaatgtgaattagttttcttttgactgtggtaaataagcagtgaattattttaactaaattcggatttaccacaaaaataaaaacttttaatattttatggtaggggagcccaagcggggatttttgcagttactcgagcgcgtcagattatcatatggggagaaacctggtaccctgcagatgtacctctaccatatattggctcttaacacaggggagttcgttaaggggggccgaaaaaaatctatccttagaaaaactcgaaatcgtcagattaagataaggtaagttaagtacatgcaaaacagtgtatatttcaaaaaatctgacgatttgagcggggcgtaaggaaatgggtgagtcccaaagtttcacaagaaaaagcgaatatttcgcgaaatgaatgacagatcgaaaaactaaaaaatatgtgcttaatatttttcaaaaatctatcgaatgataccaaacacgactttccacggagaggggt

SEQ ID NO: 5311 - DNA, 654 bp, Diabrotica virgifera
gcctgcattaagatgaaaaacataataatatttactcttttgattgtggctattgttcaggtgcagtgtcaagatggtccttgtggtcccaatgcagaatttgtacaatgcaaatcttgttgtgaggaagaaacctgcgaacgtagaaatccaccatcatgtaacatttgtccagccgtgtgcaatccaggttgtgtttgtaaaccaggatatatcagacagagaaaggatgaaccttgcgtgaaaaattgttgaaaatttaatataaataataattatagttgaactaaaatgtgaattagttttcttttgactgtggtaaataagcagtgaattattttaactaaattcggatttaccacaaaaataaaaacttttaatattttatggtaggggagcccaagcggggatttttgcagttactcgagcgcgtcagattatcatatggggagaaacctggtaccctgcagatgtacctctaccatatattggctcttaacacaggggagttcgttaaaggggacccgaaaaaaaatctatccttaaaaaaactcgaaattgtcagattaagataaggtaagttaagtacatgcaaaagagtgtatatttcaaaaatctgacgatttgagccgggcgtaaggaaatgggtgagtg

SEQ ID NO: 5312 - DNA, 824 bp, Diabrotica virgifera
  SmartBlast Evalue=2E-27; Info="Multisynthetase complex, auxiliary protein, p38, putative n=1 Tax=Aedes aegypti RepID= Q174X6_AEDAE"
actatcagagtcagaactgtagctgagtggggaactgattaccctggttagataccgtaataagttgacttctccaaaaattggaacgtgtgatactatgagttctgtgtcgatgcccacatttttccatatcaatttaatgttaacacttggtacaccacgtttcggtacgtaacttgccaatgagtcacccagctgtttggcattttcattcaatgttggaactgaggagtgtatatgggatgtaaccttcaattcgacaatgtcatgtagtagcttttgaattatcagtaatgaatatggcggatttgttggacttgcattcacaacaagatcaggaagagcattcagcttttctgctgaaatacttggacaggtcttgtttgttcctactgagtttgcattaattttcaaatccaatttaattgagagaatttgtttcttgaggtctgcaagctgttttaaaacttcttcttgcttagcttctaaatctgccatgccaggaatttgatggttattctggtcgaatatcgtcgatttttcgttcgttctggaaacgtgatctgtggactcgtcgaccatatcttgggagtcttttgagtagatattttttaaagcatacatacacttcggcttgtcaatcttttggtcgtggtgaattatttgtcgtgttcgatacatttttatcggcccattcatgtttcttcgctaaaatgttacaattaactttagaaattcgatatataattttttggtaatcagtcttcgtctgctaaataatttttcactggcgttcttaaaaaaggggtccagatgatattgta

SEQ ID NO: 5313 - DNA, 622 bp, Diabrotica virgifera
  SmartBlast Evalue=2E-26; Info="Multisynthetase complex, auxiliary protein, p38, putative n=1 Tax=Aedes aegypti RepID= Q174X6_AEDAE"
actatcagagtcagaactgtagctgagtggggaactgattaccctggttagataccgtaataagttgacttctccaaaaattggaacgtgtgatactatgagttctgtgtcgatgcccacatttttccatatcaatttaatgttaacacttggtacaccacgtttcggtacgtaacttgccaatgagtcacccagctgtttggcattttcattcaatgttggaactgaggagtgtatatgggatgtaaccttcaattcgacaatgtcatgtagtagcttttgaattatcagtaatgaatatggcggatttgttggacttgcattcacaacaagatcaggaagagcattcagcttttctgctgaaatacttggacaggtcttgtttgttcctactgagtttgcattaattttcaaatccaatttaattgagagaatttgtttcttgaggtctgcaagctgttttaaaacttcttcttgcttagcttctaaatctgccatgccaggaatttgatggttattctttaaaaactgtttaacctggtcgaatatcgtcgatttttcgttcgttctggaaacgtgatctgtggactcgtcgaccatatcttgggagtcttttgagtag

SEQ ID NO: 5314 - DNA, 807 bp, Diabrotica virgifera
aaagaccagcgttaacattccgggtgaagtcaagacgaaaggtgataagaccggagagaaaatatcttgtaggagagactctaatagtaattccccaagagctgatgtaaaaacaagaagaaatagtgatgctagtgcgcggaaatcagacgacagtgatgcggaagctcataaagaaagagcacaaatcgaacgaatggaaaaaattaaagcagaaaacaaaaaactagaaaaggaaaagtcagaaaaagagagaattgagagagaacgacacgaacatgaaaaacaagaaaaaataagactagaaaaagaacgaatagaaaaggaacgcttagaaagagagagtgaattagaaaaacaaaggttagaaaaagagaaaagagataaggatgaagctgacagaaaacttaaagaagaaaaagaacggcgagaagaagaagagaggatagagagagaaaaacgagaaagggaacgagttcggcataaagaagacaatcaagaaaaaagaaaagatgaacacaacaagcatcgagaaactcacagtgataataaacatagggaaaaccaccttgataaacacatagaacataaagagaaagaagaaaagatagtaaaccaaataagcacaaatcaacatagttttgagaagaaaatacatttggatagggaatctgaaaggagaaaagaaagcattaaagaaaatagggataacaatatacacgaaaaacataaacatttagtagacaatagaatcagagaactagttgaaacaagacacatgtctatagaccttgataaaacaaaatt

SEQ ID NO: 5315 - DNA, 624 bp, Diabrotica virgifera
gaaacttagattagagagagaagaaaaagcccaaagagaaaaggaacgtctagaaaaagaaagacaggaacaagagagacttgaacgactaaggctcgaaagagaacggaaagaaaaagaagataccgaaaggcgactgcaggaagagaagctggaaagagaacgacaggagcaagagcgaatagaaaaagagaaaagagataaggatgaagctgacagaaaacttaaagaagaaaaagaacggcgagaagaagaagagaggatagagagagaaaaacgagaaagggaacgagttcggcataaagaagacaatcaagaaaaaagaaaagatgaacacaacaagcatcgagaaactcacagtgataataaacatagggaaaaccaccttgataaacacatagaacataaagagaaagaagaaaagatagtaaaccaaataagcacaaatcaacatagttttgagaagaaaatacatttggatagggaatctgaaaggagaaaagaaagcattaaagaaaatagggataacaatatacacgaaaaacataaacatttagtagacaatagaatcagagaactagttgaaacaagacacatgtctatagaccttgataaaacaaaatt

SEQ ID NO: 5316 - DNA, 736 bp, Diabrotica virgifera
gttttacttattgttgattgtacaataaatttttattgagagcacacgttcattttcgtgtaattgccttaaaatatgtcttatttttaaaagccactcactgtttcattgtttcgtaagctcaaagagggcaattctaacagtgttgccatagttatataaaatatgttttcttatgaaaaataaagtctttcgattttgaataatgttagtagtttatagttatattttctactaacccaaatataaaaaggtcgtagacaaagtatagtattctacttgcatgtaatggctattactcactctgatgaattactacactcgcctacggctcgtgtcgcaaacttcatcatcgtgagtaatagccatcattacatgctcgttgaatatatactaattaatcacaatagaaggatatctctcgatttaataataatttctattacgtatattaaattgtttcatatattcacaataaaaaatagcacacaaagtattgcctttaaggccggtatactcgtacacgaagccagtaagaaagcaagtaatgttggcaggttacttgccttttgtaatcgtttacttaagtcatatgttacttgccttgccttaaaatataacttaagtaaacgtttagaaaaggcacttgctcactttcagacgtagcttcttctaatttataaagctgaagatgacaaatgccaaaacacctcctgaatatttcaacaattttttt

SEQ ID NO: 5317 - DNA, 687 bp, Diabrotica virgifera
gttttacttattgttgattgtacaataaatttttattgagagcacacgttcattttcgtgtaattgccttaaaatatgtcttatttttaaaagccactcactgtttcattgtttcgtaagctcaaagagggcaattctaacagtgttgccatagttatataaaatatgttttcttatgaaaaataaagtctttcgattttgaataatgttagtagtttatagttatattttctactaacccaaatataaaaaggtcgtagacaaagtatagtattctacttgcatgtaatggctattactcactctgatgaattactacactcgcctacggctcgtgtcgcaaacttcatcatcgtgagtaatagccatcattacatgctcgttgaatatatactaattgtaatttaaaaatagtagacattttacaagacagtttgatttcattatcacttatccgtattttctttgctttgatggtcctcgtttaatgctataattttgtgccaagctcatttttatcattaatcatttgtagaaggatttttgattaactgattccttatattttctccaagaatacattttttatttgagcaccaaaaaggtttttatttgaacattcgggacactcctttatctcagtgaactcgtttagaagcagatcttggacaaagcacaatatattga

SEQ ID NO: 5318 - DNA, 704 bp, Diabrotica virgifera
caggtcgttttgccagagcttggaaagcaaacgaacgatgatttagaagaggactaggggaactccaaaattacatttcaccacccgtgtactcatctaagtaaaaaagctgttcattctcaaattaatcccttaatttgtaatctcacattattcttaacttcctaaacttttgtagtttcaccgtgtataattgaaacattgggaaacatatcgagtaatattttaattattagagtccagtgaactttctgcaacctgggtagttgccggatcgtggtgtttccatttgaactttctaagttttgcaataccttcctcgattggactgtggtttgcaagttcatagttccttgttaccatgcaagttaatattgatgatttgtgtgttttggtgatattgtaaatgagcccaagggactgttttgagtcgcagtctgtttggagtagttgcctcgttgacgggtgcgtgggtcattgtttgaagttgcgtcgctgaagtgtgattgtcggtggctgtcattgggggcagtttgattatagagggttgcctgaccaacgactgtagtgtaattgacagtggctgtcaataggggccatattttttgctccacacttcaaccatttatttaccatcgtcgatcaagaataatcggacacagggcattagaaaacaattcgaacatgatatttacatcaaattg

SEQ ID NO: 5319 - DNA, 686 bp, Diabrotica virgifera
gagcagagtggcttggagtatccggtcttttgtcattaaataaacacagttcaaagacaatctgaagcttgatacatacctttccaagtcggtgttcagtctcgaatcaatccgttgatttgtaatctcacattattcttaacttcctaaacttttgtagtttcaccgtgtataattgaaacattgggaaacatatcgagtaatattttaattattagagtccagtgaactttctgcaacctgggtagttgccggatcgtggtgtttccatttgaactttctaagttttgcaataccttcctcgattggactgtggtttgcaagttcatagttccttgttaccatgcaagttaatattgatgatttgtgtgttttggtgatattgtaaatgagcccaagggactgttttgagtcgcagtctgtttggagtagttgcctcgttgacgggtgcgtgggtcattgtttgaagttgcgtcgctgaagtgtgattgtcggtggctgtcattgggggcagtttgattatagagggttgcctgaccaacgactgtagtgtaattgacagtggctgtcaataggggccatattttttgctccacacttcaaccatttatttaccatcgtcgatcaagaataatcggacacagggcattagaaaacaattcgaacatgatatttacatcaaattg

SEQ ID NO: 5320 - DNA, 891 bp, Diabrotica virgifera
aatataatggatcctgaaacagtttattccaatagacgagtgtgtcatcaacatttcgggcctatatttttttcggattgtaaaagattataaggtatttatctaaaaaatcttcctataagatattttttcaaaaattttcattcaactaaatattaaacgaatgttgaaggggtaaatattaaacattaatttattacaaaaacagtgctttcacatgacacatagcagtagtgtttagcattttgaaaacaaattggaatatttgaggttttcagtaaaaccaaagaatacatatctcccaagaaccgacacaaacggattatctatgaactaaatttttatgcgcatgtgccagatcggccatttctcaatttgtatgaatagcaaataattttggtgacatttgtcttgtacaggatcggcgtttgttgtcacagttgtagtttgtagctcataatattttgtatagacttattttctatatatattttcttatatagcctacaactattaattgttattttccaacatttatacaatttaattctttttgagatatcttgattatgtgaattaattattttaagctttttcatgaactataaactatcgtataaaaaattaattttgtatttattgggatttcacaaagaatttgaatctaaaatatcatacaaattctctaacctttctttgacctctactgtaccaaatgcatctgcaggaagagcacaaagtcatattttatatgtgttcattccacaagccacgtgctgtgtttaaaaagttgagaatccaatactcacaaaaacttccataaagtacttttatcagcaaacctaaattaaatttaataaactatgtttcattaaattgtttctgtagttt

SEQ ID NO: 5321 - DNA, 506 bp, Diabrotica virgifera
aatataatggatcctgaaacagtttattccaatagacgagtgtgtcatcaacatttcgggcctatatttttttcggattgtaaaagattataaggtatttatctaaaaaatcttcctataagatattttttcaaaaatttccattcaactaaatattaaacattgatttattacaaaaacagtgctttcacatgacacatggcagtagtgtttagcattttgaaaacaaattggaatttggaatatttgaagttttcagtaaaactatgatttaaattttgtttataatggtatttgagccccgattacagcactacctactaccataactttagacaaaacctaagacttttagtatttttttatgtagatggaactattaaggtaattttaagttattgtataattattgaataaaacatttctgtttgtttatttaaacaataaagcttttctgttgtttatctgtaccttttaattcaaaaatcactcaaaatttattgttt

SEQ ID NO: 5322 - DNA, 708 bp, Diabrotica virgifera
agagaggtcaagtacgtattgtcaaactgtaaagagattatagtaggtatatattcccatttattacttaatataagagatttgacgtatcttaagataggttaattcttgtcttgaaatagcaagttaatcttatccacaaaccacttataatcttcggggtataaaagcgaaaaaatcgtttattagagaagcctttcgaattcaccaaaatgaatactttattggtagcttcagtcttctgcgccatcttcgccatcggcctgaccgtacctgttctgacaggtccaggtccagctttccaagttaccgatggagaatgtgagaatgtctcaagagacgaattggtccgccaagagcaagtaaataagggtggttttccatttgttaccaaacaggctgatgttgaatacttaggagatccttcaaaagttatttactgcgttcaagctctcagctctgatgacccaagcgttgaatctgttgctgaaattacagttggtggagttggtcacgatttcgtaaatgtacatttgacatctaagaaaggaggacccctacattacgatgttgaaatttacgccagggccccaaataataatattaaataataagtacattaatcgccctaaaccactattgaaaatatatttatataggtaataactaaataaagatcaaatatagttaatgtataaatgatcaaaa

SEQ ID NO: 5323 - DNA, 709 bp, Diabrotica virgifera
agagaggtcaagtacgtattgtcaaactgtaaagagattatagtaggtatatattcccatttattacttaatataagagatttgacgtatcttaagataggttaattcttgtcttgaaatagcaagttaatcttatccacaaaccacttataatcttcggggtataaaagcgaaaaaatcgtttattagagaagcctttcgaattcaccaaaatgaatactttattggtagcttcagtcttctgcgccatcttcgccatcggcctgaccgtacctgttctgacaggtccaggtccagctttccaagttaccgatggagaatgtgagaatgtctcaagagacgaattggtccgccaagagcaagtaaataagggtggttttccatttgttaccaaacaggctgatgttgaatacttaggagatccttcaaaagttatttactgcgttcaagctctcagctctgatgacccaagcgttggttctattgctgaaattacagttggtggagttggtcacgatttcgtaaatgtacatttgacatctaagaaaggaggacccctacattacgatgttgaaatttacgccagggcaccaaataataatattaaataataaatacattaatcgccctaaaccacttgtgaaaatatatttatataggtaataactaaataaagatcaaatatagttaatgtataaatgataaaaaa

SEQ ID NO: 5324 - DNA, 722 bp, Diabrotica virgifera
taagaatggaataaccgcataagcagaatagtggaggcacatgtggtcaaaatagcaagagataaattaccaatcggtagaagaagtagaccgaccgcgcctaagatggagtgaaaatcttcgatagaggtatcaatccgccaatgaacaagcagaattacttataaaacggaagaagaagaacaatgatttagtgcgacgttttatgtttgtttttaaagtccacagcaaagccgatagtgacaacaaataaactgtgaatcgtttggaatggtacaatggtcttatgaccagaagtatcagagataaacatgtctttcctgaactaagaagaagaaaaatcgtttggagagcagaagaaacatttttttgtacaaatttatgatatccggctcggaggaccatattatgtaatccagtacattcattctatcttaccattaacattcctttagaatgtacagtacttataagagtaataagtttgttcgtaattgttcattgaatgtttttcgccaaatcgtgttccagcatatagattagtatacaaatgcaatactgttcttctccaatttttatttaaaaagagtaccccactctggtggcgcagtttcgacctaggcctaatgctatgtgatttcaaaaaaatccagtgataggcatgagattttactgaactttttatatgtgtacatttattttaaaagtttatatataaacac

SEQ ID NO: 5325 - DNA, 677 bp, Diabrotica virgifera
gatactaaatagaaaataagaatggaataaccacataagcagaatagtggattcacgtgtggtcaaaataacaagagataaattaccaaagatggagtgacaaccttccatagcggtatcaatccgccaatgaacaagcagaattacttataaagaagatacttgtttttaaagtccacagcaaagccgatagtgacaacaaataaactgtgaatcgtttggaatggtacaatggtcttatgaccagaagtatcagagataaacatgtctttcctgaactaagaagaagaaaaatcgtttggagagcagaagaaacatttttttgtacaaatttatgatatccggctcggaggaccatattatgtaatccagtacattcattctatcttaccattaacattcctttagaatgtacagtacttataagagtaataagtttgttcgtaattgttcattgaatgtttttcgccaaatcgtgttccagcatatagattagtatacaaatacgcaatactgttcttctccaatttttatttaaaaagagtaccccactctggtggcgcagtttcgacctaggcctaatgctatgtgatttcaaaaaaatccagtgataggcatgagattttactgaactttttatatgtgtacatttattttaaaagtttatatataaacac

SEQ ID NO: 5326 - DNA, 748 bp, Diabrotica virgifera
gctccgattagtgtaacaccttccgttgtaatgttatttctgccagtgatgtttttagagctaataatataatgaactacgctaaaatatgacgtcacatgagtggaggattataaaaatttcgaaagaacatttgggtaaatcgtatgatcccatttttgctttaatcgcttttactactactactactatcggtttatagcgttctccgacgcgacgcctgtgaagttaggggttgctagacgaagacactaccccgaacaaacaaactgaaactttttacagaaactttattcttatataattaaatgtacaattacattacgttgaccttgagataggtcggggataacccatttctcggtaaccagatcccctgtacgcacgagagtgcaacgacaacgatgtctcaggtactcgaccttcctatttatatctgttatagttaaaaatactgccaatatgtatgaccatacatggtgaggtactatacatacattaagaatgacgtgtgctttctttgcggtctttcaaatgagttcaatactttgaactttgctactatcgtaataaattatacaaattgcaattataatattatgaccttatttttataataaataaattaggaaaattcctgagcgttgtcgtgtaccatcagagattgttgaaccagcagccaaaatatttgtattggagttcatattcaagctgttggtggttcacataatatattgggatggataaa

SEQ ID NO: 5327 - DNA, 660 bp, Diabrotica virgifera
gaatactttgccgttaagtatatcaaatataacaaaatataacataaaatattatactaaaagtgtagagctgcatacctcaatctatatgcgaaccagaaaactccatcctttaacttaaggcaggatcgccatgtgaagttggggttgctagacgaagacactaccccgaacaaacaaactgaaactttttacagaaactttattcttatataattaaatgtacaattacattacgttgaccttgagataggtcggggataacccatttctcggtaaccagatcccctgtacgcacgagagtgcaacgacaacgatgtctcaggtactcgaccttcctatttatatctgttatagttaaaaatactgccaatatgtatgaccatacatggtgaggtactatacatacattaagaatgacgtgtgctttctttgcggtctttcaaatgagttcaatactttgaactttgctactatcgtaataaattatacaaattgcaattataatattatgaccttatttttataataaataaattaggaaaattcctgagcgttgtcgtgtaccatcagagattgttgaaccagcagccaaaatatttgtattggagttcatattcaagctgttggtggttcacataatatattgggatggataaa

SEQ ID NO: 5328 - DNA, 795 bp, Diabrotica virgifera
atcgagaagttattggatacgattgatgagctagtggagacaaaaatgtggaagagaattgtggacatgaaacgaccaaatgcgaataattatcaggataggactataatgaaatcacacagaggggcagaacggaacaaaaagaaaatgaaggttactaagaatgtggcagtatatggtcaatatcaggtaacatcccttaaggatcctagtctattacaaaatgtaactttaagtcaagtgtgtgaaagtgagtgtaagctgttgttttgtagagtttgtaaaatttgtatgcaccgttatcagtgtgactgtacagtatatgagtgagaaataccttgtgtcagcatgtgcacttggtaagaatgtatgaggagagcgtgggtactaactctgttttagatgatgctgcaaggtgtttgggagaaacttcaattatcaaatcaaggcatgaggaggaaattaatgaatttatcagagggacgctagaacagacaaatctaacccaggaaaaaaccaaacgaaatcttcaacaggaatacgtcaataatatgatgaacaaattagatgacgaatcttttgccaaatttatgagggtggttcaaggaccgttggaaaaacttaatgaagaggcaatgaacattacaaagaagcgaaaaatggagaagcagcagtattttccttcaaataaaaaaaggaatgttaagtaatgttatttatagatttttagtcctaggtgagatttagaggagttttatctcgccattgcaccaataaagggctctcctcttgaat

SEQ ID NO: 5329 - DNA, 610 bp, Diabrotica virgifera
tgtgttgggagtcaatcaccctgtatactacattaatggacaaaaatatgaaatattttgaaattatcataaatatgtttaatgatttcatgttaccaaataattttttaaggggggggggtgtcaattttttttattattttaaatgaaagtgattaactgcaagaatactccctgaacatttatattgatgggagtaaaattaccagagatacagcatgttaaatatttttactgcatgttagactcgctttgctgcggtttcgcgccagcacgcttgagcgtaatgacaaacgtttaacaacggccccccttctcttttgtagattactccgctattcaaagacatattccggtgtgcgccactttacgatttgacagacaaaaacgaagacgaagttgtcaaaacttaaaacgcgtttttttttcaaaactactttttccaaggcaatgaacattacaaagaagcgaaaaatggagaagcagcagtattttccttcaaataaaaaaaggaatgttaagtaatgttatttatagatttttagtcctaggtgagatttagaggagttttatctcgccattgcaccaataaagggctctcctcttgaat

SEQ ID NO: 5330 - DNA, 734 bp, Diabrotica virgifera
  SmartBlast Evalue=1E-40; Info=Trinucleotide repeat-containing gene 6C protein n=1 Tax=Harpegnathos saltator RepID=E2BXV2_9HYME
cgccccaggtaccgcctatgttcgtagagggtgtgtgaccccaaggggttttctgttgaggttgtggaggaggttgtccaccgtttcgaagattcgcttcccataattcggtaccattattcacagccggtttccatggtggtggacctccggaaccatccattttaatgggaggctcggggctactgggaatgtcccaatttgtatcttgattgacatgttgtccgccccagccatcctggctaaaaatggcttctctcatactgttgagttgttccaattgttgtttggtattgttgcttggtccattgttgttctgagaattagcagtagaggtaggaggttgactattaggtggcattgcattgttatttgcagttttcgttccaggttgaccccaaccagtgttgtttgattgggaggtaggtggttgctggccattgctcttatttgcattgttgttaccagattgagaaggtggcgtgccccatccagaagtaccagtgctgagggaactttcgcctccccctctaagtctcaaaggcttgtacagctcttgatagctgttgtcattatttgtgcaggtatgagtttcaatgttcgcatttggtatgcatcatggtcgtctttttcatcgttgttatcgcagagtgttttagtatcgtatttagttgaattcagtacattgaggtcatcgcgtagtagttcgaggtcatcagacttttgattgggaa

SEQ ID NO: 5331 - DNA, 668 bp, Diabrotica virgifera
  SmartBlast Evalue=1E-40; Info=Trinucleotide repeat-containing gene 6C protein n=1 Tax=Harpegnathos saltator RepID=E2BXV2_9HYME
cgccccaggtaccgcctatgttcgtagagggtgtgtgaccccaaggggttttctgttgaggttgtggaggaggttgtccaccgtttcgaagattcgcttcccataattcggtaccattattcacagccggtttccatggtggtggacctccggaaccatccattttaatgggaggctcggggctactgggaatgtcccaatttgtatcttgattgacatgttgtccgccccagccatcctggctaaaaatggcttctctcatactgttgagttgttccaattgttgtttggtattgttgcttggtccattgttgttctgagaattagcagtagaggtaggaggttgactattaggtggcattgcattgttatttgcagttttcgttccaggttgaccccaaccagtgttgtttgattgggaggtaggtggttgctggccattgctcttatttgcattgttgttaccagattgagaaggtggcgtgccccatccagaagtaccagtgctgagggaactttcgcccagaactgagagatatgcgggcaggtaatacagaaaccatgagaattatggatcccagagagaccatgaggcaaatgtctaatagtgatatgagaggagatccgcgcggtattactggaagactaaacggagcaggagctgaagc

SEQ ID NO: 5332 - DNA, 758 bp, Diabrotica virgifera
gttttgtattttggtttagaatttaattcgttagaagttagttctatactccaggttattatgcagaaaaatatccatagtaaggagacgtaactcatggctgaagaaccttaggaactggtttggatgtaataacaatgaattatttagagccgcggtttcagaaataaagatcgctctgatgattccaacttttgaagcggagacagcacctagagaagaagataaaaacacagtttatggatagttttgtgtcattttttaatgtttccatatttataaatttaattaacaatattgtttactttttaattttattccctttataagaaatacctacatgttaacatattgtgtaaaaatcaaatctactaaattactaattagtttaattccacaagcttttcacctatggctaagtacgattgtggcatctgtcagattcgtcaataattacatgaaataagtctcgacacacccaatacagtatatgacgtcataattaatgacccactgaaaaatgatcatgagaacaagaatactttcagataaacgtgttgtcaactgttacaaaattaatttctgaaaatgataagcaaactgggcaatataacctcaatcaaagtgataatacagttgtcatggtcaatttattactgttgtgtaaagctgatattgtttcaaccaataacagaaagataaacaaagacacaacttaattcggacttattctttattgttttaaatgataataataa

SEQ ID NO: 5333 - DNA, 643 bp, Diabrotica virgifera
gttttgtattttggtttagaatttaattcgttagaagttagttctatactccaggttattatgcagaaaaatatccatagtaaggagacgtaactcatggctgaagaaccttaggaactggtttggatgtaataacaatgaattatttagagccgcggtttcagaaataaagatcgctctgatgattccaacttttgaagcggagacagcacctagagaagaagataaaaacacagtttatggatagttttgtgtcattttttaatgtttccatatttataaatttaattaacaatattgtttactttttaattttattccctttataagaaatacctacatgttaacatattgtgtaaaaatcaaatctactaaattactaattagtttaattccacaagcttttcacctatggctaagtacgattgtggcatctgtcagattcgtcaataattacatgaaataagtctcgacacacccaatacagtatatgacgtcataattaatgacgcactgaaaaatgatcatgagaacaagaatatacaaaaattggtggaaatgcataattgcacgttaatgtgcataaaacgcgttccaaagctcataaacatgtcaaaacaagcatactaagggccagacccta

SEQ ID NO: 5334 - DNA, 703 bp, Diabrotica virgifera
ctcccgtcttcgtttgtcaggagattttctggaaaccctatgtatcacgttacgacaagggccatacaagtttgtacttatttgtaacgaaatatgcatttatgataatttcacagaaaaaatagaatccttcagagctaacatctacatttctttataccaatgttaaatgttgatgtccgcagtatttatcattatttgttatactatactttaatttgttgtagttacctgttttgatttttgtagatttttaattattaaccctaatatttaagaagcagattttatttgagacacaactattcaaaactaataattatttcttaataatcttcataacctgaattccgtcatttagacacatttttatatataaaaatagaaacaaaatattttatataaaaccctggacatgattgttacatatctactccactttgatacaacaacttaatataaaatggtaatatatcaattacaataactttatcatcttgggcgtatgatatcttttgatacagattttcaatgtgacacagatttttaatcaatagaatcggggggtgacctgcaacgaaggtggcacatgagcaatgtttagtcaaatgcatacgctgtgacagttcacaatatttaaacaaactgacaattttcaagaataaatatttttaagaaaatatctgaagacgatagggatgtt

SEQ ID NO: 5335 - DNA, 687 bp, Diabrotica virgifera
tacaagtttgtacttatttgtaacgaaatatgcattcatgataatttcacagaaaaaatagaatccttcagagctatcatctacatttctttataccatggacgtataaacacactgtgtttatacgtccatgctttataccaatgttaaatgttgatatccgcagtatttatcattatttgttatactatactttaatttgttgtagttacctgttttgatttttgtagatttttaattattaaccctaatatttaagaagcagattttatttgagacacaactattcaaaactaataattatttcttaataatcttcataacctgaattccgtcatttagacacatttttatatataaaaaaaatagaaacaaaatattttatataaaaccctggacatgattgttacatatctactccactttgatacaacaacttaatataaaatggtaatatatcaattacaataactttatcatcttgggcgtatgatatcttttgatacagattttcaatgtgacacagatttttaatcaatagaatcggggggtgacctgcaacgaaggtggcacatgagcaatgtttagtcaaatgcatacgctgtgacagttcacaatatttaaacaaactgacaattttcaagaataaatatttttaagaaaatatctgaagacgatagggatgtt

SEQ ID NO: 5336 - DNA, 898 bp, Diabrotica virgifera
tcagtcaaattgataataatatgagaccctgcttaacgactgaatgccatctgccaagtttttagacgaatttgaaagtagacaacagtcctcttcgacttttttcaaaccattcgaatctaatgctgatgagcttcctaaatctgacgtacatcggcatgtcaagcttataaaactttccaaacaaacttgtaaatacgtaaaaatcacatggcctatttcagatcaattttcatatgaatttgttgtaaagaggagtgagttctagattttgtttgtttatatactagtgttatatcagatatcttcaagagcagcatgccaaattatttgaaaaagaagacgtgcgaccaatgtcgacactgtcgttaacccaggccagagcaaccaaacttagagtggcccaaagaagaatggaacggtcactacttggactgacactcagggacccaaaaaataacagtgtggagaccacgagcagacagaagaagtagaggtagatcaccaatacgatggacagacgaagtcaaaagggtcgctggcaattggttgcaggaagcttaagacagacagaactggaaaaaattagaggagatctatgttcaactttgaacgcatagggctggatgatgatgatacaatagtgatcatacaatgtaactctaaatgatgcagctatcaaacataacaacaaccccaaatatctaggcgtcacacttgatagaacactcaccttcaaaagccatcttacaaacgcagccggtaaactgagaacaagaaacaatataataacaaaacttgctggaacaacttggggtgcttctgcagatactcttcggacctctgctctagctttggttttttcagtggcagaatattgtgcaccagtatggctaaa

SEQ ID NO: 5337 - DNA, 464 bp, Diabrotica virgifera
  SmartBlast Evalue=1E-10; Info=Pol protein n=5 Tax=Drosophila melanogaster RepID=Q6J4U7_DROME
acggcagatatacctgaaacaaaatcgagaaaattcgcttatgcagacgacctggccattggcttccaagataatagtaaggaagctggagaacgagctctaaacgaggacctaactacacttagtaactactttaagaactggcgcttacgtcctaacacaagcaaaactgaaacctgtctctttcacctgtcgaaccaacttgcgggcgataccctcaatgtaactctaaatgatgcagctatcaaacataacaacaaccccaaatatctaggcgtcacacttgatagaacactcaccttcaaaagccatcttacaaacgcagccggtaaactgagaacaagaaacaatataataacaaaacttgctggaacaacttggggtgcttctgcagatactcttcggacctctgctctagctttggttttttcagtggcagaatattgtgcaccagtatggctaaa

SEQ ID NO: 5338 - DNA, 369 bp, Diabrotica virgifera
ctataacaccttgatgagctaaataaagagcaccagaaatgcataattatccaaaccctagttaccatatttcgcaccccaacttcattagtgtcataaccctgaaatcgcaatcttcaggagagcaaaaacaagatgttataatatgaattcttcattttcttttctctgtaatttccttatctaagttaaccaaattctgcactcattttgattatgtgtgtagctatctaaacgagagtgctcaccaatgtggcaatgaaatgacgtgcaagtggtttggtgcccagtgcaggtagaattgctaaacctgtataaacataataatatgtaatacctttcgatatgtgcaactacatatgaagagta

SEQ ID NO: 5339 - DNA, 810 bp, Diabrotica virgifera
gtagtgcatgttgttgtaatcgcttttcaatattgccgtctaggaagaattctaggcataatgcacacgaagcgtgtcgtcatagacgcgtattagatgcggcgtacgaacagcatacgctttcgtgctgctcacttgtgtctttatggaatactgtacacgaacgaagcgtaagcggcgcggaatcgtcaatgcagacaagcttcaagccgccaggcgtagcgtacaacgatgtcagtcgcttgtagtacgcttgagtgttagaacacctttcttgacggaattttatgagaatggcggatcaaatattaaaatttgtccaactgatcgaaaattatcagtgtttatataataatacccaaacaagagtagtccagaaaaatgtgtggaatttcgagtcatcttccgacaactctttggcggcaataaataaccttctgttgtagttttgtagatacaaggatttaataatgcacccaaaatttcccctgttttttttttacggtggcgaagataatttaacaaatgtaagtcctcttcatcacttaacatctttgcaactacactgtaaaagcatggaaaaccttaaaacaagacgatcacatatgccgcttgcaaatcgaatcgtttgcggattttaaggcgtaaaggaatcgtcgctgcatgacgaaacttatacgtgtctatgacgattcgcttcgtgtgcaatattaagattctagaaaataaaatcaatagtagtatagtagagtatgagtattatgtatgtcgcatttttcattttaaacatagttcttcagaactttggtc

SEQ ID NO: 5340 - DNA, 553 bp, Diabrotica virgifera
gtagtgcatgttgttgtaatcgcttttcaatattgccgtctaggaagaattctaggcataatgcacacgaagcgtgtcgtcatagacgcgtattagatgcggcgtacgaacagcatacgctttcgtgctgctcacttgtgtctttatggaatactgtacacgaacgaagcgtaagcggcgcggaatcgtcaatgcagacaagcttcaagccgccaggcgtagcgtacaacgatgtcagtcgcttgtagtacgcttgagtgttagaacacctttcttgacggaattttatgagaatggcggatcaaatattaaaatttgtccaactgatcgaaaattatcagtgtttatataataatacccaaacaagagtagtccagaaaaatgtgtggaatttcgagtcatcttccgacttctgacaactctttggcggcaataaataaccttatgttgtagtttttgtagatataaggatgcacccaaaatttcctccgtttctttttttttgcagtggcgaagataatttaacaaatgtaagtcctcttcatcacttaac

SEQ ID NO: 5341 - DNA, 849 bp, Diabrotica virgifera
gaaagataaacaaacggaagaaaaagaaaaagaagaaactgaaggcgaagaatcggaggagagttcctcggaggacagctccagttgtgattcttgttccgaatcaaattccgactcgtctgtcgacaattcggactctaaaactagtatgcggaacatcaagattccccaaatatttaatatgaagcaagagaagtcgaatacgttcggtggcatggcggaagacgaagataaaccatggggatttgcggctgcggccgcagaagctaaacagaaagagacaaaacctgaagaatcgtcgttgccgaagtctaaaagcaatgaaaacttgtttattgccgcccttaaagaagagggattgcttaaggagaacgccgccgtggttactcccacaaaaccggatgacacctcgtccgataagtaccagaaaacaccaggttttggacaactcaaaggtctttttgatggtttgtcccatttattcgcagcacctacagaaagcagggctagcaggtctcagcccaattataatcccaacaggaggaaacccaaagatagcaagaaagattgaaaaaagagaaagaagagcttaataaaaagaagaaagaaaagaaacttaaagaggaaaaactaaagaaagaaaaagaagaattggacagaaaaaagacagaacaagaggaaaaggaactagaagaaaacaaaatgaaaagaaagagaaggccgaacaagaaaaagaattgcaaaggcttaagaaagaggaggaggataagaaactagaggaagaaagattgaaaaaagaggaagaattgcaaaggattaaaaaagatgaagaggataagaaactagagg

SEQ ID NO: 5342 - DNA, 507 bp, Diabrotica virgifera
aaaaaagaggaaaaattgcaaaggattaaaaaagaggaagaggataagagactagaggaagatagattaaagaaagaacaagaagaattggacagaaaaaagaaagagcaagaggaaaaagaactagaagaaaagaaagtcagagagaaagagatggcagaaaaagaggaagaactgcaaaggcttcagaaagaggaggatgataagaaacaagaggaagaaagattgaaaaaagagaaagaagagcttaataaaaagaagaaagaaaagaaacttcaagaggaaaaactaaagaaagaaaaagaagaattggacagaaaaaagacagaacaagaggaaaaggaactagaagaaaacaaaatgaaaagaaagagaaggccgaacaagaaaaagaattgcaaaggcttaagaaagaggaggaggataagaaactagaggaagaaagattgaaaaaagaggaagaattgcaaaggattaaaaaagatgaagaggataagaaactagagg

SEQ ID NO: 5343 - DNA, 1027 bp, Diabrotica virgifera
cgtttacactagtgttccatctttccttggtctgcccctcgtgcttttacccactgctttggcctcccatatcattttcacttgtctgtcgccactcattcttatcatgtgtccagcccattttaactttttttcttcaactctttcgttgagcgattttacctgtaattcatgtcttatagttgttatattaaaaagaatatatgcagaaatatgtgtgaaataatttgctacaaaaaattaaatgttagcgttacgaattgtaccgttacgaaaatgtatagttacgaactgttgccgttacgaattgtccgtcaccatctgtcggggtacgaactgtcgcgttccgagatgtcatggaacccaattaaacacatcggtgaaggtcgttgttatatcggatcttgtctataaagttataaaatttattttgtctacgacggtgcttctgtggctttaaattcttctttctgctggagttgcgggagtgataatgacttgggtatcgattctgttatcgatttccttggcattgtcgatactgctttgacggattctgtctccttccatgatgaagttttcgttaaaggtcatcacgtcatcagtaatgccagaattagtcaatgactgagtgaagttgacagattcgttgacttcgttactcatctagtcaagcttttctctggcgagtgtaaaacagtactaaggtgtccctcagaagatgtacaataagccaatgggctgcagtacgatcaacgtagaagagacagacggcttccagggaacaaaaaaaggtgtccctcaagttgctcttggagatgataccttataagacttccattcaagttttcgaagatgcaaatcgtcaagcagttaatactcgaaaagagagtacttttcaattgcaaatccgaacccgcaacatccaaataaccaatatttatatttttaccacattcacacaccgtcgtatatttttacatttcttctttatcatactttcttaggcgaggaatctgcaagacgc

SEQ ID NO: 5344 - DNA, 341 bp, Diabrotica virgifera
taatataatcataaaaagattagttcaaaactacgaacatctttataagaggatcctttttcgctttgatcagttatataaaatcactaactacatcaaactaaatgacaaaactaaagtttcataatgctaataataccttataagacttccattcaagttttcgaagatgcaaatcgtcaagcagttaatactcgaaaagagagtacttttcaattgcaaatccgaacccgcaacatccaaataaccaatatttatatttttaccacattcacacaccgtcgtatatttttacatttcttctttatcatactttcttaggcgaggaatctgcaagacgc

SEQ ID NO: 5345 - DNA, 717 bp, Diabrotica virgifera
aggagtgttgtttttagttagatgcatagtcctaaggtattcgcaaaaaaccgttcgaaatggtattttgtttcaatgaaaattccacacctgtaattttgaaccaatcaaaatacgttattttgacagatcaccatggcaacggaggtattttatcggaaattttttgctcgtggggtacccaacagcgaattatagtggaaattttttgacgtttacaataacagaacatttttgacagactggtttttatttgtttacataatttagttttgattcattttctatcacttgtagttactcaaaacttatgtaaaattgaagaatatactattttctatcttgaaatggtattcccatgcaactacaatgagtagaaattacgaatttgaaagcctaaataattgctgacaaagctatggcgcgctattaatctgttcatgcagctttggattttcaaatgcaaatttggtgtggaattttcttaccgaataccacgcgaagtcaaattaatatccggaaatttttttttgatcatgaatatttttagaaaatttccctcgtctgcgactcgggaaattttcaaaatattcatgatctcaaaaaaatttccggaaataatttgacctctagtggtattactagtgaaacttttttgctcaattagaaatccaatgaaatcaattaatttgtggtcatctgattgaatacaaccaa

SEQ ID NO: 5346 - DNA, 643 bp, Diabrotica virgifera
aggagtgttgtttttagttagatgcatagtcctaaggtattcgcaaaaaaccgttcgaaatggtattttgtttcaatgaaaattccacacctgtaattttgaaccaatcaaaatacgttattttgacagatcaccatggcaacggaggtattttatcggaaattttttgctcgtggggtacccaacagcgaattatagtggaaattttttgacgtttacaataacagaacatttttgacagactggtttttatttgtttacataatttagttttgattcattttagttacaaagctaagatgttttctatattcttcggacacctcctctctttttaatggcgaaaatgcaggactttgaatgttttcaattaagtttctatgtctaataaaatatatataatatttagacactaattgatttacctttttcccattcagtactttcaattttgcgtagtttagttttaaaaacgccaaaaaataattttctatcacttgtagttactcaaaacttatgtaaaattgaagaatatactattttctatcttgaaatggtattcccatgcaactacaatgagtagaaattacgaatttgaaagcctaaataattgctgacaaagctatggcgcgctattaatctg

SEQ ID NO: 5347 - DNA, 707 bp, Diabrotica virgifera
  SmartBlast Evalue=2E-60; Info=ATP-binding cassette sub-family G member 4 n=2 Tax=Formicidae RepID=E2A627_9HYME
accgacgaacatcatcgacgttgctaccgtgtgaggtatctatgacaaagcgcaaaagatggccgacgattcgaaatgtataaagataaatgttcctcttgatcccgaagacacaaaccaagctgttgcttacaccaagactgttcacgctcccccgcttctgaaagaaaccgaatctcttaataatgcttctgttttaagtggctcccaaaccaacatatacaatggttcctcaccaataaccatcagcggagcgggtgcgctccgtaaggtccccaacagcagtccgagcaaccataaaaggccaatgattgccctcacacacctacccaaaaggccgcccgtggacattaccttcacagatctctcctactcggtatccgaaggaaggaaagagggtataaaacgatattgaaatgcatcagtggaaaatgcaagtcgggagagttgacggccattatgggaccatcaggggccggaaagagtaccattatgaatattttagctggctacaaaacgtcaaatctgagtgggcaggttatgatcaacggcaaagagcgcaacctgcgacgcttcaggaagatgtcctgttacatcatgcaggacgactgcctctccccacatctcaccgtcaaggaggccatgatggtatcagcgaatctcaaattaggaaagactgtcacactgtccgagaagaaagttgtgat

SEQ ID NO: 5348 - DNA, 656 bp, Diabrotica virgifera
  SmartBlast Evalue=4E-57; Info=ATP-binding cassette sub-family G member 4 n=2 Tax=Formicidae RepID=E2A627_9HYME
aaaaaattgatctcttttaaatttattgatctatttttttttcaaccgagtcggtcatacgtttactgcttgaaaaatactagctcattgagctaaaaatacaaatactcatttggtgatctttaagaagatgttggtgcttagtgttagtggctcccaaaccaacatatacaatggttcctcaccaataaccatcagcggagcgggtgcgctccgtaaggtccccaacagcagtccgagcaaccataaaaggccaatgattgccctcacacacctacccaaaaggccgcccgtggacattaccttcacagatctctcctactcggtatccgaaggaaggaaagagggtataaaacgatattgaaatgcatcagtggaaaatgcaagtcgggagagttgacggccattatgggaccatcaggggccggaaagagtaccattatgaatattttagctggctacaaaacgtcaaatctgagtgggcaggttatgatcaacggcaaagagcgcaacctgcgacgcttcaggaagatgtcctgttacatcatgcaggacgactgcctctccccacatctcaccgtcaaggaggccatgatggtatcagcgaatctcaaattaggaaagactgtcacactgtccgagaagaaagttgtgat

SEQ ID NO: 5349 - DNA, 807 bp, Diabrotica virgifera
  SmartBlast Evalue=3E-32; Info=ATP synthase subunit s-like protein n=1 Tax=Harpegnathos saltator RepID=E2BTZ1_9HYME
attaacgcggaacttcaatttatatttaaacagttgtaagttatcatcaaatacggaacaatctttgtcctcaaaactcgaagaaaaatcaaaagaactccaaaaaccgaagtattctcccaaagatgttacaccagcagatatgaaatggagaacaccttggcatcaaaaagagggacagtattatagtgttttaagaaatttttacaaagaagatacaaataccagccttcttcaaaaaattcaagctcctatcgacttatctccgggtgcaataaagaaatggtggacgaagaaaaaagaacatgaatcaaaagttctacagtcttatatacctgaaagacatcagatattaggtggctcagtaaaattttttaatgaagacaagtggataaaagcagatgatgacaacaattattcacttcctagacattatgaagaggaaaaaattcttcaagccattgactgcacagacatggacttatattacgaaggtttagttaatataagagatttagcaaaagtggaatggttaagctttaatggttgcccccatatagatgattggtgtctagacagaataagtaacatcttcagccatagtttaatatatttagatttacgaaattgtccaaagattacatctaagggattagcggcattatacaaattagaacaattaaaaatattgtatttagatgattttcttagatcaactcagtatgagttgacatgtttattgttacaagaagttaatccagatttagatgtaagaagtgatcaaattacatttgatatatcgaaata

SEQ ID NO: 5350 - DNA, 562 bp, Diabrotica virgifera
  SmartBlast Evalue=4E-20; Info=ATP synthase subunit s-like protein n=1 Tax=Harpegnathos saltator RepID=E2BTZ1_9HYME
attaacgcggaacttcaatttatatttaaacagttgtaagttatcatcaaatacggaacaatctttgtcctcaaaactcgaagaaaaatcaaaagaactccaaaaaccgaagtattctcccaaagatgttacaccagcagatatgaaatggagaacaccttggcatcaaaaagagggacagtattatagtgttttaagaaatttttacaaagaagatacaaataccagccttcttcaaaaaattcaagctcctatcgacttatctccgggtgcaataaagaaatggtggacgaagaaaaaagaacatgaatcaaaagttctacagtcttatatacctgaaagacatcagatattaggtaacgaactagctgctgcacatttcatagttcatagaggtggctcagtaaaattttttaatgaagacaagtggataaaagcagatgatgacaacaattattcacttcctagacattatgaagaggaaaaaattcttcaagccattgactgcacagacatggacttatattacgaaggtttagttaatataagagatttagcaaaa

SEQ ID NO: 5351 - DNA, 858 bp, Diabrotica virgifera
acgtaaatgtgacggccaggtctatctcgtgatataagaaaaaaatatttcctgttgaatatgtttctaataaaacagtcaatctacacagtattacttttcgttcttcataatttagcgaatacaattttttagtacaaaatgatttcttagttatttttatattatataattgctactaaattattttaagcaatttagaagaagtcagataacaggtttttttaattgaatttaaatatatttttttaatatgtcccctttttgtgtgttttctctgtccaggaattagtgtaacaaaaacttaaattcattaaattataaagactgtttgcaaaattgacctatcaatgcacaaagagatcaacaattctactcaaaatccttttaaagccgatatcccacggattgtgagcggctttcacattacacatagttcacgtcagcgaagagaaatagataatagtgaaaagaaaagagagcactttttgataaattcactccatctaccccaaaatgtggtcggaccattccgatggagcgtgttccctcgaatttcgaaagtttagtttaggctgttgtacgccaccactgttggcgatcggaattttagtaaattggttaactcacaaaatgaaaaaaaatccaacacaacgtcgttagaccactccatagtaaaattaccatgaacctgacaatacctcgcgcctagccttgtcagaagggttagaggggtaaacctgcgcatcagcttctgactttcctttgaactgtgttgatacacgtgacaaatgacgggaccgcacgcgctgaccataaatccgacaggtctgtcctattccacaggtcgtaaaccac

SEQ ID NO: 5352 - DNA, 504 bp, Diabrotica virgifera
aacaattctactcaaaatccttttaaagccgatatcccacggattgtgagcggctttcacattacacgtagttcacgtcagcgaagaaaatagataatagtgaaaagaaaagacagcactttttgatttactttttgataaattcactccacctaccccaaaatgtggtcggaccattccgatggagcgtgtcccctcgaatttcgaaagtttagtttaggctgttgtacgccaccactgttggcgatcggaattttagtaaattggttaactcacaaaatgaaaaaaaatccaacacaacgtcgttagaccactccatagtaaaattaccatgaacctgacaatacctcgcgcctagccttgtcagaagggttagaggggtaaacctgcgcatcagcttctgactttcctttgaactgtgttgatacacgtgacaaatgacgggaccgcacgcgctgaccataaatccgacaggtctgtcctattccacaggtcgtaaaccac

SEQ ID NO: 5353 - DNA, 735 bp, Diabrotica virgifera
attatgtcggactgtcaaactaacgtcagaacgtgtatgtatcgatctgtaaattggtgccgaaatttgtaattattactgtaaatactagttattaaaattagttttcgctcaaatagtgactaataacaattgtgttacgtgctaatcatcaagaacaagctgtaacttcagtcagtaagagatgttttgcttaataatcttccaacttaaacacattcagtgtcaaactatcaatagtttttcactgttgctatcccgtcgctgtcccaacagacgccaacggttaggcaaccagtattgcagtgatgtatccaaggttttcacttatttccagacatccaaagcgtaatacatataaacaaattcaagttacttttgactacatgagtaacaatttaaatcaatgttcccccactgttagcaacaccatgtctggatccaattcttccagtaatcttactagttcatatgcaattgctactatgactaaacaacgtccgaagtatcccaagaagaccgaagcaattttataattagttgtacgtctctatagtatccaatgattgtatatccaatttttttcttcataatttttacctaatgttatttaaaatttagaaattaactgttataatatttagttttaagtctttcttgtaattaattattgtataaccaatattgtttgtgtcaatggccatcgctgcaagacacataaattaaataaaaaaa

SEQ ID NO: 5354 - DNA, 602 bp, Diabrotica virgifera
aactatttagtaattattttttgccaattttactaaaattggcaaaattaccgactagaacatctagaaagttgcgtctgagttcagcgaacagactatatcaatagtttttcactgttgctatcccgtcgctgtcccaacagacgccaacggttaggcaaccagtattgcagtgatgtatccaaggttttcacttatttccagacatccaaagcgtaatacatataaacaaattcaagttacttttgactacatgagtaacaatttaaatcaatgttcccccactgttagcaacaccatgtctggatccaattcttccagtaatcttactagttcatatgcaattgctactatgactaaacaacgtccgaagtatcccaagaagaccgaagcaattttataattagttgtacgtctctatagtatccaatgattgtatatccaatttttttcttcataatttttacctaatgttatttaaaatttagaaattaactgttataatatttagttttaagtctttcttgtaattaattattgtataaccaatattgtttgtgtcaatggccatcgctgcaagacacataaattaaataaaaaaa

SEQ ID NO: 5355 - DNA, 703 bp, Diabrotica virgifera
  SmartBlast Evalue=5E-22; Info="CG9134, isoform A n=2 Tax= Sophophora RepID=Q9W0I2_DROME"
atttagaagtggtaaatttaattcaaaatggttgcaaaaaatataattctaatggcgctggccttggatctgagtttacaaccaacatacggtgaagattatgccaaagaagtgcaagaatcctttggattagagacaataccaacattaaaattggaccatcgaggaaagaaaagctattacatgggtaatatttttaaaggcaacctactgcaagccgaacaattttgccgataccacggtatgaatttggtgaatatagaatcaaaggaagagcacaacactttgcaaaaaataatcgttgaaacgcgtagtgtgggagctggttctgatgattatatgttgacttctttcacaagaatacctgacggtaaatatgtttctctaacaagtggcaaaacacttacctatttgaactggcatagaaaccaacccaatggcggacaggaagaatgtattggtcttcacagagaaggatctgaattacagtggcatgatgtgtcgtgttgggctaaactttatttcgtttgcgaagttgtttggacaaatagagaacaggaattattgcagattttaaataatacggtccaacagaaaattggtattgaggataatattagaaaggtgttaggaattcctgcttctttgtaaaaccaaaatgcaatattccacatgaaagaaaaatgtattatttaagtttaaa

SEQ ID NO: 5356 - DNA, 611 bp, Diabrotica virgifera
  SmartBlast Evalue=2E-21; Info="CG9134, isoform A n=2 Tax= Sophophora RepID=Q9W0I2_DROME"
atttagaagtggtaaatttaattcaaaatggttgcaaaaaatataattctaatggcgctggccttggatctgagtttacaaccaacatacggtgaagattatgccaaagaagtgcaagaatcctttggattagagacaataccaacattaaaattggaccatcgaggaaagaaaagctattacatgggtaatatttttaaaggcaacctactgcaagccgaacaattttgccgataccacggtatgaatttggtgaatatagaatcaaaggaagagcacaacactttgcaaaaaataatcgttgaaacgcgtagtgtgggagctggttctgatgattatatgttgacttctttcacaagaatacctgacggtaaatatgtttctctaacaagtggcaaaacacttacctatttgaactggcatagaaaccaacccaatggcggacaggaagaatgtattggtcttcacagagaaggatctgaattacagtggcatgatgtgtcgtgctggagcaaatattatttctgttgtgaagttgtttggtcaaatagagaacaggatttgttgcaggattttaaatagtacgctccataagcaaattcatatcgagc

SEQ ID NO: 5357 - DNA, 713 bp, Diabrotica virgifera
catctccagaaatatattgatgaaactagtagtgattgtgtataaagaggaatttttatgtacaaaattttttgagataaaatggcatttcacttgatatattttttaaaataacagtatttacaagtttactgcatatgtaaaagtattaaatgtacatgagttaaaaaatgataatttttaagttacgtgtagaatattttatcatcctattttttttttctacaaattccattgcaagtcatcgacgataaaactatatcctcctagaagtatctaatatattattagtgttggatccgatacaaggtcgatctgcaccaatctgtttaacggataaaaaaggatgtgtatgtactttgtacgcacgtaagaagttatacatacttctattatataatttcaacgaaataaataatatttaacaggttagttgtattttatttaaatattaaactaattctaatacttactactttgcaaaaaaaataaaacagtaccaaaaataaaaaaaaatgaaacacacttaaatacattgaaaaatgccataaaggatttcggaacaataattgtcggaaaaatttttaactaaatacgtattttctgaaaaaaaaaaattatataataaatattcttacaatcataaaatgtataaaaaaaaataaaaaaataaaaagtttctcttggggttcgaacccgcttatttttgcgca

SEQ ID NO: 5358 - DNA, 631 bp, Diabrotica virgifera
catctccagaaatatattgatgaaactagtagtgattgtgtataaagaggaatttttatgtacaaaattttttgagataaaatggcatttcacttgatatattttttaaaataacagtatttacaagtttactgcatatgtaaaagtattaaatgtacatgagttaaaaaatgataatttttaagttacgtgtagaatattttatcatcctattttttttttctacaaattccattgcaagtcatcgacgataaaactatatcctcctagaagtatctaatatattattagtgttggatccgatacaaggtcgatctgcaccaatctgtttaacggataaaaaaggatgtgtatgtactttgtacgcacgtaagaagttatacatacttctattatataatttcaacgaaataaataatatttaacaggttagttgtattttatttaaatattaaacctttcttacctaccactttcaaaatttttttataaaaaccaaaaattaaaaaataatatgaatcatccgggattggaacccggaacctctcgatctctggtccaatgctctactaactaagctatcgagacccttgtaagtgacgtctcggatataattacacaacacggtgag

SEQ ID NO: 5359 - DNA, 750 bp, Diabrotica virgifera
  SmartBlast Evalue=1E-25; Info=Endonuclease-reverse transcriptase n=1 Tax=Bombyx mori RepID=D5LB38_BOMMO
agtaaacccctaaatatttgtaggacgtaactctttcaactggctgattatttatggttaaattcacattggtgtatagcttctttgttacaatcatgaatttagtctttttgatgttcagttttagaccatacttattggtatgagtgtttatgttttccatcaaatactgtaaatttgctaggttatctgttactattagcgtgtcatcagcgtatcgtatattgttaattaactctccgttaatgttcataccaatgttttgctctaggagcgcttcctgacatattgtttcgctatatatatatattgaatagtagtggagaaagcacacaaccctgacgcacaactcgacgaatctcaatttcttcggttaactcattatcaaccttgatttttgctgtttgtccccagtacaacctggatatgctgttaatgtcgcgactgtcgatgtttttgcttcttagtatttcatacagcttttggtgtctgactttatcgaaggccttctcaaaatctatgaaacctacatagaggtcttggtttacatccaaccatctttgcattaacacattcagaccaaacaaagcttcccgtgttcccagtccacttctaaatcttctgaatcttatctatatttattcttatttgtctatatatatatatatgtgtatatatatgtgtgtatatatatatgtgtatatatatatgtgtatatatatatataaaatccggttctcttctaccgtg

SEQ ID NO: 5360 - DNA, 596 bp, Diabrotica virgifera
  SmartBlast Evalue=2E-41; Info=Endonuclease-reverse transcriptase n=1 Tax=Bombyx mori RepID=D5LB38_BOMMO
agtaaacccctaaatatttgtaggacgtaactctttcaactggctgattatttatggttaaattcacattggtgtatagcttctttgttacaatcatgaatttagtctttttgatgttcagttttagaccatacttattggtatgagtgtttatgttttccatcaaatactgtaaatttgctaggttatctgttactattagcgtgtcatcagcgtatcgtatattgttaattaactctccgttaatgttcataccaatgttttgctctaggagcgcttcctgacatattgtttcgctatatatatatattgaatagtagtggagaaagcacacaaccctgacgcacacctcgacgaatcttaatttcttcggttaactccttatcaaccttgatttttgctgtttgtctccagtacaacctggactggatgttcatgtcgcgactgtcgatgtttttgcttcttaggatttcatacagcttttggtgtctgactttgtcgaaggccttctcaaaatctatgaaacctacatagactcagaccaaacaaagcttcccgtgttctcagtccacttctgaatccaaactgtgtggcgc

SEQ ID NO: 5361 - DNA, 696 bp, Diabrotica virgifera
ttttaaaggcacacgttcatataatagaaaggcacaaaatgtttgtattttcataaatactgtcgataaatactaattaagataaaaaatgtaatgtaatatgtggcaaaataagttcttgtatcacgcgcgtgtgtataatcttaatctaaaaaatatataaaataacaaaatggaatgcactataaatctggacggatagaaaaaaatactccttagattccttaggggatcaaagaaaaactaatgtatatgtagctgtcgttaaaatatgagtggtattctttttctcatgaggcatctttcagtgcgtcacagtttttcgatttctttctaacgcattaaattgtatgtgacagaaaaaaaggcacgtcggtgattacagacatttataacatttattctagttgtcgatagatggcgctataatcgaaaaaagttatttacgaattatataatatatctatgaatataatctgtaggtacaatttataagactatacaaatcaaagaaaataccattttataaatgtaataaacacaattgatttgtttttatgccaaattgcaaataaaatatgacaactgtcagatttaactaaaatgtcatgttagaataaatgtttgttgtttgtttgggtttatatgactgcggacactaaatccattcgctagaataaatgttataaatgtgta

SEQ ID NO: 5362 - DNA, 656 bp, Diabrotica virgifera
ttttaaaggcacacgttcatataatagaaaggcacaaaatgtttgtattttcataaatactgtcgataaatactaattaagataaaaaatgtaatgtaatatgtggcaaaataagttcttgtatcacgcgcgtgtgtataatcttaatctaaaaaatatataaaataacaaaatggaatgcactataaatctggacggatagaaaaaaatactccttagattccttaggggatcaaagaaaaactaatgtatatgtagctgtcgttaaaatatgagtggtattctttttctcatgaggcatctttcagtgcgtcacagtttttcgatttctttctaacgcattaaattgtatgtgacagaaaaaaaggcacgtccgtgattgtagacatttataacatttattctagatgtcgatagatggcgctataatcgaaaaaaattatttacgaattatataatatatccaatataatctttataatttataagactattcgcggtgtgcaagtacttggaggggatacgagaaacgatcgtgcgcgaataccggaaaaatgttgcaactttcttaaataattcatattgtcaatttaaattgtcaaattgacatatatttcatacctatcattgaagaagaaacattaaatgttattcca

SEQ ID NO: 5363 - DNA, 708 bp, Diabrotica virgifera
  SmartBlast Evalue=4E-10; Info="Galactose-specific C-type lectin, putative n=1 Tax=Aedes aegypti RepID=Q16PK9_AEDAE"
cccttccattgtttggttctcctgcgttccagttagtaaattcgagtggttctcctttcagccaggtccatttgttatcctctttgttaccggatgtccagaaagtatttcttccataactactggcttgaagtacagtattaagactgttgcttttttcttttgactggatactaactaacgacattccacgtttcttgcactttttaacagcgtcatcataagaaactttaatattatacagtattcgatagaatattttcggacaggatattacatctcttgtgtcttctacagaatttccgttgataatgatagtttctggagaagtcactatttgggtggatatatctggagtgaatattacatcacttgtttcatcatatgtttcactttcgtccatactagaattccagtcggcagtgatagtttctggagaagtctctatttgggtggatgtatctggagtggatattacatcacttgtttcatcatatgtttcacttgcgtccatattagaaatccagtcagcagctataaacaagtacatttaaatgtaagtaaattaatgtaatttaattaattacattaagactttttattttctacactaaacaactaatttatgaggacttagttttgaaaacaactaatttctttcaaatatcaaaatatagatgatgatataaatgatcctagctgagactg

SEQ ID NO: 5364 - DNA, 646 bp, Diabrotica virgifera
  SmartBlast Evalue=4E-10; Info="Galactose-specific C-type lectin, putative n=1 Tax=Aedes aegypti RepID=Q16PK9_AEDAE"
cccttccattgtttggttctcctgcgttccagttagtaaattcgagtggttctcctttcagccaggtccatttgttatcctctttgttaccggatgtccagaaagtatttcttccataactactggcttgaagtacagtattaagactgttgcttttttcttttgactggatactaactaacgacattccacgtttcttgcactttttaacagcgtcatcataagaaactttaatattatacagtattcgatagaatattttcggacaggatattacatctcttgtgtcttctacagaatttccgttgataatgatagtttctggagaagtcactatttgggtggatatatctggagtgaatattacatcacttgtttcatcatatgtttcactttcgtccatactagaattccagtcggcagtgatagtttctggagaagtctctatttgggtggatgtatctggagtggatattacatcacttgtttcatcatatgtttcacttgcgtccatattagaaatccagtcagcagattaagactttttattttctacactaaacaactaatttatgaggacttagttttgaaaacaactaatttctttcaaatatcaaaatatagatgatgatataaatgatcctag

SEQ ID NO: 5365 - DNA, 786 bp, Diabrotica virgifera
ggcctctggaattacaatctacatataccaagaaagcttatattacttacctaaaaccccatttgaaaactagagattttgttgggaaaacccgcatttttcgaggaaaactttcgtcggagcaaatcgggaaaaacatatccccatgcagaactcaattgcggcgaacttacatttgggtatctttgttgcaaagttaaaatcttcggagttatagagcaataattaaaaaaatacatttgtcggcgccattttgtttataaaaaaagtagcacactatctgcgcactttgcatacctatattagtaatatataggtccttataattcgattccagcaataaaattgttggtaaataactttttccatgaattttgctaattagtccagagtacacagcaagtaacagaaagtggctactactctgatcacgggctataatatatagtgtaaaatttgacgttaaaaataaattgaatgttaaatgtaggttctgctttaaaattttggtgcataattacagctacatttgaagtagctttcgtttacaacagaaatacaacggaaataaacaatttataaaaaaaaattcaataacatgttttctctttgtcattttgttcactttaacggaaacaacatgaggttagctttgtatgttgtaaaataaatgtaacaaatgttgttaatataactccaatacaaaattagttgtgaaaaaaactgtttatgtactataaaaaacttcaaaatgcaaaaattcgacaaaattcaacagactgacag

SEQ ID NO: 5366 - DNA, 569 bp, Diabrotica virgifera
ggcctctggaattacaatctacatataccaagaaagcttatattacttacctaaaaccccatttgaaaactagagattttgttgggaaaacccgcatttttcgaggaaaactttcgtcggagcaaatcgggaaaaacatatccccatgcagaactcaattgcggcgaacttacatttgggtatctttgttgcaaagttaaaatcttcggagttatagagcaataattaaaaaaatacatttgtcggcgccattttgtttataaaaaaagtagcacactatctgcgcactttgcatacctatattagtaatatataggtccttataattcgattccagcaataaaattgttggtaaataactttttccatgaattttgctaattagtccagagtatgtggactgtacatccataggtcggtggttcatatccggctcgaaggaccaaatcgacaatttgatgtaaatatcatgttcgaattgttttctaatgccctgtgtccgattattcttgatcgacgatggcaaataaatggttgaagtgtggagcaaaaataatggtttcattgac

SEQ ID NO: 5367 - DNA, 902 bp, Diabrotica virgifera
  SmartBlast Evalue=4E-22; Info=Endonuclease-reverse transcriptase n=1 Tax=Bombyx mori RepID=D5LB38_BOMMO
ttggatctttcttgtatgttgttgtgtttggtttttgactggactgaatagttctatggagatcatattcgtccattttcgtagggttttaagccaagagttgcgtcttcttcctggtccccttttgctattgattttgcttcgattataagttggagcagttcatacttttgatttcttacgatgatgaccaaaatattgtgttttccgttctattattataagcataagctctccctgttcatcctccgcaagacttacgcatttgtcgtatggctcatgtaggatattctgagcattttacggtaggaccaggattcgaatgcatagattatttttgtattgcttctgtcattgtccaggcttcaacactgtaacgcaaggtggagaaaacacagcacttgagtattctagttctcaatgccaattctgtcagctgtcggttacatacaacttttgcattttgtaaaacactgtacgtgccttttctagacgtgtttttatctctagtgagtggtcccaagtttcatcaaggttacttccaaggtacgttattcttgttactctttccagatctgttccgtcaacattgacctttacccttctgttttggttttggtgctggctgatgaccatcttttttgtcttctttgtattcaatttcattctaaattctctacaggctgtcgttactcggtctcttaggcgttgcagtgcttcagcattaaatatcttctcagagtaaacgttgaacagcaaaggtaacaggacgcatccctgtttcactcccttctcaatttcgatttttccagatgttttaaaattaatttttatttaatttaaaatacataattgttattaaatgattgtaaaattatggcacatatgaattaataatacaa

SEQ ID NO: 5368 - DNA, 438 bp, Diabrotica virgifera
  SmartBlast Evalue=1E-20; Info=Endonuclease-reverse transcriptase n=1 Tax=Bombyx mori RepID=D5LB38_BOMMO
ttggatctttcttgtatgttgttgtgtttggtttttgactggactgaatagttctatggagatcatattcgtccattttcgtagggttttaagccaagagttgcgtcttcttcctggtccccttttgctattgattttgcttcgattataagttggagcagttcatacttttgatttcttacgatgatgaccaaaatattgtgttttccgttctattattataagcataagctctctttgcttattcatcctccgcaagacttccgcatttgtcgtacggctcatgtaggatattctgagcattttacggtaataccagagttctaatgcatggatttttttgttgcttttgtcattgtccaggcttcaacaccatagagcaaggtggagaaaacatagcacttaagtattctagttctcaatgagatacctagctgg

SEQ ID NO: 5369 - DNA, 693 bp, Diabrotica virgifera
atagtagtagaaatatgaagagacagaggcaaactgaatagaattggctagcaagagattcaagagaacaacttgacactcaaggatggatacggctcgtttgcatgcctgtcgaagaaatttatgcacgcctaaaaacgatcattgaatgagatacttactctacgaagcatttgtaaattaacacagcgaaatacacttagtacattatttttcatcttatcccttgttgttggaggtattttataaacttcattattaacgtaaccccaaaaaaagatcggtccagtttattaaattttgctgatttggctggtcacgctactggtccattgaaaaatgaaaatatctcgaaaataaaaaatttagacataggaaacgttatccaaaaataaaagtacggcaatggtacttttcagtagtgatacaaaatacagggtgttccattcaaaatcactgagaaaataatgtgcgtcctgactcaccctgcatttgatataaaaaaaaataagcaatatcaatcattcctgaaaattttaacaatacgttatcaaactattgcatcaaaggcaataacaaaccattgctgttctacttattttcatttatacagggagccgaactggttacgaccctcatacaaaattggttacaactgtaaacaccctgcacaacataacaaacctttacatt

SEQ ID NO: 5370 - DNA, 637 bp, Diabrotica virgifera
  misc_feature (627)..(628): n is a, c, g, or t
atagtagtagaaatatgaagagacagaggcaaactgaatagaattggctagcaagagattcaagagaacaacttgacactcaaggatggatacggctcgtttgcatgcctgtcgaagaaatttatgcacgcctaaaaacgatcattgaatgagatacttactctacgaagcatttgtaaattaacacagcgaaatacacttagtacattatttttcatcttatcccttgttgttggaggtattttataaacttcattattaacgtaaccccaaaaaaagatcggtccagtttattaaattttgctgatttggctggtcacgctactggtccattgaaaaatgaaaatatctcgaaaataaaaaatttagacatattagaccaggacgcatctgtaaaaatattagtacatttggacgttgagaggtgactcaaatttttttgcagaaattgcttgaaaatagtcaaataataatatttgagttatcctccctctcataaaggtccggaacattgtttaaataatcaaaatgacaaaaaattaaggaaaaattagattttttttcttcgttttttgattataactttaaaagtattcatttccgagaaaggtgtactgacataaaagnngcgtatata

SEQ ID NO: 5371 - DNA, 684 bp, Diabrotica virgifera
gtgggcgctaatgggttaataaacaagatgattctaccagatatttcctattaggaactattatgcccacttagcataaaataaaaattgctggtacttaatacaaaacatagccttttagtgaaagtgttttcatttactactttgtcagtttttgcattttctacactgagaattgaaactaaggcttaataagtattaaggctgcagtagtggatatgtcgcggacaatgatgtaaattggacattgatgttaaagaccgggcattgtcttgaatgtctattttccctggttattagtgacaatgcctggcctttaacgacaataacattagctattggccaatgttgtaaaaaataacttaaaattagagttttcatcaataacgggtcaataacgacaggggccagaagcaaatggccaatgttgataaatcaataaaattatgcatgatgtattatttttatttaaaatagcttttggaggctaatcatttttattttcatttcaaccatggcatgttgtaccactttttacataaatttaccatgagtatgtaatttcagcaggctaacagaaatgaagtaaacaataaacataacctaacttttagtcaaaattccaacattgaccgattaacaaagggcattgttaacattggccggacattgatagaaatgtta

SEQ ID NO: 5372 - DNA, 651 bp, Diabrotica virgifera
gtgggcgctaatgggttaataaacaagatgattctaccagatatttcctattaggaactattatgcccacttagcataaaataaaaattgctggtacttaatacaaaacatagccttttagtgaaagtgttttcatttactactttgtcagtttttgcattttctacactgagaattgaaactaaggcttaataagtattaaggctgcagtagtggatatgtcgcggacaatgatgtaaattggacattgatgttaaagaccgggcattgtcttgaatgtctattttccctggttattagtgacaatgcctggcctttaacgacaataacattagctattggccaatgttgtaaaaaataacttaaaattagagttttcatcaataacgggtcaataacgacaggggccagaagcaaatggccaatgttgataaatcaataaaattatgcatgatgtattatttttattttcatttcaaccatggcatgttgtaccactttttacataaatttaccatgagtatgtaatttcagcaggctaacagaaatgaagtaaacaataaacataacctaacttttagtcaaaattccaacattgaccgattaacaaagggcattgttaacattggccggacattgatagaaatgtta

SEQ ID NO: 5373 - DNA, 907 bp, Diabrotica virgifera
tgcccgattaccaaccaaatgaacatttcatcagcgtactacccttacattttaaggttatattggttattggtttagtctatttgagtaaaattattctgtgtttgtaattggaaattggaacttcataatagatttaaaattttattgtttttaagttgtctattaataaagcaaaacaaacaaatcttgtattaatttaagaaatacagtgatcaccacaattaataactagataaacaaatgacctagtttcagtaaaatttttaaataaatattaccaaactatttacattatactggaattctgatgtaggtacaataatttacaactaaaaagtaggtataaacaaaaataaaaaattttaacctaaggaaaaataatattttatatttaaatataagcaattaacaccattcaatttcatcattcatttatctttttttacatttgtatattaattgtatattgtgtgaacattgttttatttttttaatgtcaacgaaatttaaaaattactttacgatttgctttacgttacgttaaggtagttacaaaaactaccattttaacatttatcctctacgacacgttagttgctttacgtatacggagatgcgttacgttacgtagcaacaaaaaactccctatttttaattacacagaagcagtggcaaaagacggaaatacaatttaaacattgacacatgacaagctgcctgattggtgacatttgacaagacagtggcgtcaatgggagagggatattcacaatttctgttatatttccatcattaaattcgaaagaatcttcaaaattgaaggtaaatgaggttttataaatttctttgctcccttaaaaaaacaatggcaaaagagcaaaataaagtttaggcttgcaaattg

SEQ ID NO: 5374 - DNA, 428 bp, Diabrotica virgifera
acattcaaacttaaatttattgatgattgtacgattgaaaacctttcactatggttgaaaattcaggagactgtcttttaagtagttagtatgtggatttacagtgctcctcggtgaattttaaaagaaagtgtttatgtacaatgtgggtacacacttaacacgaataattgtaaatttaggcatagattagtcagttaagataatcagtcagtgtagaaaatgacacatgacaagctgcctgattggtgacatttgacaagacagtggcgtcaatgggagagggatattcacaatttctgttatatttccatcattaaattcgaaagaatcttcaaaattgaaggtaaatgaggttttataaatttctttgctcccttaaaaaaacaatggcaaaagagcaaaataaagtttaggcttgcaaattg

SEQ ID NO: 5375 - DNA, 970 bp, Diabrotica virgifera
  SmartBlast Evalue=3E-28; Info=Transposable element Tcb2 transposase (Fragment) n=2 Tax=Camponotus floridanus RepID= E1ZYL6_9HYME
atcatcatcatcaatggcgttacaactcttcgtgagtctttaccgcgtttactattgccttccatgtttgtcggtccgaaggatgtaggggctgaactacggtacgagatgctatcatacgacttcggaagacaggttcatacacccgcaggccaggtcaaggccgacatcgatgcagtaaaattcgagatgaccgcttcattgtcagcaacgtgctgagaaatcgcttttgcaccgctcctgaagctcgtacgcgtctttttgaggtgagaaatgatagtgcgagtgaacgtacaattagaagaagactagcagaaagaaatttgagggttttcccttcagagcgcgccacacagctgctcccccaacaccgcagagctatactaagaacatagtgttctcagacgagagcagaatagccctaagaggtccagatggacgtcctcgtgtctacaggtgttaaaatgaaaggtttgcttcatgcactataaccgaaacagtggcttaccgagtagggtcaataatgatttgggaaggtatctctaacgaagctcgtaccgatcttgctgtgttcgatagtggcaatgtgaatgcttgaagaagatacgtggaagaaattctccaagaccatgtcatgccgttcgcaccgttcatcggtgacactttagatataactttagattaatgcatgacaatgcacattgccataccacaagaatcaactgtgacaagtgatgaggttgggattcaagtattaccatgaccggcacgcagtgccgatcgtaagtaaacgaacacagttgaagaggtttccgcttacggtcaaaccgcgctgacccgcttttatacgttttcaaaatgaatgcacgtttttacatgtacgcgtacttagttaaatttagtttatttccgctttttgtagcgcgggtttagcgtttgtaaaatgaataaggaggcattgattactgca

SEQ ID NO: 5376 - DNA, 353 bp, Diabrotica virgifera
atcatcatcatcaatggcgttacaactcttcgtgagtctttaccgcgtttactattgccttccatgtttgtcggtccgaaggatgtaggggctgaactacggtacgagatgctatcatacgacttcggaagacaggttcatacacccgcaggccaggtcaaggccgacatcgatgcagtaaaattcgagatgaccgcttcattgtcagcaacgtgctgagaaatcgcttttgcaccgcttctgaaactcgtacgcgtcttttgaggtgaaaaatgttagtgtcagtgaacgtaccattaggagaagacaggcagaaaaaattgagggctttcgttcagctcgcgacaggccca

SEQ ID NO: 5377 - DNA, 742 bp, Diabrotica virgifera
taagtcatcctgcgagtcaggctgacggatttggtcggatggtcttgctattccaacatcctgacggtcgggttaggctatacaatttaggacagcttgtatattagtgcaccctaatatttacgtggcattggatccgagcttcataaagtttcattataaaacagttttgaaacaccaattaagtaaagttttttaatacaaaaagctcaaaagacgcattttaaatcaaagctaccttaaaattgttataaaaaagaagatcaactgacaaataaaaaatatcaatgaagataaactgtataaatgtttttaaatcaaagataatttaaattgatgttattaattattattaataaattgttttaaatcgatattactaataatatgcaatctttaagattttattccagctgaaagaactgctaaacagcttttcccaaaaatggcctcttttctataatgtgttcagactataagcgttgattgacaaatatacaagtatagctggtataatatatttatcaatcaacgcataagtctatctcatgctactcttgtacattataccattgattgaaattgtacaagaaataaacaaaaaaagtagcaacactgtgacaggcaaacattcagatgccaaatagcaaataaattacgattagtccaatgtatactcgtacatgtctaaattaaataagtatgtagtataaataagtagtaatcaattattttcagtaga

SEQ ID NO: 5378 - DNA, 575 bp, Diabrotica virgifera
taagtcatcctgcgagtcaggctgacggatttggtcggatggtcttgctattccaacatcctgacggtcgggttaggctatacaatttaggacagcttgtatattagtgcaccctaatatttacgtggcattggatccgagcttcataaagtttcattataaaacagttttgaaacaccaattaagtaaagttttttaatacaaaaagctcaaaagacgcattttaaatcaaagctaccttaaaattgttataaaaaagaagatcaactgacaaataaaaaatatcaatgaagataaactgtataaatgtttttaaatcaaagataatttaaattgttataaaaaaaagtagataaatagatacctaaatcaaacagatgaatgattataataaattaaaaatagttttgaaaaaccaatacaaaaagtttttaatacaaaaagctcaaaagcggcattttaaatcaaagttaattaaaattgttataaaaaaagaagatcaactgataaataaaatagatcaatgaagataaactgtgtaaatgtttttaagtcaaagataatttaaattgtta

SEQ ID NO: 5379 - DNA, 780 bp, Diabrotica virgifera
acagtgttaattcttctgaactcatgagcattcgaacaataaagctactgctgatctttttacatgaggcacatgtgatactttgaaggcctgttgtaagtaatggttattttgtaatgtaaacgaaaggatttgaggagaaaatattaactctatattactagcccaacatagaattacgaatttttagtaaaattaattttatatgaaaataaaaacaaaactgattacactatgggcatgatttgaatacgtgtgaacagagtccaatttattttaagtccgtatccttgaccacttgggcacctcagcttgacttaatattgtaaggatagcgtcgccagctcgcgccggtgatttgccaaatccatgttgcactcactcccaccttaccacgcaccgcaatcgatgagcagtggagatggaccgttggcaacgatataaaacgaagttcgccacaatagagaggggagttttacctgagtgttaatctggtaacaacttgactggcccaagggtattgactgaagactttaccgcttctactaaagggttgatttagtagcagctcccaaaccggatcttaaagcggcgatttagggataaactgtcctgccgcggcgaccaagtattgattggtcgatttcccgttccttatcggatcgattattgaccgatacatcctagctcaaacctagaacaattactgatggttctttcttcttgatgtgtgtgtatattacgtaacgcatcctattttcctttcaattaaccgtattt

SEQ ID NO: 5380 - DNA, 541 bp, Diabrotica virgifera
catgatttgaatacgtgtgaacagagtccaatttattttaagtccgtatccttgaccacttgggcacttcagcttgacttaatattgtaacgagagcgtcgccagctcgcgccgatggcttgcccactccttattgcactcactcccaccttaccacgcaccgcaatcgatgagcagtggagatggaccgttggcaacgatataaaacgaagttcgccacaatagagaggggagttttacctgagtgttaatctggtaacaacttgactggcccaagggtattgactgaagactttaccgcttctactaaagggttgatttagtagcagctcccaaaccggatcttaaagcggcgatttagggataaactgtcctgccgcggcgaccaagtattgattggtcgatttcccgttccttatcggatcgattattgaccgatacatcctagctcaaacctagaacaattactgatggttctttcttcttgatgtgtgtgtatattacgtaacgcatcctattttcctttcaattaaccgtattt

SEQ ID NO: 5381 - DNA, 664 bp, Diabrotica virgifera
ttttatttgtatttgatttggaatgtgtgtactgatttttcagccttagtaaatggatttagttgccttcgtgggagggcagctttgatgccctctcagtaacgcctgttctacgtttcgcttggtcggccgcagtatgtttctctgcgcaatcgcagtggttaactgtggggaatctagctttggtggattcaaagagatttttcagcgcaaagccgcgttaaagcagctttacatcaaggctatgcaagtccgtcttcttgcctgatctaacctttttatatcggtgctatttctgtgcaatttttgatatcattttcattgttcccaacaaaagaaatataccaaaacattaactttagctatttcagttggaaatttcaatctacaaattattattacttccaataaataacatttaaatttacacaataagttaagttttattctaaactgtaaattttgttatattggcacatgaaatttgacaacttgcatcaaaatagcgtgaaaaatagaacatgttttaatttttcgtctagcacaggaattgcatggaaatagcgcgtgggcatgcgcagttgcatgatctgtcttgcatggctcttgcctagcatgaaaatagcatcatgtaaaactgtctttatacaggatacaagtaatt

SEQ ID NO: 5382 - DNA, 632 bp, Diabrotica virgifera
gcctagtcgagaaaacatttttaatttgtttacagtgtctgccatactaaattatttggaaatattcaccaatagaattcatagtaattaacacactgatcaacagtatgtctacgtagaattttttgtcttcaagcagctttacatttaggctatgcaagtcttatgctatgcaagtccgtcttgcatggcatatctcttgcctagcctgacctttttatatcggagctatttctgtgcaatttttgctaccactttcattgttgccagcaaaggaaatataccaaaacattaactttagatattcacttggaaatttcagtccagcattaaaactatattcaagtataaatctacaaattattattacttccaataaataacatttaaatttacacaataagttaagttttattctaaactgtaaattttgttatattggcacatgaaatttgacaacttgcatcaaaatagcgtgaaaaatagaacatgttttaatttttcgtctagcacaggaattgcatggaaatagcgcgtgggcatgcgcagttgcatgatctgtcttgcatggctcttgcctagcatgaaaatagcatcatgtaaaactgtctttatacaggatacaagtaatt

SEQ ID NO: 5383 - DNA, 664 bp, Diabrotica virgifera
tgtagtgtgtggttccggcatctgtagcgagttcttcaaattagtgggtgaatattttcgatattttggaataatccccagacatggcgttacttgtgagaaaaatcgcatattgaatataataatcattataatgatgatcacttatgaaatatcagctagaccgggaaatgagtggagacagaacaactcatgtcaagacggagattctataaagcgtgaaatctgccagagatgtgcccaacagaccaaatcccccctggtctacccaatgtgctgtaatgaagaagatgcagtccataaatggtgctatcattacaccacctatggcaaggtcgcataggaataatagctatgctacttgttaataaattagtgtgataggggattcaatacgaagccaccaacaatgaaatttatcaaaaaaaaaatctttgatttagtcagaggaatggtgcgtgtggacggacttttatttgtgatattgtaaagtgtacaagtgaacgttaagaatctcgtgtgtattgatgtgatcttgattattgatatgagataatattcttatatgtcacttaatttaatcaatgtattaatactaatctaattaattaaccagatcacatatcaatatgttttcaatctcagggcgaattataaattaatt

SEQ ID NO: 5384 - DNA, 647 bp, Diabrotica virgifera
tgtagtgtgtggttccggcatctgtagcgagttcttcaaattagtgggtgaatattttcgatattttggaataatccccagacatggcgttacttgtgagaaaaatcgcatattgaatataataatcattataatgatgatcacttatgaaatatcagctagaccgggaaatgagtggagacagaacaactcatgtcaagacggagattctataaagcgtgaaatctgccagagatgtgcccaacagaccaaatcccccctggtctacccaatgtgctgtaatgaagaagatgcagtccataaatggtgctatcattacaccacctatggcaaggtcgcataggaataatagctatgctacttgttaataaattagtgtgataggggattcaatacgaagccaccaacaatgaaatttatcaaaaaaaaaatctttgatttagtcagaggaatggtgcgtgcgggtcgaccttatatcgtatattcgactatattggtgatatttataagatgaattcttacatttttagtttgacaaaaattggatcagaatattttaacgataaaaaagttttatgagcttatttcaataagaacaattggctccagtctggagtaaaattttgtagcatcaaattatttcaata

SEQ ID NO: 5385 - DNA, 804 bp, Diabrotica virgifera
gtcgcactaattttgatacaccaataatatgggtacgtacataacctgtttaggtaggtataaaataccatttataggtatttatgttttaagtaatagtaggtttaacggttttagtttacttttttagctggatctctccttataagagttagttttctagttgcattaagtgctatcgctaatctctatttgatttctttatcacaacgtgctctgtttgttattagagatccaaggtgtttaaacctaccctctacttcgaaatcagcattcttcctgatcttaaacggattgcggactaaaatcacgatttgggtattagtgctagaaacagcagagatgaaaacccaggatggtaagacactatggaacagagctagaggtagatggagatgtatagtttaaaacattaatcactgggtaagaaacagagaatagactggagcgactacataaaccgaattacacaacaaatgagtagtaaggatggcgaaaaacggttccccaataggaaaacgatcagtggcaagaccacaaaataatggaacgagaacttactggaggcacattgaaacaactaacagagttatgtctacacgaaaagaaaaaagaagacgacaagcatatttttcgatttagaatgcttttaaaataatgaatgatcaaatgctatatttgaccattgtcacttgttttgttctttcctatagttttgtataagtatatttattctattagaccagatattttcaagatttttcttaaaaatttttttgtagttttgttctatttccatgtttc

SEQ ID NO: 5386 - DNA, 513 bp, Diabrotica virgifera
ccctaggtaacatctgagctgtggatttgacttgcttacatgttgaagatatgacggcaagtataacttgccgtcagaagttttcagggactttcggcttcagtaataatatagtctcattctggatttaaattttttcaaaaatatttattgattttatatgtagagtagatttaaagggcgctaaaatatgtcccgcacgcaggcgccaatcagccttgcgggggccctggtggcaataccacaaaaaaatatggaacgagaacttactggaggcacattgaaacaactaacagagttatgtctacacgaaaagaaaaaagaagacgacaagcatatttttcgatttagaatgcttttaaaataatgaatgatcaaatgctatatttgaccattgtcacttgttttgttctttcctatagttttgtataagtatatttattctattagaccagatattttcaagatttttcttaaaaatttttttgtagttttgttctatttccatgtttc

SEQ ID NO: 5387 - DNA, 657 bp, Diabrotica virgifera
  SmartBlast Evalue=4E-40; Info=Endonuclease-reverse transcriptase n=1 Tax=Bombyx mori RepID=D5LB38_BOMMO
tgtctcgatttagagtttaaaagctacacgttacgcgaatgcttattattatttaggttgatcagtactaaagaaacatccttagtttatgtcctagttcttcttctttaagttccatcttctatcgaaggttggaaatcatcatggcaatgcggaccctgttgactgccgctctaaatagctctgcactactgcattcgaaccattcccgtaagttcttaagccaggatgttcttcgtcttcccacatttcgctttcctcggattttgccttgcataataagttgtaataatgagtatttttgccctctcatcacatgtcccaagtactcaagttttcgtcttttgatagttagtattatttccgcttatttcctatccttctagttacttccacttcgacattctttgaatccatgatattcgtaggattcttctgtaacaccaaaattcaaaggcggccaacttattcagatgggcttgttacaatgtccacgcttccaagccataaagaagagtagagaacacgtaacaccgaagcatccttaggcgtagttctaaccttatatcccgacaacaaagaaactttttaagtttaatgaatgatgcacgtgctatttcaatacgtgtcttaatttctttggtttggtctacattt

SEQ ID NO: 5388 - DNA, 647 bp, Diabrotica virgifera
  SmartBlast Evalue=6E-27; Info=Endonuclease-reverse transcriptase n=1 Tax=Bombyx mori RepID=D5LB38_BOMMO
tgtctcgatttagagtttaaaagctacacgttacgcgaatgcttattattatttaggttgatcagtactaaagaaacatccttagtttatgtcctagttcttcttctttaagttccatcttctatcgaaggttggaaatcatcatggcaatgcggaccctgttgactgccgctctaaatagctctgcactactgcattcgaaccattcccgtaagttcttaagccaggatgttcttcgtcttcccacatttcgctttcctcggattttgccttgcataataagttgtaataatgagtatttttgccctctcatcacatgtcccaagtactcaagttttcgtcttttgatagttagtattatttccgcttatttcctatccttctagttacttccacttcgacattctttgaatccatgatattcgtaggattcttctgtaacaccaaaattcaaaggcggccaacttattcagatgggcttgttacaatgtccacgcttccaagccataaagaagagtagagaacacgtaacaccgaagcacagtatatagaggttccacagtaaaactacttctctgtcggcgcttttatctcaagaagtaataccggcagtacttacgcaattggtaattcaccagtggtggatg

SEQ ID NO: 5389 - DNA, 837 bp, Diabrotica virgifera
ttgatattacatcaaaatcagtaccaatccaaacactgttaaaaatataacaaacgatctgatgatttcaatttaagaaaattattttttaaatatctatttgaaaaagtcctactcaaaaatatataaaaaagtttaaccaataaaaagtacgacaaaacaaaacagtcaatttcatccatcaacacaataggtgtataactaataacgggtacagaactagaaacaactttggacgttaaattgtataaaacaatataaaataacgaaaaaattgaaaaaaaaaaaaataaaagctaaggagtaaaaatgataaaagtataataaaagaatgaaatatttgatcaaaatggttgaggttgaggtaatttaaatacccagggctgaaaataaaaactggggtaatggtagacccctagcactacctcatttacatcatagtcggagagatagaagcggatgtgcgtgacaagcaatgtggaaaaactatacggggacatgttgaactatttgcgcacctgactttccccaaccagaaaccagagtggggggcaagggtagttataaggggtcaaagtcgcggtttttattatttttttgtgacgctcatgatcgagatagtgcaccaaaattttgggaataagtaggtcatgacgtaactaagtaaaatctccagggtgcggaacgttgcctggggtagaaaggggtggtaggcaagctgggttccgcccctggagattttacttactcccaaattttggttcactatttcgatcacaaacgtcgcaaagatcctttataatctttatattcacccctgccccacacctttgtcgg

SEQ ID NO: 5390 - DNA, 467 bp, Diabrotica virgifera
aagtttactccactgttataaaattttgatactaataacattttctgccttatagtcggagagagtcgatttattattttttttatgacgctcgtgattgagatggtgcaccgaagtttgggaatgggtggaccgtgacgtggctaagtgaaatccccagaggcggaaaccacagtgggggacgagggtagttataagcgatagaattgcggtttttatttttttttttgtgacgctcatgatcgagatagtgcaccaaaattttgggaataagtaggtcatgacgtaactaagtaaaatctccagggtgcggaacgttgcctggggtagaaaggggtggtaggcaagctgggttccgcccctggagattttacttactcccaaattttggttcactatttcgatcacaaacgtcgcaaagatcctttataatctttatattcacccctgccccacacctttgtcgg

SEQ ID NO: 5391 - DNA, 742 bp, Diabrotica virgifera
cattgtgttgggcaggtttcttgtattggttagttcttgagaaatccactgtagagtcaagacaggctcgtgattgacagtacatagacctatatattcacagttggtctaattgaacaagacaatcataagtcaaaacttgagtcatcaaaacgacttgatgtcgttcgaccaccctgttggaggaggtcctcgattacgataagcaccgtgtctatgtctactcgtgtctaaaatgttcttggtagatcttccatctttctatccggcaacattccatttcagcgttgtaattcttttaactttggccgtaacgccagttttctcattttatttgaaatgctttctctaaaggatatattcaacattggcctctccattgctgtctgtatcatgaaacctctatactctgggtattgagatttttgaagaggaagaactgatgtaagtagggaaaaatagaagagaagagatttaagactctaatgaagaggggcttagctcagacgaacaaatcaaatgggcagagagacactaaatctcaagtgagtattcgggctagcttcagtacattgaatattgcctttagagatataaaacagatagacgggataatgaactgatggaaacaaggaagaaaatgagacctgttaatacaaaacttaatacaactaggtaagaccactggagagagatcgagataaaagggacgataaagagagaagaaaattggcgccaactc

SEQ ID NO: 5392 - DNA, 566 bp, Diabrotica virgifera
gactagaactttgaactaagttttctgaaaacttggcctttacatccattgtgttctaggagcttcatttgtaaacccgaactggttaggggaaatttgacgtaacacaacttgtaaattctcttatggattatctttagcaacaatggagatgactcatgaagcttatcgtatggcattcttcgcattttttggcttattaattaattataatttaatttgtaacacaatactctgggtattgggattctgaagaggaagaactgacgaaataggggaaaactggactagaagagatttaagactctaatgaagaggggcttagctcagacgaacaaatcaaatgggcagagagacactaaatctcaagtgagtattcgggctagcttcagtacattgaatattgcctttagagatataaaacagatagacgggataatgaactgatggaaacaaggaagaaaatgagacctgttaatacaaaacttaatacaactaggtaagaccactggagagagatcgagataaaagggacgataaagagagaagaaaattggcgccaactc

SEQ ID NO: 5393 - DNA, 696 bp, Diabrotica virgifera
  SmartBlast Evalue=4E-44; Info="Muscleblind, isoform E n=1 Tax= Drosophila melanogaster RepID=B7YZJ0_DROME"
catttgttgatgttggtgaagcggaatttgtgaagcctgagatacgggagaggaagcaacagattgggaggcctcaataactgtcggtgaagcgcaagaagtgggaggaggagcaggggaggtggaatactcacatgacacgggcacaaaaggctgctgcaattgcatcagttgttggtaggtagttgcgtttggttggtaaaccggtactccggatttatctgctgctggccgtttataaggtaccattccagctggaaaggcaaaattttcgtagtaaaaggatccaacagatttcatgtccatctctaatctgtcagaacgaggcatcttctgttgtgctaccactgtttggggtactacccccaaaggagaaccaacacccgttgggtctggacccattatcgtaggcatgatgggacctggagcgaagtaaggactgtacgtgcttcctacttggggcattcctgtgaggtaggggttagcagccataagtgcatactgctcttcgagtgtcatagacaagtgggggaagtaggcaagggaaggcagtctattggcgcatccacaactgcttgaacttgaccaggaactaaagcttgaccaggtgtcagacccatttgttgcattagagcgtttttaagggctaagtggtttcttccgtttattaatagttgatccttaagatgctgtgga

SEQ ID NO: 5394 - DNA, 616 bp, Diabrotica virgifera
  SmartBlast Evalue=2E-48; Info="Muscleblind, isoform E n=1 Tax= Drosophila melanogaster RepID=B7YZJ0_DROME"
catttgttgatgttggtgaagcggaatttgtgaagcctgagatacgggagaggaagcaacagattgggaggcctcaataactgtcggtgaagcgcaagaagtgggaggaggagcaggggaggtggaatactcacatgacacgggcacaaaaggctgctgcaattgcatcagttgttggtaggtagttgcgtttggttggtaaaccggtactccggatttatctgctgctggccgtttataaggtaccattccagctggaaaggcaaaattttcgtagtaaaaggatccaacagatttcatgtccatctctaatctgtcagaacgaggcatcttctgttgtgctaccactgtttggggtactacccccaaaggagaaccaacacccgttgggtctggacccattatcgtaggcatgatgggacctggagcgaagtaaggactgtacgtgcttcctacttggggcattcctgtgaggtaggggttagcagcaactgcttgaacttgaccaggaactaaagcttgaccaggtgtcagacccatttgttgcattagagcgtttttaagggctaagtggtttcttccgtttattaatagttgatccttaagatgctgtgga

SEQ ID NO: 5395 - DNA, 682 bp, Diabrotica virgifera
  SmartBlast Evalue=5E-44; Info=Endonuclease-reverse transcriptase n=1 Tax=Bombyx mori RepID=D5LB38_BOMMO
ggccagcataagattggccagccaggatatacgtctacgtccacggcctctcctgccctcaatcttgccttgtagaatcaactgtagcagtcggtatttttcattacgcataatgtgaccgaagtaagccaattttctgttctttacggtgttaattatttctttgtcttttcttagcctctggagaatagttatattagttgtgtggtgtatatatgagaccctcaacatacgtcggtagcaccacatttcaaacgcctctaaccgttttatggcatcttctgtcaggctccagctttcaactccgtaaggaggacactaaagacgtaacatctaagaattcttatgcgtatattgatacttaaagacaagttgcacagaatctttctaagactgttaaaagagcttctggctttttcaatacgagtttttatttcgtagctatgatcccaagtatccttaatgttgcagcccagatagcatattttctgtactctctctaggggtgtattgtttactgtaatttgggcgtttatgttggtgtttttactaatgatcattatttttgtcttcttacagtttagttttaggccgtatttgttacatgcttctacaacattatccatgatcctttggagtcccctgcgcactatctgccagcagtactgtatcgtctgcatat

SEQ ID NO: 5396 - DNA, 630 bp, Diabrotica virgifera
  SmartBlast Evalue=2E-28; Info=Endonuclease-reverse transcriptase n=1 Tax=Bombyx mori RepID=D5LB38_BOMMO
ggccagcataagattggccagccaggatatacgtctacgtccacggcctctcctgccctcaatcttgccttgtagaatcaactgtagcagtcggtatttttcattacgcataatgtgaccgaagtaagccaattttctgttctttacggtgttaattatttctttgtcttttcttagcctctggagaatagttatattagttgtgtggtgtatatatgagaccctcaacatacgtcggtagcaccacatttcaaacgcctctaaccgttttatggcatcttctgtcaggctccagctttcaactccgtaaggaggacactaaagacgtaacatctaagaattcttatgcgtatattgatacttaaagacaagttgcacagaatctttctaagactgttaaaagagcttctggctttttcaatacgagttttttatatggaacaacggaacattgcgtagatagggctacgtatttcttatgaacgatagaagcgcgccgatgccgcttctatcgtatcgagaatgaatcgtatatcggcaaactagtagcaacacgtgcctgagagatttggcaacactgatctgtataagccaaacgttccgttcttaacgtgaaataaagtatagcac

SEQ ID NO: 5397 - DNA, 705 bp, Diabrotica virgifera
tttattgttcctgttattgaattccacacaaaaattcagctttttaaaacagttagtatgaaatatacaatctacaacaatgtctatggataccatttaaaagttttcaatatatttcccttagaaaatgacagtgatattagttttatatctatgaaaaaacatttatgcccggttgcaccaacagatcttaagcttaagtcagaatatcataagaattaatataatataattataatatattacaataagaataccataatataataatagatataattgataataaggtaagaatctaaaattatggtgcaacgtaaatgatactcaaggaggccctatctataagtaaagcttagcattcaggcattagtttttcatgaggaatccaaaagagcaacaaaaaactggggttcctatttaagattttagagttaccccccatccaacttccaaggtgtggactggggtcgtgtttggtatcattcgataagtttttgaaaaatcttctacacttgttcttttgggtttcatttcgaagtgtatttctcgagatcttagaccgtttctataatttacctatggtatggttaacaaacgaggaaatagtgaagatgaaatacaacacaggatcaataaaggtagaagcatcactagatccctcaattcaattttatgggacaaagatatcaggaaggaaacaaa

SEQ ID NO: 5398 - DNA, 597 bp, Diabrotica virgifera
tttattgttcctgttattgaattccacacaaaaattcagctttttaaaacagttagtatgaaatatacaatctacaacaatgtctatggataccatttaaaagttttcaatatatttcccttagaaaatgacagtgatattagttttatatctatgaaaaaacatttatgcccggttgcaccaacagatcttaagcttaagtcagaatatcataagaattaatataatataattataatatattacaataagaataccataatataataatagatataattgataataaggtaagaatctaaaattatggtgcaacgtaagtgatactcaaggaggccctatctataagtagagcttagctaagctggagcttaagatctgttggtgcaaccaggcattaaaatccagtcaatatctaaaaaaataactaaaaactatcaaatatcgccagacattgttgacatttgcattcgaattaaaacaaaagctttgaaatgttatgaaaatatgataagatgttttttatttaccataaatggtgaatccttccaacaatattttttccaatgaacccaagatcctcctaagctcaaatcc

SEQ ID NO: 5399 - DNA, 794 bp, Diabrotica virgifera
  SmartBlast Evalue=4E-13; Info=CUB and sushi domain-containing protein 3 n=1 Tax=Harpegnathos saltator RepID=E2C845_9HYME
taagaatgttgtaattcttatacaatatattcaaaactcgatacttcgaaataacggtacatatttcgacataaatataaatttattcataggaaaaaatattaaatgtatataatttttattttatatattacaaattacaaataaattaaggcaacattcattcaacaggtgaggagagagtaaatgaacctaattcttcgtcatttatgtttgtcaaatcttgcctttttcttgccctccggatgaggaagagaactgcggcatttataacaaataggcctacaacgacaacagccggtgctatcaaatctgaagccatttcttctactttgacggggttaactcgtattatatctttggtttggttccaatatggcgttgtagatttttgacagtgcaatagaggcagtgaactattccaaaacgccccttggcatccaacgctctttattctagtacccgtatcaggaaattggtatcccaaacaacaactgaataccattagttcagcatttctgtacatcaaataggaatcctgaggcaactcgatctcagggcatcctactgcagcgaaatgtaacaaaaaacctcttcgagggttgatgctctgagtagagcttaacactatttcaattgactctgttcctgagatcacttcggttggaggatgagtttgtttacacgttgagaagattacttggccagcgtccctgatttccagctggtctatgcagtttggacggtccactatcagcgaaatatccagaatagtaaccttgattttctgtttc

SEQ ID NO: 5400 - DNA, 501 bp, Diabrotica virgifera
taagaatgttgtaattcttatacaatatattcaaaactcgatacttcgaaataacggtacatatttcgacataaatataaatttattcataggaaaaaatattaaatgtatataatttttattttatatattacaaattacaaataaattaaggcaacattcattcaacaggtgaggagagagtaaatgaacctaattcttcgtcatttatgtttgtcaaatcttgcctttttcttgccctccggatgaggaagagaactgcggcatttataacaaataggcctacaacgacaacagccggtgctatcaaatctgaagccatttcttctactttgacggggttaactcgtattatatctttggtttggttccaatatggcgttgtagattctagcttattttattttctcatttgtttttgtgaaaaaccaccgagcactttcgacgagaaaaacagatgagaatctgtagaaaagcgttgtttcgcggcctacggtccgt

SEQ ID NO: 5401 - DNA, 824 bp, Diabrotica virgifera
gtcaaattttataataaaacccgtaatcggaacagtagtccactttctgtcagttgttgttgcgtgaaatagatttccgacttatttcgtatgctttaaatgatgacgcacgggtaaagactcgcggactcaactgtatatttctttattttgctttttaaatgtgaaaataaaaattagtatgtaatattattttacaatttcagaggctacagtagcgcgtcatcaaaacggaaaacgcgttccaagattgcggctttaattttgaatattttgttgagatatttggcacacacatagtatgttgaaattaatctaaaattaaatacaatattaaaaaaactagcctgtaccgccattaaaagaaaaaaaaatacactttgttcaaataaacttttttatcccatgcctacattttgtggcacattggaactactaaaattctttatttctaacaagaaatcgaacatattaggtttgttctagcaaacagtcaaactagtcagaaaccgtcagcaaacagttggtcagtgagagaacataatacagtcaccagtgctatcccctctactcgcgctggtcgactattcgctgatggtttcaaaccgtttgaaactgatgctagaacaaacctatattattcgtgtgaaagaaagactatgcgaaaataattattttgttggaatattaaaccatcatataattctgttctgaaaatagtaaattgtgatttttatgtattcaaattagtgtagtagttaaattgtatatttctccattctttttataaaactatatagtagttttatataataaatatttgc

SEQ ID NO: 5402 - DNA, 470 bp, Diabrotica virgifera
tacaattgctttttaatattaatttgttttgttgtaaaatgtataatccacttccgcacaaatcatgtgacatttgatttaaaatgaattcaagaatttttttgtaattgggcaacattaggtttgttctagcaaacagtcaaactagtcagaaaccgtcagcaaacagttggtcagtgagagaacataatacagtcaccagtgctatcccctctactcgcgctggtcgactattcgctgatggtttcaaaccgtttgaaactgatgctagaacaaacctatattattcgtgtgaaagaaagactatgcgaaaataattattttgttggaatattaaaccatcatataattctgttctgaaaatagtaaattgtgatttttatgtattcaaattagtgtagtagttaaattgtatatttctccattctttttataaaactatatagtagttttatataataaatatttgc

SEQ ID NO: 5403 - DNA, 878 bp, Diabrotica virgifera
aagaaatacaaaaggattatgatatatagcccattaagcagtgccgttttatgcattgggcgcttggggcgggcgcccaggggcccggaccccggagggggcccgtaaggacccgttcctcttactaataaaaaagtaaagtcctctaaataatctacgtattttgcaaaatagaaaaaaaaagacgaaatacctgcgatttcaaaatggtctgattttaagactgatgacttttaatactttatatgtgaaatataaaaaaatatgttgatgaaaccaaagagaacttgcataatgaaattacccattctataacattatgccaaaagttgaataaacatttataaaatttggtgtcatccaggatgtaaagattgtaaaggcaaaatttcccaatattttacctttactgctagttaatttcacgataccaacttctaatgcatcaggcgagcggcctttttcgtctttaaaaagaataaaatatatttaacgccaaatttgggtcaagaaaatctagacgcatatcactattgtattgattgtattatagaaaatgaagacctggagcaactgaattgtgatagtattatctgacagattgctaatgccaagtcaagaaaaaaagtgatctaatttttgtcttatgtattttttagaatatgtttttttgcttgtcatgtgttgtttctattttttatttatgtttttaaatgtattttttggattattttcttacatttgctattcttcttgcttgtttaaaaaaaagtattttatgtaattttacaataaacctttatagttaatgcatgtgttttcttgttaaaaaaactgacaacgaatatcaatgaaaggggcccctaaacctccagcgc

SEQ ID NO: 5404 - DNA, 392 bp, Diabrotica virgifera
ataaaagcatatttaaggtcaaatttgggtcaagaaaacctatacgcattatcactattgtatatagagaatgaagaactggagaaactgaattgtgataatattatatggcagtttgctaatgccaagtcaagaaaaaaagtgatctaatttttgtcttatgtattttttagaatatgtttttttgcttgtcatgtgttgtttctattttttatttatgtttttaaatgtattttttggattattttcttacatttgctattcttcttgcttgtttaaaaaaaagtattttatgtaattttacaataaacctttatagttaatgcatgtgttttcttgttaaaaaaactgacaacgaatatcaatgaaaggggcccctaaacctccagcgc

SEQ ID NO: 5405 - DNA, 736 bp, Diabrotica virgifera
tattttaactatgtaaaacatacattattaaaatatttcaaattacttttactaagtacatatttactaagtaggtttattaagtaaactaactttaagtgtttacaacacgacattgcagtgaatttgcactttgtatttgacattatggatgcgcactggtgttgacattcggtttttccaaattttttgaattttgaatgaaaagcgaatctcaacaacagtgcgcatccaaatctcaaatacaaagtgaaattggtcgtgctactacttgattgactaagatgtaacatctatatgacgacaatctcaccctagtaagttgtttttaatacataatttcaccattgtctctttaatatcattttagcgtctttgatgatgttagtggctactaacgaaatatcgtattcagtagaaaagagtacacctggtcttctattcagctgtccacccaataattttggttatttaatatatatcaggcttaacgttccaatgaacggaccaaagatatacggttcaataaaatgagtctttcgtttcccatcttgtttctgggtgaagtttttactcgcttcatttgagaatgaacgttctacactgctacactggttattatgccagggaaatgtttggaaaaaaatctctatcacaatattccattacgcggacaacttcggtatttggttccaaagatgatattgtattacagttacaccataacatattcagc

SEQ ID NO: 5406 - DNA, 550 bp, Diabrotica virgifera
tattttaactatgtaaaacatacattattaaaatatttcaaattacttttactaagtacatatttactaagtaggtttattaagtaaactaactttaagtgtttacaacacgacattgcagtgaatttgcactttgtatttgacattatggatgcgcactggtgttgacattcggtttttccaaattttttgaattttgaatgaaaagcgaatctcaacaacagtgcgcatccaaatctcaaatacaaagtgaaattggtcgtgctactacttgattgactaagatgtaacatctatatgacgacaatctcaccctagtaagttgtttttaatacataatttcaccattgtctctttaatatcattttagcgtctttgatgatgttagtggctactaacgaaatatcgtattcagtagaaaagagtacacctggtcttctattcagctgtctactcaataattttgggttatttgatatatcatcatcatccagtattctgcattcaaagttgaacataggcctcccctaatttctttcagctctgtcga

SEQ ID NO: 5407 - DNA, 663 bp, Diabrotica virgifera
gccaactccgcgcatttttttgtgtttattctctggttaatctacgtaccagttccttccattctgtttcttgctttgtttttttacttcccccccaacttaagccgattctgttgtgttctctggttactgttttcatccaggtattatctggtcgtcccctcttccctaataataacaccaaacattccatgtattgttcctagaatgtacacacaggacattgaaaacattcctggaatgtcctcaaaagcacaagaacgtcccctaaatgtcccaggaaagtcctctgtcagcattttaaacattccctgaatgtcttgttggaacattccatgaatgtctacgaatgttctttggacattcacagtatattttttagacattccctggatatagtcgctgatgtgacataatgcctccgatttgttttttcatgagttttgtaagagagactaaaaaactttgtttacagtcacctccttttcatatgatattttttgacatgttttgtagtaaattcaactatctatttactacaaaacatgtcaaaatttacatgtgaaaacaggagatgaccctaaaaatggtttttcgtttcctacaaaacatgaaaaagcagattgtcacatcactgacgatataccagaagtatatgtggcc

SEQ ID NO: 5408 - DNA, 619 bp, Diabrotica virgifera
taattatgtgaacaaaaaacgctttctacgcatgatttttttaggtattgaacagatggaactcgttggacccaaacctcgtgaaaatggattatccaacaattcgaactttaattcatggatttccctaataacaccaaacattccatgtattgttcctagaatgtacacacaggacattgaaaacattcctggaatgtcctcaaaagcacaagaacgtcccctaaatgtcccaggaaagtcctctgtcagcattttaaacattccctgaatgtcttgttggaacattccatgaatgtctacgaatgttctttggacattcacagtatattttttagacattccctggatatagtcgctgatgtgacataatgcctccgatttgttttttcatgagttttgtaagagagactaaaaaactttgtttacagtcacctccttttcatatgatattttttgacatgttttgtagtaaattcaactatctatttactacaaaacatgtcaaaatttacatgtgaaaacaggagatgaccctaaaaatggtttttcgtttcctacaaaacatgaaaaagcagattgtcacatcactgacgatataccagaagtatatgtggcc

SEQ ID NO: 5409 - DNA, 780 bp, Diabrotica virgifera
ttatatttctatttctatcaaacgtttataatgaaaatatacacatgatttatacgaaatgttgctctttgagaactgatctatctcaattattaaagagtttgcaagtaaagtcggttcgctaaactcagacacaactggctagtgattttagtcggtaatttttttgtttttggccaattttgccaaaattggcaaaattactaactatttagtaattattaactatttagtaattatttttttgtccaattttaccaaattggctaaattacttactaaaatcactagccagttgtgtcgagtttagcgaaccgacataataattttctattagtaggtaaactggaatcctttatggatgattgactatttaagcatgaggaatgtcattacttatctgtcttgtgtcaatattaaacggattattaacgttcacatgttttgttgttattgatgttattaacaaaataagagtaatcaaaattttactttgcctcattattcaaagtaactccaaaaacaaacattgattttttgttattttagtgtcttaatgttgaatatgatatagttctgtatatgcttttcagttcggtatacaagtatatattatgtttcatcataatagaaatcaaggaatataatatagtgaagcatactttcctagataatataatattcagttcagttaattttgaacactggtgaatgactaaaatgcgacgaatacatggctaaataaattattttcaacactatcactatttaaacattgca

SEQ ID NO: 5410 - DNA, 509 bp, Diabrotica virgifera
ttatatttctatttctatcaaacgtttataatgaaaatatacacatgatttatacgaaatgttgctctttgagaactgatctatctcaattattaaagagtttgcaagtaaagtcggttcgctaaactcagacacaactggctagtgattttagtcggtaatttttttgtttttggccaattttgccaaaattggcaaaattactaactatttagtaattattaactatttagtaattatttttttgtccaattttaccaaattggctaaattacttactaaaatcactagccagttgtgtctcagtttggcgaaccgactatacttagtatctgccttgttgtcttttattactagacatcagaatctttacatatctgctaactcactacttgcctatttagttaaacctaaagatacgtatccattaggttgctgctccgtgtagcagctccacatagtggatacgttggtgctcctactcgccgctcaccctgtatgtagaggag

SEQ ID NO: 5411 - DNA, 692 bp, Diabrotica virgifera
tatcaagtcacctaggtctcgataacacggacagagctccaccagagctaatttttttgataccgtagatatttggtttgagtgaactcttagtgtgagtgggaccgatatggctaaatctggatacatgggaactatttcaacggtatccactgttgtctatacacagttgtgagacatgggtgtcttctaacagatgaaaacgagctattaatattcgagaggaaagtcctgaggaaaatactaagtccaataaatggaaatggaacctgtcatggacataacttggaactatacaataagtataaagaattagacgcctgcaaaagacaggacatctagccagaggaaactagacgaagaagtagccaaggttgagatggtgtagatttgtagatgaagataacagaaagatcggtgttgtcaactggctagccagaggaaactagacgaagaagtagccaaggttgagatggtgtagatttgtagatgaagataacagaaagatcggtgttgtcaactggcatcaagctacacagaacaagaccgaatgtagtcaatttaggtcgtcagacaatgatgatgatgactatggaaatatatttgtcttggatatgtagcactttcaccaaaataattattcttttgtccatcaaaaatgctgttgaaaatgttttggcagatcggatttg

SEQ ID NO: 5412 - DNA, 599 bp, Diabrotica virgifera
tatcaagtcacctaggtctcgataacacggacagagctccaccagagctaatttttttgataccgtagatatttggtttgagtgaactcttagtgtgagtgggaccgatatggctaaatctggatacatgggaactatttcaacggtatccactgttgtctatacacagttgtgagacatgggtgtcttctaacagatgaaaacgagctattaatattcgagaggaaagtcctgaggaaaatactaagtccaataaatggaaatggaacctgtcatggacataacttggaactatacaataagtataaagaattagacgcctgcaaaagacaggacatctagccagaggaaactagacgaagaagtagccaaggttgagatggtgtagatttgtagatgaagataacagaaagatcggtgttgtcaactggcatcaagctacacagaacaagaccgaatgtagtcaatttaggtcgtcagacaatgatgatgatgactatggaaatatatttgtcttggatatgtagcactttcaccaaaataattattcttttgtccatcaaaaatgctgttgaaaatgttttggcagatcggatttg

SEQ ID NO: 5413 - DNA, 676 bp, Diabrotica virgifera
ggtagctcgccgttgatacgtagtgatttttgataattgtggacgaatctgggaaaaatatggcatagaagttaaatattctacataaacatcattgaacaaccaagaaaagttaccagtaaatctctagagggtatttaggaagccgattgatataaaagaatgtaaaaatataccacgtggaatttgccgtgagagaggtagtttcactacgtatcatatcccaggttcgtctacattctatagttgttacaagctatagtcaccttttgtttttttggaatggtttggataacaataagataactcaagcaccattacctaaccttaccgtcaccagcatagcagccgtttttgctttattcccaacagacttccaaattcgttggattttggtagcgccttgaaggaacacccttataggaccttttttttgtggaaacttctgttggataagttaagtttttatctatctaaatatattgattcttgctctcttgtatttagaaccaatgtaagcttttatatgcatatttaagtacctatactacatatagtttttgtagtaaataagggagttttgattaacaaactgatattttaaactgaacaaaccaggtaatggtaaataataataataaagtaaattaatctaaaattttgttaagggaagggg

SEQ ID NO: 5414 - DNA, 612 bp, Diabrotica virgifera
ggtagctcgccgttgatacgtagtgatttttgataattgtggacgaatctgggaaaaatatggcatagaagttaaatattctacataaacatcattgaacaaccaagaaaagttaccagtaaatctctagagggtatttaggaagccgattgatataaaagaatgtaaaaatataccacgtggaatttgccgtgagagaggtagtttcactacgtatcatatcccaggttcgtctacattctatagttgttacaagctatagtcaccttttgtttttttggaatggtttggataacaataagataactcaagcaccattacctaaccttaccgtcaccagcatagcagccgtttttgctttattcccaacagacttccaaattcgttggattttggtagcgccttgaaggaacacccttataggaccttttttttgtggaaacttctgttggataaggtttctctggagttgtagcagtgcattgcatctattttcacgactggacggacaaacaaacattactggtataagtattcactcgaacattagcttgaggacagagagctatgaaaatgttactttttttaacaaatggagtagacttgctgtat

SEQ ID NO: 5415 - DNA, 807 bp, Diabrotica virgifera
tcgcgtgtaactcgaaaacagtcaattttagagcaagatcacaagagacctttttgttccggttgatccagataatctaaaacagatttgtccgaagtgaaaaaattgatttttttgaattcgtttaaaaaattgtttaaacaattttccgaccgcggtacaggtgaatttgtttaaaggacctgtttttgagtaagtttgtgcaaaaaaacgaatcggaataatttacctaacggggacaagcatacgtcgtggactatttccattatgagccaaatgcagatggtttggaaaacattaaacgatagatatctatgtcttgtatatatcttgtagatgcaagttgcgcaatcggcaacataaccataggctgttctgttgttcgcatgtagctgccatagtttaatatttatggcatggaagatattctacaaaaatcatcatgccagcagaatatcttgcaaaactgtttgacaatacagatgttatacctgtaatagacgaagacagcgatgaagactttagaactgttaagtgtaataccaacgaatataactctccgaatactctatgcatatacctatacggagctatatattctttggtaacactttcctcattcattttatggtgttttatgtggcagtaaacgtgaagcaaagtgtcactataggcagagatacatataggttatgtagattgtacaagcagatgtttgaataattagaatatgtataatgtaaggtaatattagggtacctactaaatacaaactaatgaacaaaggacaaaatgttttgattcaca

SEQ ID NO: 5416 - DNA, 476 bp, Diabrotica virgifera
tactgttgtagatgcgagttgcgcaaacggcaacataaccataggctattgttcgcatgtagctgccatatataatatttatcgcatggaagatattttacaaaaatcatcatgccagcagaatatcttgcaaaactgtttgacaatacagatgttatacctgtaatagacgaagacagcgatgaagactttagaactgttaagtgtaataccaacgaatataactctccgaatactctatgcatatacctatacggagctatatattctttggtaacactttcctcattcattttatggtgttttatgtggcagtaaacgtgaagcaaagtgtcactataggcagagatacatataggttatgtagattgtacaagcagatgtttgaataattagaatatgtataatgtaaggtaatattagggtacctactaaatacaaactaatgaacaaaggacaaaatgttttgattcaca

SEQ ID NO: 5417 - DNA, 1048 bp, Diabrotica virgifera
aattagttaatatgtattaaatgacttagatgtaaactaataatactttcccgtaataaaatttcttaatgattaggtatgctgtctcttttagattataaaattaagaaaattacatattattatgtctgcttcaatgttttacattggttgtattttccctcttgttttagctaaacaatgtttattgtgtgacttaatattatacagataaatagtaacaaagatatgtaggttaaataatgccatgtttaaactaaatatgattgattattattagtacttattaatagtttttatgtggggccgtatatttgttttttttgtattcctaaatttgtcaaaataaatatctatatctttataaaaaaaattattaaagtaagtttactctttctacataacgattttgttttagtgaattgctgatatatacaaagtgctattaacaaaagaaggaaaatttgaggaagttggatttgcctctccatccttttattgttgtgtagaagccagtggtttaagagtggagaaaatatttgtatgtaataataacgttttatatcttgttttattaataaataatgattttaccttaacacaatgatttatttcgccgtatgtaatatcactttattttcaagaaatattaacttaactctaaatatacgtttatctctgcgaaatatatttcttaacattaaataaattaattattaatagtaaaataataatattccttactaagaaatattattgctcagaaagaatagttttctaatgtgtagaaaatatatttttatgactaataaaattaattaacatcaagtgtaatttctttctgataaatgggtttgaagtttgccagaaagtgatagttcaatcatgtttaagatatatttctttggctatagtagaatttatttgaaatattttagaaaattatatcttacatacaaagatatatttcttaggcaatatgccaagtcgatctttcttaaatattaataaagtttctttatgtcaagaatttttttctctcggtgta

SEQ ID NO: 5418 - DNA, 234 bp, Diabrotica virgifera
attcctgactaagaaatattatttatcagaaagaagagttttgtaatgcgaagaaaatatattcttatgacaaatataatttctttctgacaaatgggtttaaaatttatttgaaatattttagaaaattatatcttacatacaaagatatatttcttaggcaatatgccaagtcgatctttcttaaatattaataaagtttctttatgtcaagaatttttttctctcggtgta

SEQ ID NO: 5419 - DNA, 673 bp, Diabrotica virgifera
  SmartBlast Evalue=2E-25; Info=Reverse transcriptase n=2 Tax= Ostrinia nubilalis RepID=A4KWG0_OSTNU
catgtcccaagtacttataagatgcagtctgttcaatatccattccatcaacaacaatattacgatttagcaccaaattagtcattatttgcgtcttgttgatattaatctttagtccgacctctaaggaagcgtgatataacttgttcaacattattattgcatcatccatacgattggctataaggacgatgtcatctgcgaatctcaaatgactgagcttctctacatttatattgataccatattcgttcagatctgcctcttaaaagtgtgttctaaaagggttgtgaatagctttggtgagatggtgtctccttgccgtactcctcgctgcatacagaatttattagtttgttgatcagagagtcttaggctagccgttgcattgtggtagatatattttatcatgttagtgtagcgatggcgtctattcagcgttccgtcaatgcttttgagagacttataaaaccttaaatctacagttgccatatttaaagtaaaggcacctctaaaaattcaattcaatgcacacaatgtataactgatcttttttaatttatgaacgggatatttaattttgagtattaaagggcattttgataacggacaatgaaggaatgaatgtgtttaatttcgtgtactgagcacaacattgtatcttatatttgta

SEQ ID NO: 5420 - DNA, 605 bp, Diabrotica virgifera
  SmartBlast Evalue=1E-44; Info=Reverse transcriptase n=2 Tax= Ostrinia nubilalis RepID=A4KWG0_OSTNU
catgtcccaagtacttataagatgcagtctgttcaatatccattccatcaacaacaatattacgatttagcaccaaattagtcattatttgcgtcttgttgatattaatctttagtccgacctctaaggaagcgtgatataacttgttcaacattattattgcatcatccatacgattggctataaggacgatgtcatctgcgaatctcaaatgactgagcttctctacatttatattgataccatattcgttcagatctgcctcttaaaagtgtgttctaaaagggttgtgaatagctttggtgagatggtgtctccttgccgtactcctcgctgcatacagaatttattagtttgttgatcagagagtcttaggctagccgttgcattgtggtagatatattttatcatgttagtgtagcgatggtctattctgcattctgtcaatactttgaacattttctgctggcttatggtatcgaatgctttctcgtagtccacgaatatcagtgccaatggtttgttgtattctgcagacttctctatcagattttttattaccagtaagtggtcgttagtgctagatccagatctaaatccagctt

SEQ ID NO: 5421 - DNA, 644 bp, Diabrotica virgifera
aaaagggaaaaataaaaataaaagaaaagttaaataaaagtaaagtaaaagaataataaaccaatttttacttaattaaaagttataacactaaaagtgaacagtatgttctgatagaaggatactttcttagttgtaacttttttttttggataattcatcataaaaaaggagcaatgtaatgtgcgtaaatagttatttatgaaacagtccgtgaaaaaacgcacgcgatttttagagcacgagcgacaacggagcgagtgctatacatcgcgtaagttcgcaaaaagtacttcacgcacagtttcatacaatattttatctacgataaacaaataaaaaactgtaactcttcgtcactggaattcatttctattctacaatttttagaactttgacatttaaaaattctaacttctttcaaaccacaaaactgtcaaaacttttgttgtaatttattgctcatatgtcatcaccatgataacgcgaaagttaaaacagtgcgaaaaagtaaatcctatttaaaatacattgttacttcacgcacacttgaaatccttcacgcactgctatctataatgacagttttcacaaactaaaaacgtatgaataatatgagatagagtagataaaattacgttttg

SEQ ID NO: 5422 - DNA, 626 bp, Diabrotica virgifera
gcctccttctaactccgggtttccattgtaaaaattgagtttatagttgttgctctacctgctctccatatatgccccaaccatctaacactctgctgaaatctgaaaatctggaataatatctacccgggtcgaaacatttttttttttaatttatgaaaatagttatttatgaaacagttcgtgaagtatgctttttgcgaacgcacgcgatgtttagagcacgagcgacaacggagcgagtgctatacatcgcgtaagttcgcaaaaagtacttcacgcacagtttcatacaatattttatctacgataaacaaataaaaaactgtaactcttcgtcactggaattcatttctattctacaatttttagaactttgacatttaaaaattctaacttctttcaaaccacaaaactgtcaaaacttttgttgtaatttattgctcatatgtcatcaccatgataacgcgaaagttaaaacagtgcgaaaaagtaaatcctatttaaaatacattgttacttcacgcacacttgaaatccttcacgcactgctatctataatgacagttttcacaaactaaaaacgtatgaataatatgagatagagtagataaaattacgttttg

SEQ ID NO: 5423 - DNA, 719 bp, Diabrotica virgifera
atgaaaatcacgaatgatggaacactagacggagccgttaaagaacgaaatactaggcaggaaagcaattacgctcctaaactcagtactctgggacaagcagataaacatccaaaacaagaaaaagatctataacgccgtagtgaaaagcattataacatacagctgcgaagtatggcctatgaaggaaaaatcaaaacgaatgttagaggtcaccgaaatggatttctggagaagagctgcaggaagatcaagaagagaacatgtcaccaatgaacggatacgagaaataatgaaggtgacacatacaataaatgacgaaatcaacgaaatacaactacgatgtttggtcacgtacaaagaatgcatgaagacagaatcccaaaacaaatacaaaactggaaaccgcaaggtaaagaagaagaggtagaccgaggaaaagttggcaggcaggaataaacaaagccatggatgaaagaggtctgcaagtagatcaatgtgcggacagagaggaatggcgaacgggtatcggaagacggagaacgttataaaccgataatacaataataatgtaaaagtaccagctttttaaatcctaaagtctgggatggtgcatggcggttgttgaacaaaaaccgggtttcggttataccgttttttacttacggtttaacctggcggttataaccggtcaaataaccggttgttccaaaaccggt

SEQ ID NO: 5424 - DNA, 527 bp, Diabrotica virgifera
gcctatgaaggaaaaaagcaaaacgaatgttagaggtcaccgaaatggatttctggagaagagctgcaggaagatcaagaagagaacatgtcaccaatgaacgaatacgagaaataatgaaggtcacacatacaataaatgacgaaatcgatgaaatacaactacgatgttttggtcacgaagacagaatcccaaaacaaatacaaaactggaaaccgcaaggtagaagaagaggtagaccgaggaaaagttggcaggcaggaataaacaaagccatggatgaaagaggtctgcaagtagatcaatgtgcggacagagaggaatggcgaacgggtatcggaagacggagaacgttataaaccgataatacaataataatgtaaaagtaccagctttttaaatcctaaagtctgggatggtgcatggcggttgttgaacaaaaaccgggtttcggttataccgttttttacttacggtttaacctggcggttataaccggtcaaataaccggttgttccaaaaccggt

SEQ ID NO: 5425 - DNA, 801 bp, Diabrotica virgifera
  SmartBlast Evalue=2E-39; Info=Glutathione s-transferase n=1 Tax= Aedes aegypti RepID=Q16P79_AEDAE
cataaagtgttaatcacgaaattgtataaaaacactttataccggtgtttcgtttaatttgaatcgcagctgcggtagttttttgaacaaattcggggacaaatttagttttctaaaatggcacatacatataaacttatatattttgacgtccccggaaagggtgaagcaattagaatgatcttaagctatggagaaattccatttgaggacaaacgcatccagatgggggattggccaaaacttaaaccaactacccctcttggacaacttcccttgttagaggtcgatggtaaagcaatccctcaaagtactgcaatctgcaggtacttggcatcaatagtaaaactagatggcaaagatgcaaaagaaaatcttgctctagatgttgcactagaaactctttttgatttacaaaaaatgaacggcgaaataaagtatgaacaagacgccgctaaaaaaaaggaaaaacttgaaaaattattacaacaaggattacctctgtattttggaaaactagacgaatatgctaagaaacacaatggttacatagcttttgaaaggttgtcatgggctgatattttattcgtttgtgtatatgaagcattagtcaatcttgcaggtaaggaggctgtagcttcttaccctagtttacagcaagttaagaagaatgttctagcaacaaaaggtattaataaatggattaaaaatagaccagcagtggagggatacgatttgaaacaagatctttaagatttttttatatatttttatttaataaataattattattaaataaaa

SEQ ID NO: 5426 - DNA, 740 bp, Diabrotica virgifera
ttatactttttaatttttttggtcaaacttgttttttcttaattttgtgtgatgtggaaggcaaaggtaaatacaaccctaaattttcacttttctatcttcgaccgttattttttaatagccatctaaaattttgcatcttatatataaaaatctattgctgtgcgttagtctcgctaaaactcgagaatgtgtggaccgatttggctaattttgatgttgaattatttgtggaagttcagggaaggtttatacggttttatattgtcattttagtagccaccaaaatttttacagctatatgtataaaatgctctttttacagtgtttgttgccatactcctccgaaacgacttgaccgatttttatgaaagtttgcaagtgtactcgaccggactgggagtaggtcgttatctatatttcatacccgtgcgtcttaagggggcttgccacccttatatttatttctattttttcagacaaactctttttttttaattgcatatgatgtggaacgtaaagatacatacaaccctaaattttcacttttctatcactaaccgttattttttaatggccatttaaatattttacatctatataaacaaaagaaagtcgtgacagttaccaacacataactcgagaacgactgaatagatttttatgaaattttccacgtgtatttgaccggaccgagaataggttgttatgtatttttcatatccgtacgtcgtaacggg

SEQ ID NO: 5427 - DNA, 523 bp, Diabrotica virgifera
ttatactttttaatttttttggtcaaacttgttttttcttaattttgtgtgatgtggaaggcaaaggtaaatacaaccctaaattttcacttttctatcttcgaccgttattttttaatagccatctaaaattttgcatcttatatataaaaatctattgctgtgcgttagtctcgctaaaactcgagaatgtgtggaccgatttggctaattttgatgttgaattatttgtggaagttcagggaaggtttatacggttttatattgtcattttagtagccaccaaaatttttacagctatatgtataaaatgctctttttacagtgtttgttgccatactcctccgaaacgacttgaccgatttttatgaaagtttgcaagtgtactcgaccggactgggagtaggtcgttatctatatttcttatccgtgcgtcttaaggggggttgccccccttatatttatttctacttttcagacaaactcttttttttaattcatatgatgtggaacgtaaagatac

SEQ ID NO: 5428 - DNA, 679 bp, Diabrotica virgifera
  SmartBlast Evalue=5E-19; Info="CG5484, isoform A n=7 Tax= melanogaster subgroup RepID=Q9VBC5_DROME"
acaggtttagtccagaacagataggaattttggcatcatctgcactggcatggtgtttagtagaacttgctatttacagtgctactttgtacatcatacaaatagaaaccaatctccgtactctcgaccttctagcctacattggatacaaatttgtaggcataattttaagcattttagtaagtctattagcaggaagggttggatattatgtatgcttggcttactccagtttttcgttgatgttctttattactaggagtcttaaggtcagtatcttaatcaataatttagttggtcttacgtacgtatctagtgtctatcaagaactctcttccatattttttttgatatgtcaggaagtttttaaaaatactatatttttatcaactaactaaataataataattaatacataaatttcttgaggcatttcaagtcgggcaaaacagtttgaaatattgcactagacttatctcttcttcctgtgccgtgctcgatcatcgagcgttggctatagtaattttgttgacgagacgagacagtcggcataaaagtgaatggaagtttaattaataacattaggtatgccgatgtcataatggccgacaacttggaagacttagaaagaataatgaacaaaatattaagatatagtggagaatacggactctctctt

SEQ ID NO: 5429 - DNA, 583 bp, Diabrotica virgifera
  SmartBlast Evalue=2E-32; Info=Protein YIF1B n=1 Tax=Camponotus floridanus RepID=E2A943_9HYME
acaggtttagtccagaacagataggaattttggcatcatctgcactggcatggtgtttagtagaacttgctatttacagtgctactttgtacatcatacaaatagaaaccaatctccgtactctcgaccttctagcctacattggatacaaatttgtaggcataattttaagcattttagtaagtctattagcaggaagggttggatattatgtatgcttggcttactccagtttttcgttgatgttctttattactaggagtcttaagttggcagtcctagctggaaattcgcaaaatgcaagttattacgatggaacgtcaacaacgattggacacaaaagacgcctctattttcttctattcttggcagttattcaacccttactatcatggtggctttcttatcatttgatcagctcgagtccaactctcgtaccgactgaaccagaaaagatatagtaaagtataaagctgggcttcctcttttcgtttgccgtacaatgtgtcttaatcctcataatgcctgatttttatatgatacaaatggagtcaatagttatgagagacgttaaagtgtaaag

SEQ ID NO: 5430 - DNA, 665 bp, Diabrotica virgifera
  SmartBlast Evalue=4E-53; Info=Cytochrome c oxidase subunit Va n= 1 Tax=Rhyzopertha dominica RepID=Q95V82_RHYDO
acctcctctacctaagaaaattaagtgatctgtgaataaattgtgaggttacttttacgtaatcctttgagtctttaagaaagtaaaatttcaaagtaatctattaaaaatgttcagaaacacagctctccgtgctcactcgattttaagaacagcccttgttgcccccaagccaaatgtatctactatgagattgatgtcaagccacagtaccgaaactgatgaacaatttgatagccgttacgaaaacttcttcaacagaaaagatatcgatggatgggaaatcagaagaggtatcaacgatttatggggtcatgacttggttccagaaccaaaaattcttattgctgcattgaaagcctgtcgcagagtaaatgattttgctttggcagtaagaattctagaagccaccaaggacaaatgtggaagtaaagttaatgaaatttacccatatattattcaagaactgagacctactttgacagaattaggtctcaataccccagaggaacttggttatgacaagcctgagttgcacctacaatctgtattccacatgtaattaattaaatgtatagttaagtcgtttcaagtatcataatgtagtttctataactaaatacataatttgaaataaaatattcaggttctgatgaactttaata

SEQ ID NO: 5431 - DNA, 600 bp, Diabrotica virgifera
  SmartBlast Evalue=3E-53; Info=Cytochrome c oxidase subunit Va n= 1 Tax=Rhyzopertha dominica RepID=Q95V82_RHYDO
cttgagtctttaagaaagttaaatttcaaagtaatctattaaaaatgttcagaaatacagctctccgtgctcactcgattttaagaacagcccttgttgcccccaagccaaatgtatctactatgagattgatgtcaagccacagtactgaaactgatgaacaatttgatagccgttacgaaaacttcttcaacagaaaagatatcgatggatgggaaatcagaagaggtatcaatgatttatggggtcatgacttggttccagaaccaaaaattcttattgctgcattgaaagcctgtcgcagagtaaatgactttgctttggcagtaagaattctagaagccaccaaggacaaatgtggaagtaaagttaatgaaatttacccatatattattcaagaactgagacctactttgacagaattaggtctcaataccccagaggaacttggttatgacaagcctgagttgcacctacaatctgtattccacatgtaattaattaaatgtatagttaagtcgtttcaagtatcataatgtagtttctataactaaatacataatttgaaataaaatattcaggttctgatgaactttaata

SEQ ID NO: 5432 - DNA, 664 bp, Diabrotica virgifera
ggcctctcaaaaaaatagctctatgggtctagcatccttgttatcttacattttttaaaagaaaaaaaaaatataaattatataatcaaatataaaaaatgtccgagtatatccatgttctgcaagttaaataaatattttaaattatttcttccataaaaaaatcttatttttattgaataatatgatttatatcatttatatatgtgttatttgacaattttttcccggtatttgttaattacagtaattaaaaaactaaaaaaactcttaacagcccgttaatcgacggatagtcgcagattaggtaacagtccatttttaccgccgtttgacaagcgaaactggttaatcgacctttcggagactcaaaacacttatgatcggctgttaactaacgattaatcttttgtcaggtgatcgactgtggttaaaactagtttgtttgacgtttctgacgcatttaatctattgttaatcgtcgattacataatttttgagatgatcatcctttcggaaaccgggcgttagtctagttgcggcactgatcgatgtcaggatgggggaggttcagatggtttaagtatgttgaaaatcaaggcgttcatcacccaatacgaaaaatggctgatagtaggagagatagaccaaagaggacctgggg

SEQ ID NO: 5433 - DNA, 583 bp, Diabrotica virgifera
ggcctctcaaaaaaatagctctatgggtctagcatccttgttatcttacattttttaaaagaaaaaaaaaatataaattatataatcaaatataaaaaatgtccgagtatatccatgttctgcaagttaaataaatattttaaattatttcttccataaaaaaatcttatttttattgaataatatgatttatatcatttatatatgtgttatttgacaattttttcccggtatttgttaattacagtaattaaaaaactaaaaaaactcttaacagcccgttaatcgacggatagtcgcagattaggtaacagtccatttttaccgccgtttgacaagcgaaactggttaatcgacctttcggagactcaaaacacttatgatcggctgttaactaacgattaatcttttgtcaggtgatcgactgttgttaaaactagtttgatagacgtttctgacgcatttaatctattgttaatcgtcgattacatcatttttgcgatgatcacctttcggaaaccgggcgtaagtctgatataaatttattatgtaatgcgaccaggggtgcagtcgacacaataga

SEQ ID NO: 5434 - DNA, 688 bp, Diabrotica virgifera
  SmartBlast Evalue=7E-35; Info=Translation initiation factor 1a n=1 Tax=Bombyx mori RepID=Q1HQA3_BOMMO
attgtgttggtttgagagacttctgtttgcttttgtagtccaatcttaaggcagttgctaatttccatttaatatttgaagagaaggtgtaattattttgtagtattcaaatgagtaactgaacgtgaacataattaatactctaacaaccactacactttttaaactaatggtaaaaagttatttttcattacaaataatttgataagttctgaaaacagctttgaaatgatgtctcgagcaactaaaaggaagcatgtactcttagaagtacttcaagatgactattctcctccaactgagaaccaacaaattgtgcgagttctcaatagtagagggaataacttacacgaagttgaggctcctgacaagtctgttttcctcgtgtccatgccaacaaagtttagaaaaaacgtctgggtgaagagaggtgattatgttcttacagaaccaattgaagaaggtgataaagttaaagctgagatggttaggattctgacaccagaacatataaagtattttaaaaaagacaatgtgtggcccaaagagtttgatgataagaaggaggacaatgacgatgaggatgatctttttgtgaatagaaatagaccagtttttgacgaagtgaatctagtagtgggtctgattctgacgaggaatctagtgaaagtgaaaacaatgattgatc

SEQ ID NO: 5435 - DNA, 571 bp, Diabrotica virgifera
  SmartBlast Evalue=4E-35; Info=Translation initiation factor 1a n=1 Tax=Bombyx mori RepID=Q1HQA3_BOMMO
gagacttctgtttgcttttgtagtccaatcttaaggcagttgctaatttccatttaatatttgaagagaaggtgtaattattttgtagtattcaaatgagtaactgaacgtgtgatgtctcgagcaactaaaaggaagcatgtactcttagaagtacttcaagatgactattctcctccaactgagaaccaacaaattgtgcgagttctcaatagtagagggaataacttacacgaagttgaggctcctgacaagtctgttttcctcgtgtccatgccaacaaagtttagaaaaaacgtctgggtgaagagaggtgattatgttcttacagaaccaattgaagaaggtgataaagttaaagctgagatggttaggattctgacaccagaacatataaagtattttaaaaaagacaatgtgtggcccaaagagtttgatgataagaaggaggacaatgacgatgaggatgatctttttgtgaatagaaatagaccagtttttgacgaagtgaatctagtagtgggtctgattctgacgaggaatctagtgaaagtgaaaacaatgattgatc

SEQ ID NO: 5436 - DNA, 686 bp, Diabrotica virgifera
  SmartBlast Evalue=7E-29; Info=Feline leukemia virus subgroup C receptor-related protein 2 n=1 Tax=Harpegnathos saltator RepID= E2BA17_9HYME
cagatcacttaaatatatttttacatatttacaacactacactttcgaagacaatatttccccttcttgtcgtttttaattatttaattaaatacatcttaacactctatgctttcaaagccaacatttcttcttcttgtcgtttattcttttcgaactcgtcttgccttcttttgacatttggtatattctgcgtgagtatagcacctattaccagacacagtccaagaaacaccaaagacaatagtggtcctatctgatgatttagttttcctagagctagtgttactattacgcccatagattgagtcactgcattcattagaccagtagttgtactttcttctgaaggaaatgttagttctactgctagttcaaatcctataggcatgtagcagttgaagaaaaatccagcaaaaatacaagtagcgtaagtcaacggcaggcttcgcattctaagggcccctgccatcgccaacattcctacggctgccatgcaatacacgaacagggtggtttctttgtaacgatgtgtcttatccaggaatattcccaagaggatagatccgatcataccgaacacgactgccaacagacccattctaccagcgtcttcttctccatgaggaaaaaagtgtacaactatctggtttaaaaaggtgccaaagccggcatagactcctaca

SEQ ID NO: 5437 - DNA, 562 bp, Diabrotica virgifera
  SmartBlast Evalue=5E-28; Info=Feline leukemia virus subgroup C receptor-related protein 2 n=1 Tax=Harpegnathos saltator RepID= E2BA17_9HYME
aataaagagacgcaatacgtgagaaagccttgccttatcattcattatccattaaataatctcgtctctatcatgttgcgctgtgcatactgctatattaacatcaaaaatttcataacaattcatacctatctgatgatttagttttcctagagctagtgttactattacgcccatagattgagtcactgcattcattagaccagtagttgtactttcttctgaaggaaatgttagttctactgctagttcaaatcctataggcatgtagcagttgaagaaaaatccagcaaaaatacaagtagcgtaagtcaacggcaggcttcgcattctaagggcccctgccatcgccaacattcctacggctgccatgcaatacacgaacagggtggtttctttgtaacgatgtgtcttatccaggaatattcccaagaggatagatccgatcataccgaacacgactgccaacagacccattctaccagcgtcttcttctccatgaggaaaaaagtgtacaactatctggtttaaaaaggtgccaaagccggcatagactcctaca

SEQ ID NO: 5438 - DNA, 669 bp, Diabrotica virgifera
tgaaaagtataagcatttatcagttattctgcacgtggattctcccaggcataaactgttgctagaaaagggtgaagatcagatgaggatgctggagctaaactggtctgttacttacaagattagtttttgtgataatttgcaaaatgtgtttaggtgcctcttttaatactagtgacataaccagtgtttaaacatggattaaaaaatagtgtgtgtacttttatgtatgtaagttatacttacagtagacgccctcttaaccgaccgaccctacacctttttggatgatactatttttagattagaggtcatacaagtttcataatttgtcttgtgagtgatattgttaattacatatgtatatacacatcgacattcgtttcactttatattttgacttaatttgtttgaaaatgaatcgtgacccatgggaaaagttatagcggacggactatatgtacatactacttttttgtttatagatcataaaatatatatatttttaatagagttacatatgtaatgtctttctgagggtggttttaaagattttcggtttaaccaactttttgattatccgacctatgggcagctcccgtcatggttggttaagagagcgtctactgtatatatgatttcaactatttcaaggaaataaatagattc

SEQ ID NO: 5439 - DNA, 586 bp, Diabrotica virgifera
aaaaattatctacagacactttttaactatttttttcttccaaatttggtatgtatgaattgaaaataataagttctttcaaaatctgcaaaaatatacagggtgtcccatttgaaataaatgggttgggggtgtttccggtgaaaccggaagtgtactagtgacagggggtgtagcatgagatgcgctttgcgtcactgtgcttgcatgcagggtttcaaaggggttgttcttttcgtttcggagatatttgcttggttccgttctttggcccaacccagtatacacatcgacattcgtttcactttatattttgacttaatttgtttgaaaatgaatcgtgacccatgggaaaagttatagcggacggactatatgtacatactacttttttgtttatagatcataaaatatatatatttttaatagagttacatatgtaatgtctttctgagggtggttttaaagattttcggtttaaccaactttttgattatccgacctatgggcagctcccgtcatggttggttaagagagcgtctactgtatatatgatttcaactatttcaaggaaataaatagattc

SEQ ID NO: 5440 - DNA, 870 bp, Diabrotica virgifera
aaaaatgcaaatgcaacacatttttaagtcaacaatagaaatagcaaagagaatagcaggcaatgaattaaccttttttagaaagtttagaaagaaatttgattagtgtatttcatttcgataatattatttggtatttacacgccataatcccgcttaaatttttgtataaatattgttgagaattatctggaaattgcagcttggtatttagatataaaaattacctttttttccagggggttgaaaattagctgaaggaagtaataatttagttacgaatcatttccaataattttgatattgaatttgataggttgtggtttattacaccaaaagctaataaaatataacatgatactagaaacagtctctgaataagtttaaggtgttatttaactcataaattcaactgaatatttattaactgaattaaattctgtaattattacaagaatatttataaacctcatcttactccatcttacatacatagaatcggcttggcagatactcccaattgtacttgtggcaaaatcggagatctaacacatgtcatattagaatgtcatttagggataaataacataaactacctttataaggaattacaaaatttaaaatgttgtttcccaataaaccttaatactttaatatttacaaatgataatatggaaattcttcatctcatttataaacatgttaaatcatgtaaatacaagttgtaaactaggcgtaatctttttttttggaaacggttaagtttagaaaaaaatggtataggacttttttgttctaaattgtgtgttctatccgtaccttaaaggaacgcactattttccgggacaccctgtatagggctgttctttt

SEQ ID NO: 5441 - DNA, 392 bp, Diabrotica virgifera
gccctcagcattcaaccatttaaagcttactaaatacaaataatactagttcggttaaaagatgtgtttttatgttgaaatacatttcaagaaaaataattatagtaaacaaatagtaaatacataagtactatcataggttggattattttaaatatgtactgtaaatcacaaactagttccttaatccgtagtgcgtacgatattttcaggtgatttaatttgccgaacattaacatacaagtatatgaaaaacaatgtaatttttttttggaaacggttaagtttagaaaaaaatggtataggacttttttgttctaaattgtgtgttctatccgtaccttaaaggaacgcactattttccgggacaccctgtatagggctgttctttt

SEQ ID NO: 5442 - DNA, 645 bp, Diabrotica virgifera
cggctcaaatcgtcagatttttgaaatatacactattttgcatgtacttaacttaccttatcttaatctgacaatttcgagtttttttaagtatagattttttttcggccccttttaacgaactcccctgtgctaagggccaatatatggtagaggtacatctgcatggtaccaggtttctccctatatgctaatctgacgcgctcgagtaactgcaaaaatccccgcttgggctcccctgccactatgattttccattacctactcaaattgaatttttaaggttttattgatatagcgtcaccgtaaatcactcatcggaaactctatacaacgtgagtggagcaaataattcaatatcgatagcaatagtgctcggggaacccagtggtaaatgtaagagaaatgctttaacaattgaacagacagagattttaaacagaagtggaaaggtgaaaccgtcgcatcgttattacgaatctgtgaagttttcaagcaaacaatacacaactctacgaaattccgaatcataagtctgattcctttaaaaacatatctgcaaggaaatcgttgaaaggataacttttcaaccactcgatgaatcacattcctaccaagtggtttctgcagataagaccggagggc

SEQ ID NO: 5443 - DNA, 611 bp, Diabrotica virgifera
taatattatatatatgtataatgaaaacttatcattttctcctaattctgaccctatactactccagactttatcctttttttcttatatttttataatcttcgtccgttaaatcatatattataggatattgtttaacaatttcaatgagtttttctgtaacacccattttaaaacacgcgaaactacaacggtagcggaaaaaaccgtgcatgcagcgtttcatgaaaggaacgctgttctgccgcgaccgttgcggattccgcgcaaagtggtctgaacacgttcataatccgccgtgcctatcgattcgccgcgataccgcgtaggttgcggttgcgaaagtttcgcgttggtttgggggatcctaaatgctttaacaattgaacagaccgagattttaaacagaagtggaaaagtgaaaccgtcgcatcgttattacgaatctgtgaagttttcaagcaaacaatacacaactctacgaaattccgaatcataagtctgattcctttaaaaacatatctgcaaggaaatcgttgaaaggataacttttcaaccactcgatgaatcacattcctaccaagtggtttctgcagataagaccggagggc

SEQ ID NO: 5444 - DNA, 770 bp, Diabrotica virgifera
ctgcatagagctttgcgtaggtgtacgaccgacgacggcgtttctcattggccatggttcgctccgggagatgtatatatctaattcattacccacggcctttagtaagcacataatatctcttctctaataaaatattgctgtgaaaaatggagtgcgtgagttccatagtattagtctttttaaaagtcactaggcgcatataatctccatgtatttatcatggatatgttattttcatattttagaatctcaatgagtgataatacagtgtgagtttaagatcttactctcccaattattttttgaaccgtaacacttatacactgcacgtcacagaaaacgcgccacccacaaaatcggtcattttgatgtctcgaatttcctaaacctgttgtccgctttaggtgatgttttaatatgttatagccttattctttaacaatatcgctgtaataatattgttgctagacaggtaaattgtcattgtataccgggtgtaccaatcaaactgtgttttttttctcaaagttcaccacaccctgtggaatattctagcatttataaaatactgaaattaaaacccaactatagcctcaggttttcttaacattctgtttttttgattcattcgcttatgttggataataaaaaagttagtacgtttaacaactagccatgttcttcatcaatacagggtgtttctaaatgagtgcgaaaacttgaaggtgtaattctgcatgaaaaataatgagtttgctttataaaca

SEQ ID NO: 5445 - DNA, 469 bp, Diabrotica virgifera
aaataatataaacaatattatacactactccaagaaatgaaccaccttaaaaatgggttatttttgatgtctctaatttcctaaacgtgttgtccgatttattaagtgatttttttgaatatgttatagccttattctttaacaatatcgctgtaataatattgttgctagacaggtaaattgtcattgtataccgggtgtaccaatcaaactgtgttttttttctcaaagttcaccacaccctgtggaatattctagcatttataaaatactgaaattaaaacccaactatagccttaggttttcttaacattctgtttttttgattcattcgcttatgttggataataaaaaagttagtacgtttaacaactagccatgttcttcatcaatacagggtgtttctaaatgagtgcgaaacttgaaggtgtaattctgcatgaaaaataatgagtttgctttataaaca

SEQ ID NO: 5446 - DNA, 645 bp, Diabrotica virgifera
cgagtaacgactattgtatctacaaccagtaacacttgaatactttttaccaatcgtatcccagcgagtaacggacggggtatattttacaagtgttatcgaatatcgttatcggtatgaagcgttttgagggtgtgagagtgaggagaaggtagaagatgaaatagagggaggtataatggtatacgtaaaaatgtaatgtatgtcattaacaaagatcgaatgcgagaacattatatttttatctagatctacgccatttgccgatgtagattatatagtagatcttgttatatcggaatacctatacaaaatacctacctactgagaaatacgattctcgatatgattaccggtactcaaatacaaaagtaatcatagtaatcaaagtaacgaatactgtaaatgattactttatacaaaagtaacgatttgtaacgaatactcgaaagtaactataatcataatcaacatcagtactagccattttagcatcatcattggctctacaaaccatgagggccttggactgttgtagaatcagcttccattcctttccaatgtccagctgatctttactggagccaagcaaataaacgatgtgtagtactagcgcagtcagattgcaataaacattaacgagag

SEQ ID NO: 5447 - DNA, 609 bp, Diabrotica virgifera
cgagtaacgactattgtatctacaaccagtaacacttgaatactttttaccaatcgtatcccagcgagtaacggacggggtatattttacaagtgttatcgaatatcgttatcggtatgaagcgttttgagggtgtgagagtgaggagaaggtagaagatgaaatagagggaggtataatggtatacgtaaaaatgtaatgtatgtcattaacaaagatcgaatgcgagaacattatatttttatctagatctacgccatttgccgatgtagattatatagtagatcttgttatatcggaatacctatacaaaatacctacctactgagaaatacgattctcgatatgattaccggtactcaaatacaaaagtaatcatagtaatcaaagtaacgaatactgtaaatgattactttatacaaaagtaacgatttgtaacgaatactcgaaagtaactataatcaacatcactactaggtggaggaagactgacgagtattatgagtacgaaattggaaaaccaaagcgaaaaataggaacaggccaagacccactatgactgggtataaaactttcggctgattttaagattgtcatctaagccatact

SEQ ID NO: 5448 - DNA, 679 bp, Diabrotica virgifera
atcaagaagagatgacaatatggcgtcaaggtattagttgctaggacgttttatttttcattcgagagttttacagtaataaatgagaaagttgtaccgaaattattgtgatttcgacgtaatatttctcagtctaactttggattatgaacattatcacgaaagttgatggagaacataggcagagacaagaggactatggagcatctagaatagcagtagagccaattcaacacaagcatggatgacatggataacatgaggaagaggactttgttcagcagtggacctttgaggctggatgatgatggactccatcaatgaggatgtaaaggatatcactttcatgtactggagtacaatgtaacattgtccaacgatttgaaagaaagaatacgaatatggaagtcagagaaaacgtcgaaatcaaactagttttagttaggtatattttaaaggactgtatgaaagtgtattaaggtttgtttaaatcctatatttaattgtgatacatgtgtaatatatttcattttgtactttttctacgattaatgacttaaaaatttatttatgtttattttgatttttgctggttgtttcaacccgtgaaatttggagatacatcgagcatttatttcactattgttgatatagtaaaaactacaaatgcagctattga

SEQ ID NO: 5449 - DNA, 574 bp, Diabrotica virgifera
  SmartBlast Evalue=9E-28; Info=Ubiquitination factor E4 n=1 Tax= Aedes aegypti RepID=Q174F4_AEDAE
ctataaaaacagctacacaaatcgaacaattccgaagcgttagctgtgaaagctttccacattcttgaaaacaatcaaaaaaccgatgactggttagcggacgcccctgacgagtttaaggatcctttgatggacacgcttatgtcggacccagtactgcttcctagtggacagatcatggaccggtctgttataatgcgacatctactgaatagtaatacggatcctttcaatagacaggtgttgacggaggagatgttaataccagccaacgatttgaaagaaagaatacgaatatggaagtcagagaaaacgtcgaaatcaaactagttttagttaggtatattttaaaggactgtatgaaagtgtattaaggtttgtttaaatcctatatttaattgtgatacatgtgtaatatatttcattttgtactttttctacgattaatgacttaaaaatttatttatgtttattttgatttttgctggttgtttcaacccgtgaaatttggagatacatcgagcatttatttcactattgttgatatagtaaaaactacaaatgcagctattga

SEQ ID NO: 5450 - DNA, 694 bp, Diabrotica virgifera
tactgaaagttcctctgctgtccgttttcctagacgaatgaaaggcggaatgtgatcgtttccctttcgttttctatattcgtcgtctgctgtcttattaattgaaaaagtcacagattaaggatgtaccagtaagaactttcaacgcgaaaaagtctcagttaaaatactatctaccattttagttttattaaattggtggattctgcatctgagactcttcaatttgttaagagatgtcgctggatcgcgtcccgatgggaatttgaatgatctttcaaattccccttaaattgatggttgagctgtttttcgattcagaggagtgcacgctagcgctgttgaaaagcctgaaacggtggaaacagctgtccggcgatcgtgcatccctctgaatcaaaaacaagcaaaactatcatttacttataatgttttatttatggaaaattacttggtacaggtgaacagggatctcgtgaaatgggcgggtcttgtactgcgcagacaaagaaagccttcagacagaaaaagatgaagtttatccgaatattaccgtaccgcaatgttgtcaatatgtgagtgaccactgtaatattgggtatttttagtatggtatctaaagaaatgagtctcaaataattgcatgtcgtgtaaatccataatcagataaagaattttaaaacattgtatggaa

SEQ ID NO: 5451 - DNA, 519 bp, Diabrotica virgifera
tactgaaagttcctctgctgtccgttttcctagacgaatgaaaggcggaatgtgatcgtttccctttcgttttctatattcgtcgtctgctgtcttattaattgaaaaagtcacagattaaggatgtaccagtaagaactttcaaacgcgaaaaagtctcagttaaaatactatctaccattttagttttattaaattggtggattctgcatctgagactcttcaattaattatgttaatgtttacaccactgaatagagaactgaacaacccctcgaatgagtcagcacacgatccctattcttatttaaaaaaatatcgattacgtcatcacgcccagagagatgacgcacgcgtgtaatatatatgctaaaacatcataatctaaaaacaaaaatcgacctgtttcggggattttcctcaatgtcgccggtttacgaaataacgaattcattcctttcatttgcaccatactgtatacatatttttttttttagctaaatattaagtaattttgga

SEQ ID NO: 5452 - DNA, 639 bp, Diabrotica virgifera
  SmartBlast Evalue=8E-29; Info=Soldier-specific protein-1 n=1 Tax=Nasutitermes takasagoensis RepID=Q59I48_9NEOP
ggttttatcgacgaacatgaacgggaaattcttcttctgttttcttctgaatcttttcgtggcaggggtgatttcccacaagtttactataccttcctatataaaaccatgttcgattagtgccccaaattttgagaaatgctgtctggaacatggaaaagaggccctaccacgtattctaaaaggtgaccggaaatttggtatacctaatatgataccactattaattccacagatcaatgttaatgctggacagggactcagaatatttttgaaagatgtacaagtccatggactggatacaacggaactaataaaagtcaaaattgataccaaagcccaaaaactttccatcagaattaaaatcccagagttaaaacttttaggaaaatatgacatcgaaggaaaaattctggtactgagaattgaaggaaatggagattttaacattgtagcatttaatggtgaatatgaatacaatgcaaactttcttctacataacattggcggagaagacttttttgacttggcagataaagacactttagacttcgttgtaaaagacttaaaagttcacttggataacctctttaacggggataaagcattgggtgaccaaatgaataaatttcttaacga

SEQ ID NO: 5453 - DNA, 612 bp, Diabrotica virgifera
  SmartBlast Evalue=1E-15; Info=Soldier-specific protein-1 n=1 Tax=Nasutitermes takasagoensis RepID=Q59I48_9NEOP
ggttttatcgacgaacatgaacgggaaattcttcttctgttttcttctgaatcttttcgtggcaggggtgatttcccacaagtttactataccttcctatataaaaccatgttcgattagtgccccaaattttgagaaatgctgtctggaacatggaaaagaggccctaccacgtattctaaaaggtgaccggaaatttggtatacctaatatgataccactattaattccacagatcaatgttaatgctggacagggactcagaatatttttgaaagatgtacaagtccatggactggatacaacggaactaataaaagtcaaaattgataccaaagcccaaaaactttccatcagaattaaaatcccagagttaaaacttttaggaaaatatgacatcgaaggaaaaattctggtactgagaattgaaatcccagagttaaaacttctaggaaaatatgacatcgaaggaaaaattctggtactgagaattgaaggaaatggagattttaacattgtagcatttaatggtgaatatgaatacaatgcaaactttcttctacataacattggcggagaagacttttttgacttggcagataaagacacttt

SEQ ID NO: 5454 - DNA, 699 bp, Diabrotica virgifera
aatactaaaataaagtgcctcaactatcaaatcattattttatcgattattattatgatatctgtacgaaaagaaacaacgaaaccgtgtcgatatgaagtatgtcagagtgatacaagctataatcatttaaagacagtacatattattttataaattttccaaagcctttatttctttataaacaaatctcgtactataggtacctacaatatttattttagaccagggcgcatctgtaaaaatattagtacatttggatgtagagaggtgactcatatttttttgcagaattgagttatcctcccactcaaaaaggtccggaacattgtttaaataatcaaaatgtcaaaaatgaaggaaaattcgatttttttcttcgttttttgattacaactttaaaagtattcattccgagaaagttgcactgacacaaaagttgcgtaaataaatttcctacaatatagaattggttaaaatttaaaaaaatagtcacccttgttgcaaaatagcaataattcgaaaaaaaaaccatacaaaaacaagtattcgcattttacgtttttcaaccatttatgctacacttaggaccttcatatttcacccagagaaactttatgatacagtaaaacaatactgtaaattcattaagatcggttcaatagattttgcaatccagctttcgcaaaaaaatcattt

SEQ ID NO: 5455 - DNA, 533 bp, Diabrotica virgifera
aatactaaaataaagtgcctcaactatcaaatcattattttatcgattattattatgatatctgtacgaaaagaaacaacgaaaccgtgtcgatatgaagtatgtcagagtgatacaagctataatcatttaaagacagtacatattattttataaattttccaaagcctttatttctttataaacaaatctcgtactataggtacctacaatatttgattttagaccagggcgcatctgtaaaaatattagtacatttggatgtagagaggtgactcatattgttttgcggaagttgcttgaaaatagctcatataatgttagttgagttgtcttcccactcagggggtccggaacattgtttaaataatcaaaatgtcaaaaatgaaatttgttaattgcaaaataaaaacatactctgtcctttgaaataatactttttttagcaaaactttctttgttcatatattttaacttagagaataaaagtttattatttttaaggataagcaattgtttaaacaatatttcac

SEQ ID NO: 5456 - DNA, 636 bp, Diabrotica virgifera
catcaacgttatattagaaatacggtttgtgtcaaaaaggttgaagtaacaaagagaaccttatgtagaaatagtacaagttggagtgagcgcgagagatagttcggaacatagtagatgaccgtgaaagtaaatccccatcgtcggccaccgtcgatgaccgaacagtgccgaacagcaaacagctgttcggtttcggtgttgtttcaaaccttttaaacagtagatagaaacagggttgccagattggtgtattttcccacaattttggggtaatttgaaagcgtggaaatttttgtaagcagaaattgtagtgggatttttgggggcggaaaattatggagtattttaaggggtcatggtaaattaaatttgcgaatgtacatagaactgcgtatatttacgtatattatatttgcgtatattaactgcgttataccggtgattatactcgcataaaatgaagaccatagaaactattaattatttctagggccctcgttgataagtagtataattttggtgtactgtttagtatttagtcttcattttactactaatttattaaaatgcggcaaaaatttagatgtggggtatttgagcttcaatttgagggaatttcagtttctaagtggg

SEQ ID NO: 5457 - DNA, 602 bp, Diabrotica virgifera
catcaacgttatattagaaatacggtttgtgtcaaaaaggttgaagtaacaaagagaaccttatgtagaaatagtacaagttggagtgagcgcgagagatagttcggaacatagtagatgaccgtgaaagtaaatccccatcgtcggccaccgtcgatgaccgaacagtgccgaacagcaaacagctgttcggtttcggtgttgtttcaaaccttttaaacagtagatagaaacagggttgccagattggtgtattttcccacaattttggggtaatttgaaagcgtggaaatttttgtaagcagaaattgtagtgggatttttgggggcggaaaattatggagtattttaaggggtcatggtaaattaaatttgcgaatgtacatagaactgcgtatattataccggtgattatactcgcataaaatgaagaccatagaaactattaattatttctagggccctcgttgataagtagtataattttggtgtactgtttagtatttagtcttcattttactactaatttattaaaatgcggcaaaaatttagatgtggggtatttgagcttcaatttgagggaatttcagtttctaagtggg

SEQ ID NO: 5458 - DNA, 783 bp, Diabrotica virgifera
acttgtaaaccacttctgaaataacatgattttgaacttttttctcagaaaatccccgtttttaatttaaaaatctatatattgtttaaagcaaatattattttaataagtttaattattttgtcgtgttttgatcaaaacaatgaatatcaaaaattataataatcaatttaaaaaaatacaggatcgtaatttcaagataatttgtaaagcgtacaaggtttttaacatcacattggctcttatttgtaagtttttgtttacaaactagtgtagtcattaagttaaaatttttatattaaatttacaaaaactaagttttttcatctatccatatattacaaaatccactgataatgtaacaatttaaaattgctttaaaaagtttgatattaagtaattttcttatctaagactgaacgttttcaatttaacattggtaaacagtttgggatgaacttgaagacaaatcaggatttttgataatgtattaataagtacctactctacctactagggcaaaattttatctgcaaattcagagaaatgtatgctcaggagcttaaaagccaatgttacaattagtaatttgtttggcatgaactcgttaatcaaatcaattaatattattaatttttaattacggtcgaccacgtccctttattacaaagatcttccaattaacatcaaatatcgattacatctttattaagatgaaacaaatgagtggaaaaatttaaaatgaattattaaggccttcagcactctaatcaattacggccg

SEQ ID NO: 5459 - DNA, 425 bp, Diabrotica virgifera
atcacgacactgccccgtgtcatatgagcattttaggaattactaaaattcatgaattagaattcgaatttttggagcatccaatttattcaccagatttggcccctagagacttttatatgtttcaatgcctaatgcgtgaaaagcgtttttcttcaaaggataagctcgtaataacgcaaaacttattgaagagcctactattctgttacttatgttaaagcaggtaaattgtttggcatgaactcgttaatcaaatcaattaatattattaatttttaattacggtcgaccacgtccctttattacaaagatcttccaattaacatcaaatatcgattacatctttattaagatgaaacaaatgagtggaaaaatttaaaatgaattattaaggccttcagcactctaatcaattacggccg

SEQ ID NO: 5460 - DNA, 935 bp, Diabrotica virgifera
  SmartBlast Evalue=1E-25; Info=Endonuclease-reverse transcriptase n=1 Tax=Bombyx mori RepID=D7F159_BOMMO
tagtgtaaggcagttatgttaaagatactgtgaaagagtgaagtggacgtgataactacaccgcgcaggttgttttcgcaggttatcgcattgacctcaacaggtgaacattttagtggatagaaatcccatctgacacggctaggatgagattatgatggtttttctcaaccgcaataaagatatggttaatcggaactggaattaaaaactgcactgcaagttagaatataaaatatatagagaagttctacgtgtggaatgcatcgatttaatcaaccatttctctaatgtcataaagtcacctctgtatgtcaccacaaactgttcaatcaagcgctggaagacgtgtttaataagttgaaatgggaaaaaacaggaattaacatcaatggacaattccttcgccacgcagatgacattgctctgatagctgaagacaaaaatgagctccaaaaaatgctgaaagagctagatacagaagcaagaaatacagggttaaaaatgaactttcagaaaacaaaaataatgattaataataatgaaaacgttacaataactattcaaaatgaagaaatccaaaagtgcaagagtataatccgggtcaagtatttaggcctagcaaggagaaccaaacatcggaggtgatcaggagaatcagattggcatgggtagcgtttggaaagttcagctacattctcaaaaataagagatacccgcaatacctaaaaacaaaagtctacacccaatgtgtactgccggtatagacatatacagtgagcacgcaaaggctggaacaaattcatctctcgaaaatggacaattctggaaaaaactcccgaaacaggtcaatttcccatttctaaattacgactcttggttcatacatattactagtgacgtcacccatctgggcgcgacgacgccatcgatga

SEQ ID NO: 5461 - DNA, 271 bp, Diabrotica virgifera
attatatattatatatacatatatttatgtatatattttttatttttgacatatcttaggtagttaaattgcatcacactgttaatcacagttgtaaataattaaatatacagtgagcacgcaaaggctggaacaaattcatctctcgaaaatggacaattctggaaaaaactcccgaaacaggtcaatttcccatttctaaattacgactcttggttcatacatattactagtgacgtcacccatctgggcgcgacgacgccatcgatga

SEQ ID NO: 5462 - DNA, 617 bp, Diabrotica virgifera
aacatgggttaccaaagcaggcaataaaaagaaaaggtgatctagaatgcaagagaagagctgatgaaagaagtaaatgtaaagaaaataatgaagagacttctcttgaccatgaacaaacaccagctattttatatatgtagaaaatggaaaaactgctggaactttactttaaaggcttttgactagtgaagatttggataaacaacaggagttactttgggctatagctacgtgcaaatttattttcttgtggcttcctatgtttattcttattaactatatctacactttgatatgtttttagtcgcatgaagattttatagtttattattttatgtatattgttatatttgtgttgaataaacattattattattattattaccttaatttccattaaataaattaactgtaatcaataaatcgtttttaatgttgataaataaattatcaataatgattcccaaatattttatttgtttgacaacttctacaaaataatatttcgtagtaataatcaatgctttggtttaagaaatagacaacttagaatagaaatatgctttattgtcatggaaattgtacaattttatagacaatgcttacagagtcat

SEQ ID NO: 5463 - DNA, 604 bp, Diabrotica virgifera
tatatctgggaccccttttctttattcttgtgatactttccacatttttatgatttttttatggtacacaatgtagaatttttatttatgtctttgttttaggaacaaccaccagatatttaaaaggtataaaaagaagaaactgctggaatttcaaaacaaatgtgtttgactagtgaagatttggataaacaacaggagttactttgggctatagctacgtgcaaatttattttcttgtggcttcctatgtttattcttattaactatatctacactttgatatgtttttagtcgcatgaagattttatagtttattattttatgtatattgttatatttgtgttgaataaacattattattattattattaccttaatttccattaaataaattaactgtaatcaataaatcgtttttaatgttgataaataaattatcaataatgattcccaaatattttatttgtttgacaacttctacaaaataatatttcgtagtaataatcaatgctttggtttaagaaatagacaacttagaatagaaatatgctttattgtcatggaaattgtacaattttatagacaatgcttacagagtcat

SEQ ID NO: 5464 - DNA, 617 bp, Diabrotica virgifera
  SmartBlast Evalue=9E-40; Info=CDGSH iron-sulfur domain- containing protein 2 homolog n=2 Tax=Drosophila willistoni RepID=CISD2_DROWI
acttaataatatttattaatttactggaaataatgttataaaatcaacaatcaataaggacttgtaaacaacataccccatggtatttctactacacaaaataaacttgtatacacgtatataccggttacttcttcttgctgacaatgagtggaccaacgttgtctccttgttctttgttgtgactgttgtgactaccatcacaatagggccagtttttacttctccaacatctacagaacactgctttatcagcaatatcttctatatcaacagagtcaaccactttgtcactctttttgagtattccaggatttactacactgcaagaaggctttgatccacaacggccttttggacaaaatgctttatatgacatataaccaatacccgctactacagctgctggaggaacaagagctactatatcctttaatcctaaactgaaccatcctccaattgtatctggaattggcaaattagataaataattgggaagagcttcttttactaaataggctagcattttaaaaatatcaagttggcaagcttattaacttattagttttgatccaagttacaaaaatctattgacaatggcaatggcacactttcaa

SEQ ID NO: 5465 - DNA, 608 bp, Diabrotica virgifera
  SmartBlast Evalue=9E-40; Info=CDGSH iron-sulfur domain- containing protein 2 homolog n=2 Tax=Drosophila willistoni RepID=CISD2_DROWI
tattcatttactggaaataatgttataaaatcaacaatcaataaggacttgtaaacaacataccccatggtatttctactacacaaaataaacttgtatacacgtatatttatactggttacttcttcttgctgacaatcagtggaccaacgttgtctccttgttctttgttgtgattgttgtgactaccatcacaatagggccagtttttacttctccaacatctacagaacactgctttatcagcaatatcttctatatcaacagagtcaaccactttgtcactctttttgagtattccaggatttactacactgcaagaaggctttgatccacaacggccttttggacaaaatgctttatatgacatataaccaatacccgctactacagctgctggaggaacaagagctactatatcctttaatcctaaactgaaccatcctccaattgtatctggaattggcaaattagataaataattgggaagagcttcttttactaaataggctagcattttaaaaatatcaagttggcaagcttattaacttattagttttgatccaagttacaaaaatctattgacaatggcaatggcacactttcaa

SEQ ID NO: 5466 - DNA, 669 bp, Diabrotica virgifera
  SmartBlast Evalue=6E-13; Info=Endonuclease-reverse transcriptase n=1 Tax=Bombyx mori RepID=D7F158_BOMMO
aacgaactattttagagagttgtcggatacttgatggaaaatcatgttcaacaataaaccaaaactaatttttaatttccacagaatacaacaatctgcaactttctccgtgtggctttatccatttttaaaccttctcgtctgacctatgtattagggtggttcgaaaaaactttttttttttatttcggatcgctgtggtgcgcaaaagttgccattggtattagtgatgtaacgaatattcgtattcgcattcgcgaatattcgcatgttttgcatattcgcattcgcatccgcattcgcgaaatttgtgcgaatgttttgcgaatatgaaaaccagaaaaaaaaataattttaagataatattaggttaataaaatcaaaatctattacttctcatctttttttattaagaaaaggtaacttaacctcaaacatgcagctactctcaaatggaaatatgcaggacacaacagcagacaaagagacggaagatggaatgaagcgataactcactggagaccttgggactacaaaagaggaagggcagaccacagacgagatggtcgaatgacctaaagagataagcagggaccagatcgacagcattagcactgaaccgagaagagtggaaaaataagggggaggcctacgttcaactttggacaa

SEQ ID NO: 5467 - DNA, 538 bp, Diabrotica virgifera
  SmartBlast Evalue=3E-13; Info=Endonuclease-reverse transcriptase n=1 Tax=Bombyx mori RepID=D7F158_BOMMO
gtccggttctgcttaatcaaattttgcaaatttggtcttgttgaagacagatctttttcgtcaatgtaaaagttatgatttcgaacttagtgatgtaacgaatattcgtattcgcattcgcattcgcgaatattcgcatgttttgcatattcgcattcgcatccgcattcgcgaaatttgtgcgaatgttttgcgaatatgaaaaccagaaaaaaaaataattttaagataatattaggttaataaaatcaaaatctattacttctcatctttttttattaagaaaaggtaacttaacctcaaacatgcagctactctcaaatggaaatatgcaggacacaacagcagacaaagagacggaagatggaatgaagcgataactcactggagaccttgggactacaaaagaggaagggcagaccacagacgagatggtcgaatgacctaaagagataagcagggaccagatcgacagcattagcactgaaccgagaagagtggaaaaataagggggaggcctacgttcaactttggacaa

SEQ ID NO: 5468 - DNA, 713 bp, Diabrotica virgifera
ttgtttatattttctacattattaaataataaatttctaacaatcttacgtatctacatgtctatacaacttctaaatgttgatgttatacatttttacaactatttaggatcatgaggcaacttaaatccaaccatgttagcagtatctgccacggttctctcaccctttccgtgatattcttgatgtatctcgtcactcaatctagtgctcttcaagtagcataaataagtctttgccatgaagtccatttcttgtctagctttacacagttgctcatctgtagttttgtattttctgaactgacttatcacatactgcagcatgagattatttttcaagttaccttcaggcaaggcatatcttagttcgctaataatttgccttattgtgcagatttttgataccatgttttcaacacgcaattctgcccagtcccaaacaaattatttcagatatttggggattgcctaaactctctaatccttcgttaagcgatgcttttacagaagcatacagatctgtggtgaagatttcagctttagctctggaaattcttctaacagcttcttctaaatcaatatctgattccgtagaggaattaggtttaagaatgcccttcttattaggactacgtcgttttcgtttataggatacaattttaaattccaagtcgctattttcgttcatgtcaaaaattccccaacacaatg

SEQ ID NO: 5469 - DNA, 510 bp, Diabrotica virgifera
  SmartBlast Evalue=1E-13; Info=SRR1-like protein n=1 Tax= Harpegnathos saltator RepID=E2BRN7_9HYME
ctgtttcgaacagtgaggcatataaaacaacactgtcttattggtatttatcgagtattttccttctacgttttcatttaaaacctcaacttcaaatgaacgcaatatctctttgtctgttgcactaaaaataggatcgtataccgagattctagagcaaaattgatcgctcaaatttaagagcactgctaattggaatcttgctatcaaacactcacgcaattctgcccagtcccaaacaaattatttcagatatttggggattgcctaaactctctaatccttcgttaagcgatgcttttacagaagcatacagatctgtggtgaagatttcagctttagctctggaaattcttctaacagcttcttctaaatcaatatctgattccgtagaggaattaggtttaagaatgcccttcttattaggactacgtcgttttcgtttataggatacaattttaaattccaagtcgctattttcgttcatgtcaaaaattccccaacacaatg

SEQ ID NO: 5470 - DNA, 640 bp, Diabrotica virgifera
ttggcgttttgacatatgaagaccacaggaaaataacttgatagtcacatttttggttttgttcaggagaacattttaaagtttaaaacactaaaaatgtgaatatgattttaaaacattaaaatacatcttacaattattaattactaataaaaacaaaaaaaaatgatatattggtggttggtttacatttagttttttaaatatatattgcatattaattacatggacttatcaacgttttcccctgttttgaatggacatgtcaagttcttttcctgtacagggttttttttaaacacatatcttttgacaagttaatactctgtattgtgttactcttagaaactatgtaattaaagctacaaagtggtattaaaacaaaaaatgttaaaaagtggacttatcaagttctttccctgtggtcttcatttgtcaaagttttcacttggggactttggcattctcaaagttatgggcaaaaattcattttgattataatatgttctaaaggtttttaagctttatgaaaaaggatatattggaaaagtttacaaaaaatttcatggaatgaatagcaatagttatatttatttatttgtaatatgaatgaatgattgttttccagtaaattaacttg

SEQ ID NO: 5471 - DNA, 574 bp, Diabrotica virgifera
cgacgtaagagaactgtcaaaacaccagaatgcgactcttcattattgctatgtttattataaacacggcaataatgaaaagtcacattccaatgttttgacagctctcccacgtcaaaaattttgacccacgcaataacgtttttgcagtaaaaatactatatcaacgttttcccctgtttggaatggacatgtcaagttcttttcctgtacaggattttttaaacgcttatatcttttgacttatcaagttaatactctgtattgtgttactcttagaaactatgtaattaaagctacaaagtggtattaaaacaaaaaatgttaaaaagtggacttatcaagttctttccctgtggtcttcatttgtcaaagttttcacttggggactttggcattctcaaagttatgggcaaaaattcattttgattataatatgttctaaaggtttttaagctttatgaaaaaggatatattggaaaagtttacaaaaaatttcatggaatgaatagcaatagttatatttatttatttgtaatatgaatgaatgattgttttccagtaaattaacttg

SEQ ID NO: 5472 - DNA, 656 bp, Diabrotica virgifera
ttgatatcggacaaatacaacaaaggtaaaaacgtttctcgtgcagggataactgccgaccattacacaatctgcttctacttcttcttatcgttctttagttaattggcaattttgaattgtcatgggacaaatacaacaaaggcaaaaaactttctagctcaggaacaactgccgaacattacaagatttccctggtgtaagctgggcgaattatcccaagggatttaacccaataaaggaagagaaagaagaagatcattacaagattgcgtaatgtggccttggttagttgaagtgaagaacccagatgattacagactgtttatacaaaagattgtattgttattttacccagatttgaattatctagtcgtatgtaatttttgacatattgttcaaattatttattattttatcaatttcatttccaatattttgctttcctcataactacgtttgacgttaatacgacatttttttttcgcataaagcaaaaatcaattgaagacaatagggcttttcattcacagtcatttgtttctagctgtcatatgtcgtataatctctgtatattaatatatacacagattatacaaaagctcgaaacaaatgacaatcgatgaaaagccctataaagcaaatgtaaaataaaa

SEQ ID NO: 5473 - DNA, 551 bp, Diabrotica virgifera
aattccgaattataatgggacaaatacaacaaaggcaaaaatctttctagctcaggggcaactgccgatcattacaagattccgtaatgtggcctcggtttccttatcctttttcatctttctgatgacctcaacatttgttattctatctacccaacttatttttaatattcttcgccaggtccacatctcgaatgctttagtcgatcgcttatgtctttctttaaggtccagacctccacccatacagcaacactgaattatctagtcgtatgtaatttttgacatattgttcaaattatttattattttatcaatttcatttccaatattttgctttcctcataactacgtttgacgttaatacgacatttttttttcgcataaagcaaaaatcaattgaagacaatagggcttttcattcacagtcatttgtttctagctgtcatatgtcgtataatctctgtatattaatatatacacagattatacaaaagctcgaaacaaatgacaatcgatgaaaagccctataaagcaaatgtaaaataaaa

SEQ ID NO: 5474 - DNA, 705 bp, Diabrotica virgifera
  SmartBlast Evalue=2E-19; Info=E3 ubiquitin-protein ligase sina n=3 Tax=Culicidae RepID=B0WR23_CULQU
gtcgtgtatgtacactaggatgtagcaacctgtcgatcgtttataattgtcgacaaatatatttacgtttcggaaaaatatattgcccggatgttcagttttggagtggtctatcattttagatcgcaatcctgtccatttgcaatcgttgtgttttctcagtgggcataaaactgtcgaaaattcgcaatattcctgatggactgtcagtgtgtcacacttttcactgtaactacatccctcgtcaacatatttgcatggaaatgcgagagaatcatgtatttgctccaaaaggatgcatcggttagggctcttctcagctctacataaagcacagttctcaatgttttcaaaacaggaagtgcaatagctatgtccagacacacattgtcttattggaggctgcatgaatttaaggcaaacagggcactcgaatttactaatgagacttttttcaaaggcctccaaagtttcgttacttgccatgcttgttgtgattgggcaatagattgatttccagcgccaatatttttctcaacgctattataatatatcgtcagtttattaacacataagcagttatgttgaatttatagtttattgttttagtacctagtaaaataggttcatccacagcaacctctttcgtttaaatattgtcagtgtaaaaagatggaccgagaaaataataaaattgatgtacct

SEQ ID NO: 5475 - DNA, 507 bp, Diabrotica virgifera
  SmartBlast Evalue=1E-13; Info=SINA3 n=1 Tax=Medicago truncatula RepID=A8W462_MEDTR
atggattgtcagtaagtcactctttccactgaaaatgcatccctcatcaacatatttgcatgggaatgaaagagaggcatgtatttgctccaatacgatgcatcggtaagggctcttctcagctctacatatcgcacagctctcaatgttttcaaaacagtgagtgcagaagatatgtccagagatacatagtcttattggaggctgcatgaatttaaggcaaacagggcactcgaatttactaatgagacttttttcaaaggcctccaaagtttcgttacttgccatgcttgttgtgattgggcaatagattgatttccagcgccaatatttttctcaacgctattataatatatcgtcagtttattaacacataagcagttatgttgaatttatagtttattgttttagtacctagtaaaataggttcatccacagcaacctctttcgtttaaatattgtcagtgtaaaaagatggaccgagaaaataataaaattgatgtacct

SEQ ID NO: 5476 - DNA, 599 bp, Diabrotica virgifera
ttacgttaattacgttaatgttacttttcaataatgatataaaatacagggcgttccactaacattactgagaaaataatgtacttgcgttccgactcaccctgtactgatataaagaaaattagcaatatcaataattcttaaaaattttgacaataaataaaaaaatatggcattcaataaaccattgctgttgtgcttattttatttatacagggagttgaacttgttacgattttcataaaaattggttataactttgtaaataccctgtataacatacaaacctttatatttttgtgatggagaagttaacgggatttcgaatttaaaatgaaatatagggtgtccatttaaaaaaacataagtttggtctgccactgtgttatcgaacaccctgtaacattctaactaattttgtaatgtgaagctcgggggtggctaaaatttttgttattaacttttattgctatctattactatagcggagctattgagctttaccttactaatcaatcaccctgtatacctagatagacttttagtatagaaatataaaaaatatgcaaaatgcatatgttattaacttctgtaatcct

SEQ ID NO: 5477 - DNA, 597 bp, Diabrotica virgifera
ttacgttaattacgttaatgttacttttcaataatgatataaaatacagggcgttccactaacattactgagaaaataatgtacttgcgttccgactcaccctgtactgatataaagaaaattagcaatatcaataattcttaaaaattttgacaataaataaaaaaatatggcattcaataaaccattgctgttgtgcttattttatttatacagggagttgaacttgttacgattttcataaaaattggttataactttgtaaataccctgtataacatacaaacctttatatttttgtgatggagaagttaacgggatttcgaatttaaaatgaaatatagggtgtccatttaaaaaaacataagtttggtctgccactgtgttatcgaacaccctgtaacattctaactaattttgtaatgtgaagctcgggggtggctaaaatttttgttattaacttttattgctatctattactatagcggatctattgagctttaccccagtaatcaattaccctgtatgtaacactggcaccacccgttagcaaatctataaaaaactgaactagttttttcacggacagacaggcgg

SEQ ID NO: 5478 - DNA, 660 bp, Diabrotica virgifera
aaaacgttaagatgtttcatgttttgcacaaaaacggcgcctcatgtgaaaaataggcaagaaagatttttctcgtaaactgaacgaggaattcaaaaatgacctttaatctgacaaatctcagtggcgtactatttttttctttaaaaaattcagaccattacccttaggcgcgccaatgatgaacacaaaactgttacttgtatgtcaaaaaatgcgcaataactaccttttaaaactaaccaaatttaattttcatagctcaaccggtcttagagcaataaaaaaattggcagtttgaaataaaaatttcaacaccccgtatcccgaaaacgaagcatttgcggacatatgtttatacagcaaactgccattattttttcatgtagaattaccccttaaagtttgtcatacttatttacaacaccctgtatagtcggttcgctaatctcagacgcaactgtctagtaattttagtaattatttttttgcaaagttagttacattttgacagactagacgtggctggaaattacctacaatcaaacacatactcatagccaatattaagagtaaacaaacgtaaataacttaaatcttatcccaatcaataattattatttatttacaccataatataatgtattgataacaaatgag

SEQ ID NO: 5479 - DNA, 542 bp, Diabrotica virgifera
tatctgtggcgaacaattttttttcttcaaaaattttagaccgttcccgtacgcacgccaatggtaaatataaaattcttagttgtatgtcaaaaactgcgcaataactacctcttaaaactcaacaaatttcattttaatatcccaaccggttttagagcaatcaataaatcgtgagtttgtaagtaaaatttcaacaccccgtatctcggaaacgaagcatttgcggacatatgtttatacagcaaactgccattattttttcatgtagaattaccccttaaagtttgtcatacttatttacaacaccctgtatagtcggttcgctaatctcagacgcaactgtctagtaattttagtaattatttttttgcaaagttagttacattttgacagactagacgtggctggaaattacctacaatcaaacacatactcatagccaatattaagagtaaacaaacgtaaataacttaaatcttatcccaatcaataattattatttatttacaccataatataatgtattgataacaaatgag

SEQ ID NO: 5480 - DNA, 639 bp, Diabrotica virgifera
taaaccatatacgttatctacacatttaattgagaatgtaatatgtaccagagacttggtggcgttctatgaaaaatataaatactactgcattggaacttgctcaacagctccacacagctaatgcattgtcagccaacatagaaagactcatctcctcaacatacggtttgtcgttccaaactacgtaatcggctagggaatctcaaagcttctaagttaggttggtttcaatttttaaagagcttaattgcatcagtgatgacgtgactgatcagatatcagattgttgatttagattacaatattactatgagactgaaacagttttgagaaattgattaactcttgtatgcaaaatgttttaagttttccattttttttctgcattctgattattaataaataaataatatgtatgttaaaaagttatttaataatttttttttgatgttcattatacatattaataaagaaaatgaaaaaaaaaaacacttgtttaatttaagtgttttaaaaatgttttaaacaaaaactattttaaacataaacaaatgtttacaacatgtttaaaactgttgattaaaacgaaatgtttaaaacgaaacaaccctgaatggaactgaaacatgggctttt

SEQ ID NO: 5481 - DNA, 562 bp, Diabrotica virgifera
aaaatataaatactacagcattgaaacttgctcaacagcttcacagagctattgcatcgtcagccaacatagaaagactcttctcatcatatggtttaccataccaaactatgtgatcagctaggcccactaggcaatgtcaaagcttctaagttggtttcaattttttaaagaacttaattccatcagtgatgacgtgattgatcagattgttgatttagattacaatattactatgagactgaaacagttttgagaaattgattaactcttgtatgcaaaatgttttaagttttccattttttttctgcattctgattattaataaataaataatatgtatgttaaaaagttatttaataatttttttttgatgttcattatacatattaataaagaaaatgaaaaaaaaaaacacttgtttaatttaagtgttttaaaaatgttttaaacaaaaactattttaaacataaacaaatgtttacaacatgtttaaaactgttgattaaaacgaaatgtttaaaacgaaacaaccctgaatggaactgaaacatgggctttt

SEQ ID NO: 5482 - DNA, 745 bp, Diabrotica virgifera
acggaaatagtgaaatggatagagtatttggaacagaaagaactaaaatttagttacatatcgttgtttacgtatattgagtatttttggagttattatcaaaaaaaaaaaatgaaaagtacgataattttaaaaattctgatttttttaaattgtatctttttttcaaaaatatgcattctaaaccggtgaaaattgttgaaatcattaactatgttaaccttaagaaattcttgtgaggattactacaaattttaatttttgtggaaatggcttatgttttagtttttcacttttccaaaaaaatcgaaagggttctcttattttcatcataacttgcttaattttgatgctattaacttctactggagctcatttgataggtcctccgaagtactttgacaagttattaacaactatattctataaaatgcatcgttttcccgttatgtgagcttgaatgcttggatttgggtactcgtcgaaaggggatatgcattcaattgcccataactcactttgaaataacattagattagttctttaagtgcggagtgtattaaattttttattatctttaattttggtaataataacttttttacaagagcttatagtttttgagtaatacgtgaaaaacagctttaaaacatgcattttttataagaaaagataaaattttgatatttaataactcaaaaagtgttgatttgtgttaatgactttgtatgacaaattttgctta

SEQ ID NO: 5483 - DNA, 428 bp, Diabrotica virgifera
ctcttagttttcatcataacttgcttaattttggtgctcttaacttgtactggagctcatttgataggtattctgaagtgctttgacaattgtttaacaggtatattctataaaatgcatcgttttcccgttatgtgagcttgaatgcttggatttgggtactcgtcgaaagaaatatgcattcaattgcccataactcactttgaaataacattagattagttctttaagtgcggagtgtattaaattttttattatctttaattttggtaataataacttttttacaagagcttatagtttttgagtaatacgtgaaaaacagctttaaaacatgcattttttataagaaaagataaaattttgatatttaataactcaaaaagtgttgatttgtgttaatgactttgtatgacaaattttgctta

SEQ ID NO: 5484 - DNA, 621 bp, Diabrotica virgifera
  SmartBlast Evalue=1E-42; Info=Endonuclease-reverse transcriptase n=1 Tax=Bombyx mori RepID=D7F170_BOMMO
cacatatatctggtcttttgaacatttatatttagtcccattttctgtgcagatgctcttaacgaccgaaatgcttcagtcagagattctgtggacctacctatgatgtctatgtcctctgcgtatccgacaatttgtactgatttgttaaagatagaaccattagtagtaatctgggactctcgaattatttttttctaatgccaggttaaataagagacaccatcactctggcttagtccatttttgcaatggaagggtcttgagaaatcgttttggatttttaccatgctctctgctcctgtgagtgtaagttcagttaattggacaagatgaagcggtatttgaaattctaccatagcaagtagaagtttacctctattaactgagtcgtatgcgctttgaagtccacgaatatgtggtgggtgtcgacgccaaactctagggttctttcaaggatctgcttcactgtaaatatctggtccgttgtggatttattatgacggaaaccgcactgatatcctcctactatttcttcagcgtaggggagaagtattttgtacaatacgttggacaacacttcaatatgccatattgagtagagtgatgccctataattat

SEQ ID NO: 5485 - DNA, 551 bp, Diabrotica virgifera
  SmartBlast Evalue=3E-30; Info="LINE-1 retrotransposon-like element, putative (Fragment) n=1 Tax=Aspergillus flavus NRRL3357 RepID=B8NZ53_ASPFN"
cagtcagagattctttagatctacctatgatgtctatgtcatctgcgtatctgacaatttgtactgatttgttaaagatagtaccattcgtattaatttgggactctcgaattatttttctaatgccaggttaaataagagacacgatagtccattcaccctgtcttagtccatttttgcaatggaagggtcttgagaaatcgttttggatttttaccatgctctctgctcctgtgagtgtaagttcagttaattggacaagatgaagcggtatttgaaattctaccatagcaagtagaagtttacctctattaactgagtcgtatgcgctttgaagtccacgaatatgtggtgggtgtcgacgccaaactctagggttctttcaaggatctgcttcactgtaaatatctggtccgttgtggatttattatgacggaaaccgcactgatatcctcctactatttcttcagcgtaggggagaagtattttgtacaatacgttggacaacacttcaatatgccatattgagtagagtgatgccctataattat

SEQ ID NO: 5486 - DNA, 606 bp, Diabrotica virgifera
  SmartBlast Evalue=5E-21; Info=Endonuclease-reverse transcriptase n=1 Tax=Bombyx mori RepID=D7F163_BOMMO
gaataagggactacgacagggatgcagcttatcgccaacactgtttaaaatctttataaatgagtggcgcaaatcgtgttctggaatggggatacagctaaacgacgactcaacattatacacacattttgctgacgatcaggtggtgattgcccaggataaagatgatccaatagttatgacaaaccggctatttcgagaatagaaaaaatggggccgatgcgtcaatatagagaaaaccaaatatatgtgtatatgaggagagaaaaatgagttacaactagaggatgatatggttatcgagccaagctctgattatgtataccttggaacgagaatccaacaaagtggaaggacagaattcgaaatagaggaaagaattatgaaaggaaagaaggtaataggagctttgaactcactactttggtcaaaaaccatatcaaaagaaaagaaaacacagctttataatagcatctttaaaagcgtggtactgtatggatgtgaaacctggcaactgaataagcgaacagaacagaagttgctcgcacgggaaatggacttctggcgaagatcggcctgcatctccagactctcacatataacgaa

SEQ ID NO: 5487 - DNA, 561 bp, Diabrotica virgifera
  SmartBlast Evalue=2E-11; Info=Endonuclease-reverse transcriptase n=1 Tax=Bombyx mori RepID=D7F163_BOMMO
gaataagggactacgacagggatgcagcttatcgccaacactgtttaaaatctttataaatgagtggcgcaaatcgtgttctggaatggggatacagctaaacgacgactcaacattatacacacattttgctgacgatcaggtggtgattgcccaggataaagatgatccaatagttatgacaaaccggctatttcgagaatagaaaaaatggggccgatgcgtcaatatagagaaaaccaaatatatgtgtatatgaggagagaaaaatgagttacaactagaggatgatatggttatcgagccaagctctgattatgtataccttggaacgagaatccaacaaagtggaaggacagaattcgaaacagaggaaagaattatgaaagtaaagaaactaataggagctttgaactcactactttggtcaaaaaacaaagaaaaaaaccaaaagaaaagaaaacacagctatacaatagcatctttaaaaagcgaggtattgtatggatgtgaaacctgacaagtgaataaagcgaagagaacagaagctgctcgcattgg

SEQ ID NO: 5488 - DNA, 750 bp, Diabrotica virgifera
aattaaaatgcggtatgtgactttatttacagctttgataaaaaacatgatgtttttttaagaatatatttttaaataatgttcaactatcattagaacatgttttgcgttaaaaagttgtcaaaacatatagagtcctgagaaaaaactttgagagccatatctcggttttaagttggctgcacataccgcgttttatttgaggacggcagtataatacttgctggaagatatttaatatctcatctgatatatttttttcctactgttcctgatgactgcatcgaaagtctacttgtaatctatagacaacaggtgagacaagagtctcattgtctcacctgtacccattccatttttttttaaatcaaactatattgtccatgttctcttcataatttctgtaaatacggttgtgaatggttttcaaaaatatttttgacttataagactgattgtcgctacaatattttgcatttacctcttaagtcgtgtcacaaaggtagaaactgatcagtctttataaattttgaccttcggtagattagtgtttgtccttctagaagtagttttaacagttcgaaatatatttcgtctgttcctttgtatttattcaggataattttcccttaataatgatagttgatccattaataatccagtaggctttacttttatagaatctggtagcatctttcacttctttatacatgttgaatagatgaggtctttcttctagattctagatgt

SEQ ID NO: 5489 - DNA, 444 bp, Diabrotica virgifera
aattaaaatgcggtatgtgactttatttacagctttgataaaaaacatgatgtttttttaagaatatatttttaaataatgttcaactatcattagaacatgttttgcgttaaaaagttgtcaaaacatatagagtcctgagaaaaaactttgagagccatatctcggttttaagttggctgcacataccgcgttttatttgaggacggcagaatagtcaaaaggcctttgatgactttagagtgtcagctatctcttgcaactccagtttgcgattttccataattttcagcgtttttttttcgattaagcgatcagcatcattggtgtgggtccgaccgcgtttgaattcagcaaaccatcgtatgatggttgtaatagacggaacaatctcggtaatattttttgagccattggtcggtttggacagtatgttttcccatc

SEQ ID NO: 5490 - DNA, 810 bp, Diabrotica virgifera
gccgtgaagatacggtacgctttccgcaatatttaggttaaatactctttctctttcgctattaagacaatttatcgttaattcggcatatttgttaaactcgttgttgttaataaatgtttcgcttaacacttttatttctcgtttgcacaatccttcatatcgtgtttattagtaactataaaaccagaccaaataaattctcagaaccattcgccctaaaagttcactagtttgttaatatcgaaggactctatgctttgggacatatgcgtgtggtcctaaaatattcacatgagattcaattaaaaactcacaacacgtgcatataacgttgtacccatcgttctgatgatttcctacgtattcttacgaattcgtacgatcggtttttcgtacgaactcgcatccaatgtaaccgccgccttagcggtagcattcagacgacaccggtgcgcggtggaagtcagccgctgagagatttactaagcattccctattgccgctggatacagccactaagtcgctttgtgcttacagtgccgctgacgtcgtccgaacgcacccaatatgcactttggattcattagtggtgtgttggctaatcatgcagaacctcatggtgataataaaaagaatccatgtatcttcttcttcacgtaccatctccgcgacggaggttggcaatcatcaaggctattctgatcttagatgctgctgctctgaatagttcggttgatgtacatccgtaccacttccctcaagttacgcaaccacgagattcgtctccttcctacacttctctatgac

SEQ ID NO: 5491 - DNA, 364 bp, Diabrotica virgifera
gccgtgaagatacggtacgctttccgcaatatttaggttaaatactctttctctttcgctattaagacaatttatcgttaattcggcatatttgttaaactcgttgttgttaataaatgtttcgcttaacacttttatttctcgtttgcacaatccttcatatcgtgtttattagtaactataaaaccagaccaaataaattctcagaaccattcgccctaaaagttcactagtttgttaatatcgaaggactctattgctttgggacatatgcgtgtggtcctaaaatattcacctatgaccaattaggcaaaaggtaataattaaacccctttcgccactgttggggtgagattcactccat

SEQ ID NO: 5492 - DNA, 632 bp, Diabrotica virgifera
  SmartBlast Evalue=5E-11; Info=Lian-Aa1-like retrotransposon protein (Fragment) n=1 Tax=Homalodisca vitripennis RepID=D9I3F9_ HOMVI
atctgcctcaccctacttaattccagcggaagaatccctgtgatagcctctaacgaagctgttcctgtactttttaagactcctgttatatttagaaacgcttgtctttgtaggatggtgagaggtctcacaagattgaaaagcagtctttttcaaccaaagtactgaagcataagtaactgtcagtcgtatcactgatgtgtataaccaacagaatacctttggtttcaacccccatgttttacctacaactcattttcagttccagaagagtcgcttagccctattggttatattgttaatgtgagtgctccaactgagtttggaatccagggttacctctagatacttgacctcatcggttcttttcagttcctccccaaataatttcagctcactcagtctagcaaccttcctcttattagtgaaggctattaatttggtttggtatttttcaccaaatacttatgctagcctcagtatttttttaataggaaatatttgagctctcttactttgcgaaggattctgcaaacataagtagtactgtaccaaatgcttctgtcgcatcagatggtagttacactgttttactagttcttacagattttggtaatatttactcattcagg

SEQ ID NO: 5493 - DNA, 557 bp, Diabrotica virgifera
  SmartBlast Evalue=0.000000005; Info=Lian-Aa1-like retrotransposon protein (Fragment) n=1 Tax=Homalodisca vitripennis RepID=D9I3F9_HOMVI
atctgcctcaccctacttaattccagcggaagaatccctgtgatagcctctaacgaagctgttcctgtactttttaagactcctgttatatttagaaacgcttgtctttgtaggatggtgagaggtctcacaagattgaaaagcagtctttttcaaccaaagtactgaagcataagtaactgtcagtcgtatcactgatgtgtataaccaacagaatacctttggtttcaacccccatgttttacctacaactcattttcagttccagaagagtcgcttagccctattggttatattgttaatgtgagtgctccaactgagtttggaatccagggttacctctagatacttgacctcatcggttcttttcagttcctccccaaataatttcagctcactcagtctagcaaccttcctcttatcaccttttggacgtgttcggctatgttaagcagtgttcttccattcgttattgatgtccagaatgatgattgaagtcagtttataataaatgaattataattgccataaaaaaatactcctaatgatattatggg

SEQ ID NO: 5494 - DNA, 603 bp, Diabrotica virgifera
  SmartBlast Evalue=5E-22; Info=Endonuclease-reverse transcriptase n=1 Tax=Bombyx mori RepID=D5LB38_BOMMO
tacagccgcacgaaatagttcagtgctagttttcccaaaccattggcgtaggtttttaagccaagaagttgcacggcggcccacacttctttttcccattattttaccttgcatgacaaggtgaaggatgtcatatttttaataacgcttgaagatgttcaataattgatcctgtcagtaacaaggtgtcatctgcgtatctgatattgttcataagcataccattaatgagtattccctgttttccgtgttccaacacttcatttaagattgtttcagcgtaaagattaaacaacattggtgacaatatacagccttgtcgaactccgcgcttgatttttacttcttcagagcactgatttccaaccctaatacatgcagcctggccccaatacaaatttgcgattattctaatgtccctactgtccagaccggtagttttgagaccggttatctgaccttcgagctctaatttacaccttattagatttgctgttataaccatgcatttagtctcttttggggaagttaacatgttatattaaattggtgtagcgtacgttgtaaatcatcgttctaaatcattcggaagttgtctactag

SEQ ID NO: 5495 - DNA, 586 bp, Diabrotica virgifera
  SmartBlast Evalue=6E-40; Info=Endonuclease-reverse transcriptase n=1 Tax=Bombyx mori RepID=D5LB38_BOMMO
tacagccgcacgaaatagttcagtgctagttttcccaaaccattggcgtaggtttttaagccaagaagttgcacggcggcccacacttctttttcccattattttaccttgcatgacaaggtgaaggatgtcatatttttaataacgcttgaagatgttcaataattgatcctgtcagtaacaaggtgtcatctgcgtatctgatattgttcataagcataccattaatgagtattccctgttttccgtgttccaacacttcatttaagattgtttcagcgtaaagattaaacaacattggtgacaatatacagccttgtcgaactccgcgcttgatttttacttcttcagagcactgatttccaaccctaatacatgcagcctggccccaatacaaatttgcgattattctaatgtccctactgtccagaccggtagttttgagaatatgtagcattttttcatggcgaactttatcaaaggccttttcaaaatcaatcgcgcacatgaaaacgtcatgatttacatctctgcatctttgaattaaaacttgggttgcgaatagtgcatcacgcgttccaaggcc

SEQ ID NO: 5496 - DNA, 786 bp, Diabrotica virgifera
  SmartBlast Evalue=2E-16; Info=Ankyrin repeat containing protein n=1 Tax=Brachyspira pilosicoli 95/1000 RepID=D8IC29_BRAP9
ctagctcctcattgaggatcttgtaacattccagatgtttctttttcttacatatatctaaagcagaacatttccacgcttttgaaaagtattcaatatttgcattattttttattaataacttaacaatatcgaccaaatttttatcgcaagctaacattagagctgtacaatcgtcagcatttttggcattagtatccacttttctctcaagtaaatattttacaatatcaatacttttaccggttacagcaagatgaagaacacccattttccttttattgattttgtgaatgtcagctacatccgccaatactttaaacactttagtaaagttgttcctacatgctatcatcaaagctgtctctccttcattgttagtaatattaatttctactttatgctttagtaaaagtgttacaacttttttattattacttttgactgcatggtgtaaagcagtccaaccattttggtcgatattttgaatattagcatcattatttatcaaaatttttaccaatgctacctgtcttttggcagcatccattaaaggtgatatgttatactctctgattgtatttacgtctgcattccagtttatcaataatttaagaagttttttattcttctttattacagctaagtgtaagggtgagaatccttttttattggaatgatttatgttggcaccatgtcataaagaattgtcattattttcttacacctatttaaaacacttatactgaatggggaatttcctgtttcgttgtcagtacagtcgat

SEQ ID NO: 5497 - DNA, 401 bp, Diabrotica virgifera
  SmartBlast Evalue=5E-15; Info="Ankyrin repeat protein, putative n=1 Tax=Trichomonas vaginalis RepID=A2DGP1_TRIVA"
tcaatttcaactttattttctagtatagatgttactattagtgtattattagatttaactgcatggtgtaaaacggtccaaccattttgatcgatatgttgaacattagcgtcatttttgatcaaaatttttaccaatggtaattgtcttttggcagcatccattaacggtgatagattatattcattggttgtatttacctctgcatttaaattaatcaataagttaagaaattgttcattcttctctctaacagctaaatgtaagggtgtggttcctttaatattaggatgatttatgttggcaccatgttcataaagaattgtcattattttcttacacctatttaaaacacttatactgaatggggaatttcctgtttcgttgtcagtacagtcgat

SEQ ID NO: 5498 - DNA, 602 bp, Diabrotica virgifera
atttgaatttttcaacgttataattataaaaggaattaatatacacttaaattgactatagaatgtgataagttcgtctgataaagtccatataagcggggaaaccgtcatcctaccatttcaagaaccaagaactcatttatattttggttgttgcactctgcagtagatatttacgatgaacaagttaccagttgtcgttcttttaattgttgtgtttactcaactgttggtacaaatcgactgcaaaattacacattgtggacctgaggagacccctggatgcgcaccatgctgtccagaagaagaagtaacgtgtgacaataaagtcgcgcagaaatgtccaggatactgttccgttatatgtaaactacaatgtaactgtaaaggcgggtatttcaaggatacagaaactggacaatgcgtaaaagagtgcccagacgatgataagtaatttgttataggctaatgcctcctctacatgtcagcagacgcgtctgcggatgcatctgcggatgcatctgccgatgtaagaaagtgcctcctctacacatcagcagacgcgtccgcgcaaaccttttgatccgttcttggaaaaccga

SEQ ID NO: 5499 - DNA, 585 bp, Diabrotica virgifera
atttgaatttttcaacgttataattataaaaggaattaatatacacttaaattgactatagaatgtgataagttcgtctgataaagtccatataagcggggaaaccgtcatcctaccatttcaagaaccaagaactcatttatattttggttgttgcactctgcagtagatatttacgatgaacaagttaccagttgtcgttcttttaattgttgtgtttactcaactgttggtacaaatcgactgcaaaattacacattgtggacctgaggagacccctggatgcgcaccatgctgtccagaagaagaagtaacgtgtgacaataaagtcgcgcagaaatgtccaggatactgttccgttatatgtaaactacaatgtaactgtaaaggcgggtatttcaaggatacagaaactggacaatgcgtaaaagagtgcccagacgatgataagtaatttgttataggctaagatataatatgacatgatacacaaaaatatcaaaatatgtgctcaaaatgtttgtaattatgatagactgtaaaattttttatgttatagtttttaataaaaattactaaaatgtt

SEQ ID NO: 5500 - DNA, 679 bp, Diabrotica virgifera
  SmartBlast Evalue=2E-22; Info="Galactose-specific C-type lectin, putative n=1 Tax=Aedes aegypti RepID=Q16PK9_AEDAE"
ctttacaatttattttatcaaaataaattataacaccgttaacaaaaactttggaaacatgtaatatgaataataataacttattaacaatctcttgtttcacaaataactgctagttcattattacaattttcatcattccaccagccatgggaataatttttgtaatataaagagatacatttttcgtcaccgtcgttatttggttctcctgttccccagtcaaacacattaattggtcttcctgttgacatccagacccagtcacgttcgtttgccagtctgctaccagccgaccaaaattcagcataactggatatagtgctctttaattcttttaataatgcatcattttcttctttagtttcaagcgcaacaagttgcatcttgtgataattgcaatagtgtaaagctgtcagataatttcccttaaagctctcctcaacaaaatattccttttcttggagtttaaaccaatgttgggaggaactatttcttgaaacatggttaaaagcatatatattacatactgaaaaaacaagtagtatataaaacgagaacatttttaatcccttcttgtgaaaacaacaatatgtgattaatatctgttttttgacaagattttttcaatgcatcaaaagataaatttctgccctgtcagagatatcaaattttaatt

SEQ ID NO: 5501 - DNA, 504 bp, Diabrotica virgifera
  SmartBlast Evalue=3E-18; Info="Galactose-specific C-type lectin, putative n=1 Tax=Aedes aegypti RepID=Q16PK9_AEDAE"
agatgcatttttcgtcaccgtcgttattaggttctccagttccccagtcaaatacgttaattggtcttcctgttgacatccagacccagtcacgttcgtttgccagtctgctaccagccgaccaaaattcagcataactgggtatggtgctctttaattgttttaataatgcgtcattttcttctttagtttcaagggcaaccagctgcatcttgtgataattgcaatagtgtaaagctgtcagataatttcccttaaagctctcctcaacaaaatattccttttcttggagtttaaaccaatgttgggaggaactatttcttgaaacatggttaaaagcatgtatattacatactgaaaaaacaagtagtatataaaacgagaacatttttaattccttcttgtgaaaacaacaatatgtgattaatatctgttttttgacaagattttttcaatgcatcaaaagataaatttctgccctgtcagagatatcaaattttaatt

SEQ ID NO: 5502 - DNA, 595 bp, Diabrotica virgifera
ctccagcaactgtccagcattcacctaaaatgaaatacttttgttttgttggtaagcattgtcgccattacagcatccgacttacaaggtacagccgtagaccaatgtttatgcagagacgaactcactcaaatctacaatcaactcgtcgaagctaatgtcgaattgaaggaggccaacgatgaaatgattcagctggactccgatatggaatacatggacaataggttcgaagcccagaacgaaaatttggaagaactcgaaagtgcacttaccatgcttcgttacatccaactccaaactctacaagagctttccagtcaagaccagattctcaattgcattgtcgtcactgttcaaaacatcgatgtccaggttaaaaatgaaacaacacatgtcaaccagcagacagttgatattgaagcactccagcagctaactaacgagattcaacaatgtaataatgttaatagttgcgtagctcctacgactacaacaacccctacgactatgcccactactactacaacagtagtattataagtatagattttaagtaagcttgagacaaaaaaaaacaaataaaagggcgtac

SEQ ID NO: 5503 - DNA, 591 bp, Diabrotica virgifera
ctccagcaactgtccagcattcacctaaaatgaaatacttttgttttgttggtaagcattgtcgccattacagcatccgacttacaaggtacagccgtagaccaatgtttatgcagagacgaactcactcaaatctacaatcaactcgtcgaagctaatgccgaattgaaggaggccaacgatgaaatgattcagctggactccgatatggaatacatggacaataggttcgaagcccagaacgaaaatttggaagaactcgaaagtgcacttaccatgcttcgttacattcaactccaaactctacaagagctttccagtcaagaccagattctcagttgcattgtcgtcactgttcaaaacatcgatgtcgaggttaaaaatcaaacaacacatgtcaaccagcagacaattgatattggagcactcgagcagctaactaacgagattcaacaatgtaataatgttaatagttgcgtagctcctacgactacaacaacccctgcgactataaccactactactacaacagtagtattataagtatagattttaagtaagcttgagacaaaaaaaaacaaataaaggggc

SEQ ID NO: 5504 - DNA, 758 bp, Diabrotica virgifera
cagaatgaaatactaaattattaccgagggccgaaaatcccttagaatagataaaaagtttcttttcaatgagatatttgaaattaaaaatcacactaaattttctcttatttttcacccctgtaacttattaaacattatagaagttttcagggacttcggccttcggtaataatgttatctttcattctgcgtttgaatttttcaaaaatgcctattagttttctcgggattcgaaaaaaaaaagaatcccatttaaatagcattggagtcgaaagtttgcgcctatccccttaaacaaaataatatcaattttaaacattttcctccagtccacttgaatttatctgtatttctattctagcataacttgcaggtgttccatatttcaagtttgttatatgttgttcctgtttaaacgattccggacaatgttatcaactcttaagccggactcaaatgactcgtgtacttggcgaataatcgtcacttgcgtatacttgccatgtcgtctgagtgggttactcgtacaattatttgtcactcgttcgtcttctaactgttgtcggtaaaaatgacccgagtcaaagggatcacgattattcgtacacttgcgaagtacatacttgtctatacttgcagaggcggtcaaacgaaatgtataaataattggcatttactgcgactattcatttagaccagtgcatttagcactaaaaacacagggataaattgattttaaatacactacctagaga

SEQ ID NO: 5505 - DNA, 419 bp, Diabrotica virgifera
gctccctgtttgatttctaaataataatatatctatcttgtagtcctatcaaatgatctgtacaaaacgtattgcatacggctattcataatatctaaagccggactcaaacgactcgtgtacttggcgaataatcgtcacttgcgtatacttgccatgtcgtctgagtgggttactcgtacaattatttgtcactagttgccactcgttcgtcttctaactgttgtcggtaaaaatgacccgagtcaaagggatcacgattattcgtacacttgcgaagtacatacttgtctatacttgcagaggcggtcaaacgaaatgtataaataattggcatttactgcgactattcatttagaccagtgcatttagcactaaaaacacagggataaattgattttaaatacactacctagaga

SEQ ID NO: 5506 - DNA, 904 bp, Diabrotica virgifera
  SmartBlast Evalue=1E-81; Info=Endopolygalacturonase 1 n=1 Tax= Chrysomela tremulae RepID=C3UTC2_9CUCU
ctaatctcacattattgatagtgtttagtgtgatagtggctacaattgctataccctttaactcaacaaaaaatattggtgatggctgtactatatcaaacatatgggaggtggaaaacgtggtcaaaaactgtaagaatatcgtagtcaataatctctatgtacctggtggtcaaaaattagaactaaaacttcattctgggaccgttttgaaatttcaaggaactacaactttccaacatagtaactgggagggtcctttagttgaaattactggaagcaacctccatgtttctggagctggtgcagttctagatggacttggtgctcaatactgggatggatatggtgataaaggtgcagtaaaaccaaaatttttaaaaatcagaacaactggatctacgtttgataatattcatcttcttaactgtcctcggcaatgcgtgtccattttgagctctaagcaaacaactctgactaactttaatatagatgtatctgctggagatataacccaccttgcaacaaacaccgacggttttgatttgtctgacagtgatggaattacaatcgaaaattcagtagttcgtaaccaagacgattgtgttgctgtaaattctggtaagaactaccactttaataaacttaactgtaatggaggccatggtcttagtttatcagtaggtatgagcaaaaacgactcgcccagaaaccatgtggaggatgttactttctcaaactgtatagtaagtaattcattgaatggaattcacatcaaaacacacagcgatgctggaaaaggatatattaatggtgtcgaatatcgaaacatcatactaaaggatattaccaattatggaataaacgtccagcaagattatcagggaggtcattctacaggtta

SEQ ID NO: 5507 - DNA, 278 bp, Diabrotica virgifera
ctaatctcacattattgatagtgtttagtgtgatagtggctacaattgctataccctttaactcatcaaaaaatattggtgatggctgtactatatcaaacatatgggaggtggaaaacgtggtcaaaaactgtaagaatatcgtagtcaataatctctatgtacctggtggtcaaaaattagaactaagtcttcattctgggaccgttttgaaatttcaaggaactacaactttccaacatagtaactgggagggtcctttagttgaaattactgga

SEQ ID NO: 5508 - DNA, 787 bp, Diabrotica virgifera
gtttctcgttgttctgtctactaacttctcaagtttctcgttgttctgtctagaagtttcatcgatcgtttcagaaacagtttttaatttcgataagattacttgttctgctgactggaagtggaacgtctctgggtcatctccgttcttcgtgaggacatcctcgagtcgtgcttgtaggactatcttgagcccactgctgtccagatcccgttcctctagctgttcacggagctgttttactgtaagttcttgtagcaacatctttggtcggcacacacgtactttccaaaatgtcttttaacagtctttccgaataccgaacaatcaacgcactttaactattcccgacgaataaagtccaaaagtattttaaagtctttccgaataccgaacaattaacgcactccggttattcccgacgaataaagttcaaaagtattttaaagtctctctgtaattcacttatttggtccaaccccatattttttaagaaatctatagcttatttattccttcctaaaatctttggcagcacaattcgttctgtggatatcttcgaaactgagcttaatgtcgttctcttaacaatattgtaacaaaataattattgacctaccctcgtataccagctcccgtctccgcacagacagaacactatcgatgtttcgagatacgccgatgcagcgccgatgacgtgcaagcggtcacatggacatagctggagatatatagatatttctggaatatctgtatcgcatatataaataggacatatttgtaaata

SEQ ID NO: 5509 - DNA, 383 bp, Diabrotica virgifera
gtttctcgttgttctgtctactaacttctcaagtttctcgttgttctgtctagaagtttcatcgatcgtttcagaaacagtttttaatttcgataagattacttgttctgctgactggaagtggaacgtctctgggtcatctccgttcttcgtgaggacatccttgagtcgtgcttgtaggactatcttgcacccactgctgtctaattcgtactcttctaattgttcacggagctgttttatggtcagttcttgtagcaacatctttggtcggcacacacgtacttttcaaaatgtctaagtctttccgaataccgaacaatcaacgcacttcaattattcccgacgaataaagttcaaaagtctttccgaataccgaacaa

SEQ ID NO: 5510 - DNA, 670 bp, Diabrotica virgifera
gaagattcgaaactccacaatactagaacgtctcagtagaatgtaatgagaagtttccaatatagattgctacaaaatattatacaagtgaaaatagaaggcaaacgcagtccaggacgaaaaagcacttcgtggttgatttagggtggcagtgaataaaattaagatagctatgatagtaaccaacgttctgaaaggacatggtacatgaagaaaaataaagtaacagcccataccgaaaaagaatcctggtacgcgagtgacgagaaaatttttatttcattgccccctccttgcaaggttgctggatccgccgttgttgtagttacaattagaaaactatgatgagatcatgtttttagttgcgctgtatttttagttttatatttttatggatatttataactgtatttataactgtattaactcataaaacttggtgatgattcatatttaaaaattattttgctgcttttgtggttttatgtaattaaattgtaggtacatagtttttatgttgtagttggatctcttataccaccacacatggatcccttgccttttagattaataacaacaatacaaaaacacaagagccccgcaaactggaatcaaagagcacaaaatgtaatagataacgagcccagtccagaaattgaaatcaggagag

SEQ ID NO: 5511 - DNA, 507 bp, Diabrotica virgifera
gaagattcgaaactccacaatactagaacgtctcagtagaatgtaatgagaagtttccaatatagattgctacaaaatattatacaagtgaaaatagaaggcaaacgcagtccaggacgaaaaagcacttcgtggttgatttagggtggcagtgaataaaattaagatagctatgatagtaaccaacgttctgaaaggacatggtacatgaagaaaaataaagtaacagcccataccgaaaaagaatcctggtacgcgagtgacgagaaaatttttatttcattgccccctccttgcaaggttgctggatccgccgttggccgacagccgaagtgtgacgtcacgattgtcatattgttattatcgctttgtaaacaaaggttgaaaagccatgatttgcataaactcaaacctatgaagttgaaattttgcttcctctgctgctttttctgcttaagtatagtgttcttaagataagaaatatagttttttagcgatattcaccaa

SEQ ID NO: 5512 - DNA, 595 bp, Diabrotica virgifera
aaaaaaaacaacgtttatttataaatagtataataatacaaaataaattattgtttaaaaattgccgtgaacatttactccagcgcccacttggggttttccggtaccacctggtcctccaaaatgcctgttatacccagcactagcgtcagcaccccagtttttacctcctgcaaaattgtattttccaccagctgtaacatcggttccgtaaccaggggttctatcagcatttacaaaagctgaagatccagatggcttgtgggaatagtccactctacctccaaatgtgtcgggttttagaccatgagatccccaagcttttgatgcacctacggtaccgtccagtctatggttgttgttgtttacaaatgatcctgaagaagatgctccgaatccaccttggttagctccccatttcacctctcttctttctctgataacaggaaccagtaaatattcttgtccttcttcatcaactgcaacatcaactggtatagcagcggccacagtcaagcacaatgcgagaactaagtatttcattttaatcgtttatgtctttcaatgtaaagtactgtgatggtatgatctgtaa

SEQ ID NO: 5513 - DNA, 575 bp, Diabrotica virgifera
ataaatagtctaataatacaaaataaattattctttaaaaattgccgtgaacatttactccagcgcccacttggggttttccggtaccaccgggtcctccaaaatgcctgttatatccagcactagcgtcagcaccccaatttttacctcctgcgaaattgtattttccaccagctgtaacatctgttccgtaaccgggagttctgtcagcatttacaaaagctgaagatccagatggcttgtgggaatagtccactctacctccaaatgtgtcgggttttagaccatgagatccccaagcttttgatgcacctacagtaccgtcaagtctatggttgttgttgtttacaaatgatcctgaagaagatgctccgaatccaccttggttagctccccatttcacctctcttctttctctgataacacgaaccaataaatattcttgtccttcttcatcaactgcaacatcaactggtatagcagcggccacagtcaagcacaatgcgagaactaagtatttcattttaatcgtttatgtctttcaatgtaaagtactgtgatggtatgatctgtaa

SEQ ID NO: 5514 - DNA, 673 bp, Diabrotica virgifera
cgtgaaaatcttttaatctatgtagtgttatagtgtttctaaaagtaattgaaatgaagaaaatcgcttgcaataaaaatccttcatgaacaaacctacttcagaaacaatttttcgaaattttagatccgaaaatctaaacacctgtactggaaccaagtactggtgagaacccaaatccgtgccttctaaaatttgaaaggcaaacgaacgataaataagaagaagattaggggaatctacgattgcattccatagcccgtctatttatttagataaaattcaatcgaatcttgggttgtcaccagaacttggttccagtaaaagtctaggtttttcggatctaagatttcgaattgttttaattagatgtcttacaggtctaaaagcaaattattgtttataattttgcttagtgagatagctcgttttctttttgattcagagcagaccataggcctctctgaagagctcaaaacagtgaaacgtacgtaagaggatgatggtcatctctgaaacaaaatgaaatattaactctctcattttcatttactccgatcgtgaaacccaaaagaccagtcaaatagtgactagcgccattgcaacatatatgattaggttcttgcaacttattaaatctgtgtcaaataagaatatcagaattaatactttg

SEQ ID NO: 5515 - DNA, 497 bp, Diabrotica virgifera
cgtgaaaatcttttaatctatgtagtgttatagtgtttctaaaagtaattgaaatgaagaaaatcgcttgcaataaaaatccttcatgaacaaacctacttcagaaacaatttttcgaaattttagatccgaaaatctaaacacctgtactggaaccaagtactggtgagaacccaaatccgtgccttctaaaatttgaaaggcaaacgaacgataaataagaagaagattaggggaatctacgattgcattccatagcccgtctatttatttagataaaattcaatcgaatcttgggttgtcaacagaacttggttccagtaggagtctttagattttcgaatctaagaattattaaatcttaattaaatgtcgctacaggtctaaaagcaaagagccagttcgttttctttttgattcagaacagaccataggcctctctgaagagctcaaaagagggaaatgtacgtaagaggatgatggtcaatctctgaaac

SEQ ID NO: 5516 - DNA, 628 bp, Diabrotica virgifera
ctgattttgacgttctatgctgatgcattattcagtttttgaggtaaagctgattggtttaattcaggtcctgattgtactaagtttgtgaaactaggatcacattgtctcttatcatcattgtcctctaaaacagacttagatgtagaagcggcatcttcaagaagctgtcgtttaacccttttaagggctgcttccctcacaggctgagaaaaagctcgttttctgtctggttgacaatcaaatatgtgcgggacaacacctgacttaataattttgggaccacccataatcttgaattttatatagttatccatatcttgttccaactgcaacaaataaacaagtataagtaggcacatttcatgaaacaactaatattttttcttcttcttcttctttttatgtagacattactctatgtgtttttcaatgtgcctccagtaagttgtcattccatctttttcgtggtcttcccactgattgtcttcctattggggaaccgtctctcgccgtccttactactctatttgttgtaattcggcttatgtggtcgttccattctactcttctgcttttcacccagttattaatgttgtccaccttgcatctatgtattgcatatttt

SEQ ID NO: 5517 - DNA, 529 bp, Diabrotica virgifera
ctgattttgacgttctatgctgatgcattattcagtttttgaggtaaagctgattggtttaattcaggtcctgattgtactaagtttgtgaaactaggatcacattgtctcttatcatcattgtcctctaaaacagacttagatgtagaagcggcatcttcaagaagctgtcgtttaacccttttaagggctgcttccctcacaggctgagaaaaagctcgttttctgtctggttgacaatcaaatatgtgcgggacaacacctgacttaataattttgggaccacccataatcttgaattttatatagttatccatatcttgttccaactgcaacaaataaacaagtataagtaggcacttttcatgaaacgataactaatattttttaagtagaaaatatgtacctaattagataaatacttacatcaaaatgatcctcacagacataaagacctatgcttttgtgaaatataaatatcctttttatctcgcctgcatgcctttagccattttaatcgacgttttgg

SEQ ID NO: 5518 - DNA, 671 bp, Diabrotica virgifera
ccactgtttgaatggttacaagaacgtattaagctggggtccaacggaacgttgagcggcacgccacgagaaatataaaatatgtaataggaataagataaaaactaaagacgggagtcaatgtaacgtgaaatagcgtaatttccctcaaaatttgtggtttacggcccttaagctaggaccgaaccctatatttatggtcggcatagatcggcgcgaagtctctcatcctttgtcggtaaatgatcaagatctaaaggaagtcagaagctgatacagattaggtacgtacctctccaacccttccgatcggctagggactggtacggtcagtgccgtgataattttgctatggagtggtctaacgtcgttgtgttcgaatttatataattgcataaattaaccaacttactaaagtacctaaaaaactatgatgtggcaatccccagagaagaaaaaacgaggaagaccaccacagagctggaatctgggagttagaaaagcgattagtgctcgaaatctaaatgaagacctaactcaggacagaatacagtggcgtttgggagtcggacaacgtcgtaagacattatgaaaccgaatatatatatactaaaatagctatcgcccacattgacggtgtaccttcaatacgcgagtggacgtattccatc

SEQ ID NO: 5519 - DNA, 469 bp, Diabrotica virgifera
gccgagacatggagaatagcgtagaaatataagaaataggtcgaagccacggaaatggatgccatcagaagatcgatgagaatatcaagagccgaaagaataaggaatgaagtaataaaacagcaaatgggtatagagggacactatagttaaggatattgagagaaaacagctcatatgctatgggcatgtgagccgaatgggtgacgaacgattgcctaaaaaactatgatgtggcaatccccagagaagaaaaaacgaggaagaccaccacagagctggaatctgggagttagaaaagcgattagtgctcgaaatctaaatgaagacctaactcaggacagaatacagtggcgtttgggagtcggacaacgtcgtaagacattatgaaaccgaatatatatatactaaaatagctatcgcccacattgacggtgtaccttcaatacgcgagtggacgtattccatc

SEQ ID NO: 5520 - DNA, 768 bp, Diabrotica virgifera
acttattaaactatctatctaactcactctaccattatatgacaattacttgtcaatctataattgcggtatctaccaaagtaaatagtaccgaaatctgaagagctgaagaattgctcacaaaaatggattttatcataaatagttggatagaaaaatggtcaggtttaagatagtcttgaatgtaccctttgaattgtcaaagcattggagtgtttgtaccaatgataaggagggaatatcatttgaccagatagtgcagttttagaaaagaaatctagtaactataaatgaaactaggtatcagtataaaaccgacacgtcgaataatcaatgaccaatgagtcgatagcatggtagctaattccttcgctaggtaagatcactacttgaacacacccatcgcggtttaaattccttgtagctcgttccatttccaccaaataacataaaaaaatacggacttaattgaaactttaaataataaatctactaattttcacaacaaatcagacactttttgactgttaacaatttgacatctatttaattggtaatttctcaaagcctactttaggcttgtctattaaactaagccgaaaatgaggatttattgatgaaaaacatggctagttgttaacgtacctcactttttttattatccaacataaacaaatgaatcaaaaaaagaaaatgttaataaagcctagggctccagttgagttttaatttcaatattttatatgtgctagaatattccacagggtg

SEQ ID NO: 5521 - DNA, 380 bp, Diabrotica virgifera
caatgtaaagattatttgtcggcactgtaaattttataggtttctattggtgatttcctacctctaatagtttcatctcattttatttcacaacgtataacaaaaaaaaataaggaacaaatcagacactttttgactgttaacaatttgacatctatttaattggtaatttctcaaagcctactttaggcttgtctattaaactaagccgaaaatgaggatttattgatgaaaaacatggctagttgttaacgtacctcactttttttattatccaacataaacaaatgaatcaaaaaaagaaaatgttaataaagcctagggctccagttgagttttaatttcaatattttatatgtgctagaatattccacagggtg

SEQ ID NO: 5522 - DNA, 832 bp, Diabrotica virgifera
  SmartBlast Evalue=2E-48; Info=Putative alcohol dehydrogenase n= 1 Tax=Gryllotalpa orientalis RepID=Q6RUR3_GRYOR
tataataatctaaaacgcgtctagtataattatataatgtttgaagttatcgataaagttgctttaattacaggaggtgcctcaggtatagggctctgttatgctaaggagctcttaagaaatggggtaaagggagttacaatagcagacattgatgtaaaagtgggagaacatgcggtagaggagcttaataaggagtttggtgcgacgaaagctatattcattaaaactgatgtgactaataaagataattttgaggctgcttttattcaaaccgtagatgtttttaaaagtgttgatatacttgttaataatgctggaatctataacgatagaacttgggagaaagaagtggaagtcaatattcgaggaacaataaacggaataatcttgggtttagaaacatacttaaaaaaatttaagcaagctgacgaagccgttatcatcaacacagcttcgattgctggtataagggcaggtgcttggatgcccatttacggcagtaccaagtttgcaataacgggcatgactcagtgctggggagatccttttcacttccaaagaacaggcgttagggtggttgccgtatgtccaggaggtactcacaccccgttgtttgaggcggaaaactactctttactgcctgagtatatggatgcacaaaatctggcttcggagaaaagtggactcgaacacattagatatttccgtctctgtcagatctcaccccttgtacaactgcgatacgtgtgaggaaacgggcgccatcctcattaaaaaagagaagcgaacaacaacaaaacctcggtgcatcgtcgtcaaggctactgcg

SEQ ID NO: 5523 - DNA, 311 bp, Diabrotica virgifera
tttttagccatagaccaacgcctaatatggctgtccctgagaggaatattataaagttgaaggcacatagtaaatattttatacagcacgtaaacattttaaacttctgtttcctggtatcctttcgttagaattatatcgttgtcatgttgtactattgtttggactcgaacacattagatatttccgtctctgtcagatctcaccccttgtacaactgcgatacgtgtgaggaaacgggcgccatcctcattaaaaaagagaagcgaacaacaacaaaacctcggtgcatcgtcgtcaaggctactgcg

SEQ ID NO: 5524 - DNA, 569 bp, Diabrotica virgifera
aacttttactttggatgtctgggttaggcctttttttggacgaattatactatactacccccgtaactttggaaccgttcattttagaagggttatgcataggaccttttttgtttcaaatttaatgtagaacaattttgtatagaaggttgttcatgctaaaccgcatagttttagaaatattgacgaaaaacgtaaaaactacgaatttaccgatttctcccccctctccccccaaacccgacgctcaaaatggtgtgacttttttctgaacattatgtggaccatatagaacaatttggtgttggaggataactttcactttggatgtctgggtttgggtctaactataccatactatattccctaaaataaaatgtttcatcataacggctgacctgagtaaaaatcacttatttataagttaaatttgaattataggcttggatctcgcgtacaaaaaagaagttgattaataacaagctgaaaatttttaacttaactgtgtctagtcggacaaactttgatgtacgggaacactgaaacaggcgaagctttgattgtggaac

SEQ ID NO: 5525 - DNA, 572 bp, Diabrotica virgifera
aacttttactttggatgtctgggttaggcctttttttggacgaattatactatactacccccgtaactttggaaccgttcattttagaagggttatgcataggaccttttttgtttcaaatttaatgtagaacaattttgtatagaaggttgttcatgctaaaccgcatagttttagaaatattgacgaaaaacgtaaaaactacgaatttaccgatttctcccccctctccccccaaacccgacgctcaaaatggtgtgacttttttctgaacattatgtggaccatatagaacaatttggtgttggaggataactttcactttggatgtctgggtttgggtctaactataccatactaataaccatactaataataaagtcggtcttgacggtccagttagctggggctgtctatcgacaagtttagtggatttgcgatttgcggtcgctggttcgagcctcagctatgtcatgaaatttataaaaggccaacgccgtagtataaaactcaatagagtctacggcttggtctggataaactggcgtcggatcggtctatggaggagcggt

SEQ ID NO: 5526 - DNA, 729 bp, Diabrotica virgifera
ttgtcagtatgtttttaacgccgaatattactttttcgcagtggatttacacttattttattgtccttcactttataatcacctggtactgtcagttaacatttaattttcgcaacaactctcgaaattttcgggtttatcgttggcgaaaaatcaaacactttaacactttcaatgccacgttgccagtccttgatatataatacatatatcaaattcaaattatgtcctccatagaccgaccagtatggaggatacatttctcttgaacaagaatcttaagttcaaattttgtggaaagttgtaatttaaaattttcagtgagatatataaatcgtggcaatgagacaatctgcatagctgataatactaacagttaacaacaagtaacttttcgcagatacgttaatgaatggtcaaaacctggtcgtttcgcctgtcgaagaagtctggtaacttgaggcgaaagtacttcatttctttcgcgcagttcgccataagaatgtattggtatgttcttcctgcattattaacctaaaatcaaaaacacttttccattggatactaatgtaaataacacatgtacctagcgttggtttaaaaaattctacccttctgcagttaccttctgcttttacaatttttataaaaatgttgtggataaaatatttattaaacttaagtatagatgtaaaaaagttgtaataacacgttattgtctagtgcctt

SEQ ID NO: 5527 - DNA, 413 bp, Diabrotica virgifera
ggagggtattaaacagtccaaatgttttacgacgtagtttatggatgttccctaacagttagcaacaagtaccacctcgcagatacgtcaatgaatgaatgacaagcctggtcgtttcgcctgtcgaagaagtctggtaacttgaggcgaaagtacttcatttctttcgcgcagttcgccataagaatgtattggtatgttcttcctgcattattaacctaaaatcaaaaacagttttccattggatactaatgtaaataacacatgtacctagcgttggtttaaaaaattctacccttctgcagttaccttctgcttttacaatttttataaaaatgttgtggataaaatatttattaaacttaagtatagatgtaaaaaagttgtaataacacgttattgtctagtgcctt

SEQ ID NO: 5528 - DNA, 669 bp, Diabrotica virgifera
aacctgtttgtttacatatatgtggatatttttgagaggttgctgaacctgaatcaaattttgataatttaaatcataaaatggccgatccaaaatggcggataacttaaaaaatagttgtaaaatcataatttctttacaaaatgtatttatttctacatatatttatttttgagagctttgataaacctaacttaaatgttaacattataaactataaaatggcggatccaaaatgcggattttctaaaagaacataaaaaagaacatttttctaaaacatttattgtctttatttttaacaggttgttgaatctgaattaaagattaaaaatttaaatttcaaaatggcggatccaaaatggcggatatttaaatgaaaaacaagtagaatccaatcaaacaaatatggaatttcattcttcaaaaaagataaacaaataattttacaattatattaaaaattaaaatgtattagaaagaatatttaaaaaaaaacaaattttcgattagaaggatataattacatattggaacatagtttttaatccaaacaacttttctttatacaaattttcgatattgtgaaatatagaggtactttactcttgagtgaaattcgtattttttgacatacctcgtacaaaattaacaaaatttgatatttga

SEQ ID NO: 5529 - DNA, 480 bp, Diabrotica virgifera
aacctgtttgtttacatatatgtggatatttttgagaggttgctgaacctgaatcaaattttgataatttaaatcataaaatggccgatccaaaatggcggataacttaaaaaatagttgtaaaatcataatttctttacaaaatgtatttatttctacatatatttatttttgagagctttgataaacctaacttaaatgttaacattataaactataaaatggcggatccaaaatgcggattttctaaaagaacataaaaaagaacatttttctaaaacatttattgtctttatttttaacaggttgttgaatctgaattaaagattaaaaatttaaatttcaaaatggcggatatttaaatgaaaaacaagtagaatctaatcagagaaatatggaatttcattattaaaaaaaaaagaataaacaaataattttcacaataatactaaaaattaaaatagtattagaaagaaagaa

SEQ ID NO: 5530 - DNA, 626 bp, Diabrotica virgifera
  SmartBlast Evalue=3E-26; Info=Endonuclease-reverse transcriptase n=1 Tax=Bombyx mori RepID=D5LB38_BOMMO
ctcatttgaattcaagtgaattgaacgctttttgacatgagttcatttcagtaaaaaaacagagcaacaggcgccaacagagatttatcgcggtattttaaatgcagtcgtatgtattactactgaattaaaaaatcccgaggtaaaaaaatgtgaccgaggtattcgattttggctgatttttttgtggttaacagctctttttctttttgtattcttaataaaacgtcctgatgagtaactggtcggtataagatatcttcaggattcgacgataaagccacatttcaaaagcctcaattttcttgcaggtggcgtctgtgagagtccacgactcaactccgtacaacagtataggaaagatataacatcgtagtaatctgacttttatgggtatcgacaaatcatgacatttgaacaactttgccattttttgaaatgcagatcttgctttctctatcctacatttgatttctatagaatggtcccaattttcattgacgttcgtaccaaggtaggttctaacccataacaaatatttattgttctttctccttggcgtatgtgtgtatactgactaacgcatcgtattctaggaaatttattattcgcaggtatcaacagtg

SEQ ID NO: 5531 - DNA, 512 bp, Diabrotica virgifera
  SmartBlast Evalue=5E-28; Info=Endonuclease-reverse transcriptase n=1 Tax=Bombyx mori RepID=D5LB38_BOMMO
agttgcagcagtccatatcattcactgttcgtcatgatgtgaccgaggtattcgattttggctgtttttattttgataacagctctttttcttttttcattctcagcaaaacaccctcattagtaatgtggtcggtataagatatcttcaggattcgacgataaagccacatttcaaaagcctcaattttcttgcaggtggcgtctgtgagagtccacgactcaactccgtacaacagtataggaaagatataacatcgtagtaatctgacttttatgggtatcgacaaatcatgacatttgaacaactttgccattttttgaaatgcagatcttgctttctctatcctacatttgatttctatagaatggtcccaattttcattgacgttcgtaccaaggtaggttctaacccataacaaatatttattgttctttctccttggcgtatgtgtgtatactgactaacgcatcgtattctaggaaatttattattcgcaggtatcaacagtg

SEQ ID NO: 5532 - DNA, 576 bp, Diabrotica virgifera
tacagcttacgtgcaatacatagataaaattacagacaagtatatttgatactttaaagataaatgatatctaaaatatatttctttttattcgtttatcttctaatcagtatttaagaacttttttgagttttttttagttctagcgcaaaccttaggacgaaattttggcaattattgctataaatttattatataaaatgaagtatttatctgttctatctattttttgctttgtgggaatagcgtttgctgctatttcttttcccaaggaacagggtctaggaagtatatcggattgcctgttttgtacaggtgttggaaatcaagttagattgctgcaaaaacacaatctttcaatcgaagaaataagagacgttatattccaagaatgtactttgcccacggattggattttcttcgttagctgcgaagcctatataggcgagatcataaacggagtattcaattcaaccaatttggaagtacatgaagcatgccagaatattaaatactgttggtaaacaatatattgtaatgttttaaagaatttaatatatattacagataaaaaaa

SEQ ID NO: 5533 - DNA, 567 bp, Diabrotica virgifera
acgtgcaatacatagataaaattacagtcaagtatatttgatactttaaagataaatgatatttaaaatatatttctttttattcgtttatcttctaatcagtatttaagaacttttttgagtttttttagttctagcgcaaaccttaggacgacattttggcaattattgctataaatttattatataaaatgaagtatttatctgttctatctattttttgctttgtgggaatagcgtttgctgctattactttctccaaggaaaatggtctaggaagcatatcggattgcctgttttgtacaggtgttggaaatcaagttagattgctgcaaaaacacaatctttcaatcgaagaaataagagacgttatattccaagaatgtactttgcccacggattggattttcttcgttagctgcgaagcctatataggcgagatcataaacggagtattcaattcaaccaatttggaagtacatgaagcatgccagaatattaaatactgttggtaaacaatatattgtaatgttttaaagaatttaatatatattacagataaaaaaa

SEQ ID NO: 5534 - DNA, 628 bp, Diabrotica virgifera
ggccgattcaactacaactactggatataatacgatatataagaacaatactaagaatctaagaaacgaaacgaacaagaacaaaactaataactaaaaaactacgactctaagagaataatacgaacaagacaaatgtcttgcatggcctataatgccagaactattaagtaaaacctggtttattcttaccacgaacttgtgtcaattcatgacatctaagaaacaaccattagtaatcacaaaacatgaacaaaataacaaaatgaaacaatatacttcccaacaaattagttgataaaaccgtatcttaatcttattacaaagtcatttgtatttgagtagcatcattaaatttagagaggtaaatatactgaataggaggtgtatataataattcaaagtactgtctatccaaaatcaattaaaaattgaaatttcacgagtaggttcaaatataatattactcaacagatctgttttactgcaagaagcgctttacgcaacgtaaccaaactgttagaagatcctcgtattatcgctgcacctcaatccgtgcaacgagaataattacgataatatcgtgcatagcttggttacgtgtggttacgttgcgttcagtgcttcg

SEQ ID NO: 5535 - DNA, 509 bp, Diabrotica virgifera
ttaaaactaattggtatacaatctacatgaatttcttctttacaattctcaactcagtacaaggcatatttttactcttgcaacaattataaggaaataaagtgctcaaaataattaaatatgtagtagaatgtggaaccttaaattccttagttatactggccaacaaattatgtgataaaaccgtatcttaatccttattacaaagtcatttgtatttgagtagcatcattaaatttagagaggtaaatatactgaataggaggtgtatataataattcaaagtactgtctatccaaaatcaattaaaaattgaaatttcacgagtaggttcaaatataatattactcaacagatctgttttactgcaagaagcgctttacgcaacgtaaccaaactgttagaagatcctcgtattatcgctgcacctcaatccgtgcaacgagaataattacgataatatcgtgcatagcttggttacgtgtggttacgttgcgttcagtgcttcg

SEQ ID NO: 5536 - DNA, 912 bp, Diabrotica virgifera
aactagaatatggtaaatggctttaactatttttcatttcatcacagcgataatatgccactaacttaagaatatagtacagtgggtattttaccgtccagatgggtttagaatacacccgaaaacatccgcgaataaaattattcagtacgtcaatttttgtatctagtctaggattataaattcgcaagatattggttcaataaaggttcaacttggcaacaggtggagtctagtaaactacagtataggtcgacacaagtagctgaaaccttcaaggtcattctagggaatgaataatttcgtttgcgaaagaaaaatgtaaatctaaaagttttaatagaatagattatttgctaatattcctgaccagaattgtagcaatacgtttccaaagtgttttaaaaactaggtaccgtattacgtgttttccgacgtgtatatctaaacccactgttttaatcgcacaaaaattatggctaaaaatttagccatactgtctaaattgctaaacaatttctcattgtacgtaggcggtccgataagtactcagcctctccgcccgatagcgccactatcgcgaaagaaatctactatcgtataatactagactaagagccgctataggtgaaatttgctaatcattttaggcacgataagaccctataacttaaatagtaggacctaaaagaaaacgtatgaagactgtgctatccatggacgtataaaggtgccatcacttttcagtggcacatgcgtcgacagtggcgcagcaaaccctccacctacggacgggacaaacaaaccaaaaggtacccttcctcactcctagaattaagttatatgtgatttcattttcatttttttaagttatatgtgactaaaaaataaggctcagcgtaattccaaccc

SEQ ID NO: 5537 - DNA, 212 bp, Diabrotica virgifera
gcaggacccaaaagaaaacgtacgaagactgcgccatcactcctcagtggcacatgcgtcgacagtggcgcagcaaaccctccactcatggacgggacaaacaaaccaaaaggcaccctttctcactcccagaattaagttatatgtgatttcattttcatttttttaagttatatgtgactaaaaaataaggctcagcgtaattccaaccc

SEQ ID NO: 5538 - DNA, 638 bp, Diabrotica virgifera
agattcagcttcgtccgacttgtggaagtcatatttttataatcaattgcataataaaatgtatttcaaaccttaatatagtggttttctatgttactaaaaacttctggttattaaaacagtcataatacaatttatataagatttctacaataaaaaaacttaacaatcaacaaactagaaaaaaagggttgcctgaaataaggagagttgcctttataaagtagagcttccatctaacacaattttgagatttaattgttattacaactgcagaaatagacactaatatttatgccagagatttatttgttactgttttgtttctgtcattgcagaatcactaataaaattacatttttatataaattcaacaataggggaatatattgataacaagttgccagtcaaaagtggccgcaaatagttttaattaaattaatcgtaattcatttttgaaacaaaatttcgtccatgacgtaggtgcatgctttttgtatcaaactaaagctaattgtttttctaatacgatgataaaagggtgcatgcaaaaaatagccgcaaatcaaggttgagagctgttaaaaacgcgaggtatgagagataaagtgaaagaaagctagcgcgcaatgccactg

SEQ ID NO: 5539 - DNA, 478 bp, Diabrotica virgifera
aatataattaatgattattacaggactgtagatgttttttaagtctctaatatttcaaaatataggtacatatattaaaaaccaagacacgattttcatcaaaaactcttatagtctaagatctcactgcaaactcactatgttcataacgtcacatccctctttatactgtgataacgtagttaattaaagtcacttttttatacaaatttaagaactggagaatatattgataacaagttgccagtcaaaagtggccgcaaatagttttaattaaattaatcgtaattcatttttgaaacaaaatttcgtccatgacgtaggtgcatgctttttgtatcaaactaaagctaattgtttttctaatacgatgataaaagggtgcatgcaaaaaacagccgcaaatcaaggttgagagctgttaaaaacgcgaggtatgagagataaagtgaaagaaagctagcgcgcaatgccactg

SEQ ID NO: 5540 - DNA, 601 bp, Diabrotica virgifera
aattaccgtgagttaggcccggtactttatgtctcgattaaacctcggttagctaaccggggtttaaccgggacctcttagggtcccttgcgttgtaataaattcaattacaagtattattataactataggtaagtataataatagttgtaattgcatttattacaacgcaggagaccctctagagcagaggttaccaatcagtgtgccgcggcacactggtgcgccctgaaatccctgtaggtgtgccgcgaaattcacataacaatacatatttgattatactcactatcattatagagattatttacccaagtgtgctgtggctgaaccagtttttaagttagtgtgcctcaagctaaagaacgttggaaacgctgcattagagtatgaatttcagtcaactctggttattattataatttatagacatgtatttataaacattaatagtgtttcaatttcatcttcaaaatagagttgccttatttcttttagtttttgaatattctttttaaaaaaccccttacttgttaattattttacgtattcattaattaattaataggattattttttcaccaacgatgtattcagtgat

SEQ ID NO: 5541 - DNA, 529 bp, Diabrotica virgifera
aattaccgtgagttaggcccggtactttatgtctcgattaaacctcggttagctaaccggggtttaaccgggacctcttagggtcccttgcgttgtaataaattcaattacaagtattattataactataggtaagtataataatagttgtaattgcatttattacaacgcaggagaccctctagagcagaggttaccaatcagtgtgccgcggcacactggtgcgccctgaaatccctgtaggtgtgccgcgaaattcacataacaatacatatttgattatactcactatcattatagagattatttacccaagtgtgctgtggctgaaccagtttttaagttagtgtgcctcaagctaaagaacgttggaaacgctgagttagaggatacctcaataaaggtgacacgatgccaacctgcgccttcctaccgtggtggtggatgccaccccttctcgggggtgaaattttttttaataataccataaatcgatagagagacaaattctaagcaaaatttgttacat

SEQ ID NO: 5542 - DNA, 570 bp, Diabrotica virgifera
  SmartBlast Evalue=8E-39; Info="DNA-directed RNA polymerases I, II, and III 17.1 kDa polypeptide, putative n=1 Tax=Pediculus humanus corporis RepID=E0VGE5_PEDHC"
ccattgtgttgggaacttccccagttttccatgtggacggtggattcgatctgaattcgaaagccgttcttctgttcgcgtcagctgaacttgtttctggtaaacaatcaatctcttatttaatattttgtttatgtgtcatgtctattatcggtttgtttatggatcggcgatggcggacagtggaaggggtcgtgacggtggtggttgaagggtgtgttcgccaggtgataaatttcgtctggttcttgccaccacattgagagaagatggttacgctgatgctggagactggaatccccaagggctggagaacgaaggttctagagccgacagcttcgaatacgtgatggcaggaaaggtgtacaggatagaaggagacgaagccgctaacgaaccttccagcagattggctgcgtacgtgtcgtttggagggttgttgatgcggctacagggtgatgccaataacttacacagtttcgaagtggaccagcatatgtatttgttaatgaagaaaattttcatgtaattttgtacctaagtttaaatataagattttaataaataagt

SEQ ID NO: 5543 - DNA, 563 bp, Diabrotica virgifera
  SmartBlast Evalue=1E-55; Info="DNA-directed RNA polymerases I, II, and III 17.1 kDa polypeptide, putative n=1 Tax=Pediculus humanus corporis RepID=E0VGE5_PEDHC"
ttttcgaaaataccgaacttttatattttcctgctgtttttcttctgattttcgcggtcgttttcttcttcgtaaaaatgccggagatcgcaaatcgttgtggtttatttgtggcttcgtccgtgaacttgagaagtgagccgattacattgcgagagcgagtcgttcaaaatggacctcattctggacatcaactcctggttatatcccatggaattgggtgataaatttcgtctggttcttgccaccacattgagagaagatggttacgctgatgctggagactggaatccccaagggctggagaacgaaggttctagagccgacagcttcgaatacgtgatggcaggaaaggtgtacaggatagaaggagacgaagccgctaacgaaccttccagcagattggctgcgtacgtgtcgtttggagggttgttgatgcggctacagggtgatgccaataacttacacagtttcgaagtggaccagcatatgtatttgttaatgaagaaaattttcatgtaattttgtacctaagtttaaatataagattttaataaataagt

SEQ ID NO: 5544 - DNA, 617 bp, Diabrotica virgifera
aagtaatttaacaaactttgtttggaggcctattagttaagctttaaaatggagatcttctaggactcatttgcattcgtcgaagccgagttgcgatcgatggggcttcgaaaaataattattttgcaatttgtattgttcactaattttacaatatcttgagttctaattgttggatttaagtttagtaaacgtttttttcttcgtttttattaagaacaaattttatttgaaacatttcttttatctcttttagtttatgagccagagccttataaacacttaatttgtttataacaattttttgaccactcggatcgaaatccaccctcgaaattcgtaatcagcagccaaaaatccataagaaaccgttgagtttgtccatcagaattgaaaaggacacggtggattctggatttacaattgactagtgtaaatttcgtgacggcgtcgcgatgtttcatatttcattcatttgttcgactgcaccgaactgagatctctgatttgcaaataaccagtgtaaatttcaatataacctcgcgatgatttaaaattaattaatttgttcgactgtaacccttaccgctggctatcgcacaattgatgcaattcga

SEQ ID NO: 5545 - DNA, 497 bp, Diabrotica virgifera
aagtaatttaacaaactttgtttggaggcctattagttaagctttaaaatggagatcttctaggactcatttgcattcgtcgaagccgagttgcgatcgatggggcttcgaaaaataattattttgcaatttgtattgttcactaattttacaatatcttgagttctaattgttggatttaagtttagtaaacgtttttttcttcgtttttattaagaacaaattttatttgaaaaaattttgtatctcttttggcttgcgagctggagttttataaacacttaaattatttataacaattttttgaccactcggatcgaaaaaatccaccctcgaaattcgtaatcagcagccaaaaatcagtgacctctggccacagtgacctctatttggcgcctacataaatcactcgcggttcttgatatcgattgcctagaagcgatacctcgtaagtgccaagaattcaaatcacgcttttggcgccgcagtactgatgt

SEQ ID NO: 5546 - DNA, 562 bp, Diabrotica virgifera
tggcgttgatttataggggataagtttgtgtttttatgaattttttccagagtaaatattaaatataagtgccagtttaatacatgtggatgcttttgatcttaaacatatagtttccaccaacgatacaccagagcccgtggataatttggacggtgaaactacaactacagacgaaccaatggctaaaacgaggcgcaaaaataaaaagaacccacaagacagtgaggttgacaaaagtgataatactacaaatgataaactaattgatacttcacaagaggaaacagcagtagaggaaacaactgtggaaaaggataacaaggataaagaagatcctccaacacctccagaagaaacagaaaccgaagaggccacagtggaaaaagattctctgacaactcaagaggaaatagcagctgaagagacaacagtggaaaatgataacaaaaataaagaagatcctctgccaactccagaagaaacagcaatagaagcggcaacagtggaaaagataaaaacagagacgattctctgtcaactcaagaggaaatagcagcag

SEQ ID NO: 5547 - DNA, 566 bp, Diabrotica virgifera
tgcctaacaatgttgcgaatggattagattcgagtgttgaatcggagtattggactgagaaaactattttactagatgatagccacaatgcagatgaccaaaatgcatctaatggaatttccaccaacgatacaccagagcccgtggataatttggacggtgaaactacaactacagacgaaccaatggctaaaacgaggcgcaaaaataaaaagaacccacaagacagtgaggttgacaaaagtgataatactacaaatgataaactaattgatacttcacaagaggaaacagcagtagaggaaacaactgtggaaaaggataacaaggataaagaagatcctccaacacctccagaagaaacagaaaccgaagaggccacagtggaaaaagattctctgacaactcaagaggaaatagcagctgaagagacaacagtggaaaatgataacaaaaataaagaagatcctctgccaactccagaagaaacagcaatagaagcggcaacagtggaaaagataaaaacagagacgattctctgtcaactcaagaggaaatagcagcag

SEQ ID NO: 5548 - DNA, 627 bp, Diabrotica virgifera
catgaatcgaatgaaacaccaagttttattgagcgtatccaactgcaaaatttggtacgtttattgcttcattgattcgcctaatagcttgaatttgtgacgttcttaatacagtttcgaatgacaaatgacaggcttacaatgtattcggaaggaaaatattcgtaagtatctttaaaatgcattaaatgatttccgagattctacacaaattttttgatgtatttgaatttgtctgaaatgctgaatttttcctctaatggaacccgtggatatagaaatcgatgcagaattctacggattcataaatctcagcagagcaatttacttaaccatatattttagtatagacacccatcatagttatatacagtggtgactgccctaatatccggcaaaataaccgaaaaaaaaaaacggaaaaataatacgttgtgaaatagaggtaggtgactagtataggtggtaaattatcaatagaaacctataaattggcattatattgatagtttcccatctttagacgtatctgagtcaaattgtcataggaaaattttataaaattcccctgtcatagtggcagttgccaactcctccgatacgtcctaaaggtgtgaaactgtcaat

SEQ ID NO: 5549 - DNA, 486 bp, Diabrotica virgifera
aatgtaattagatattacgtcattactttttaacaatactacagcggaaaaaggcaaaacgttaattttgtaacttatgatataatccaccatattgctaaatttctctgtttatagtgatgtcatgtattatatgttattgtcacttttaatccaccctttgaaattgaaaaagtaaaaatcttgaaagtgcaactccaaaagatacaataattagaagtatgtatgtgactgactatacagtgatgagtgagctaataaccagcaaaatgacggaaaagataatatgttgtgaaataaaaagagaataaactagcagaggtgagaaattatcaacaaaaacctataaatctacattatattgatagtttcccgcctttagacgtaccagagtcaaactgtcactgtcaaattttataaaattcccctgtcatagtggcagttgccaactcctccgatacgtcctaaaggtgtgaaactgtcaat

SEQ ID NO: 5550 - DNA, 811 bp, Diabrotica virgifera
ttcccttgtaacatatttattacgtgtttaaaaattttccaaaaattatttattgttaaaaagacagccttttatcgaatgttaaattgttctaccgatatttttgaaaataaaagtaataacttgagttaaatatgggtgggcataaaaagtacacccttggtaaaacttgttactaaaggtttctatataatttctcgttggtaggaacataatccatataattatcgacgtataattacataatcgacataattatccgccaatgaggaggctgaaaggaagaatgtggagaaaatcgacaaatttgaattactggcttttactggtatgttaattttgatgtacattgtaattttgttgtaaggtttgtaaattgtttatattaatattttagaagatgctgtgtttattaagcataagattcttaagtttaatccattttcaacaactctcaataaatatattagctattttcgaggtgggcattttatacccacccttgggcgtacatgggacctaaaaaaggttgggcgtttaagggttaagccttgaaaatggcaattttcgcatttttcaaatttttaatggcatataacgcgacaacaatcaattttagagaaaaatgacttgataccctttttgctcaaaatgaagtaacttatctaaaaaattattgttcgaaatgaaaaaataatttttgtgaatttgtttaaaaaaaattgtttaaacaatttttcgaccacggcaccgcccagcacccagtggatatgttatcaagaacctccttttgagcaagtttgtgcaaaaa

SEQ ID NO: 5551 - DNA, 309 bp, Diabrotica virgifera
ctcttcgggaccttgaagaaggggtttgaaacttgatttggtcacttattgaaattcataataataatttttaatcgagttattaagccttgaaaatagacattttcgcaattttagagaaaaatgacaagaaaccttttttgctcagaattacccaaattatctaaaaaattattgttcgaaatgaaaaaataatttttgtgaatttgtttaaaaaaaattgtttaaacaatttttcgaccacggcaccgcccagcacccagtggatatgttatcaagaacctccttttgagcaagtttgtgcaaaaa

SEQ ID NO: 5552 - DNA, 593 bp, Diabrotica virgifera
  SmartBlast Evalue=2E-45; Info=Protein bric-a-brac 1 n=1 Tax= Harpegnathos saltator RepID=E2BJ91_9HYME
tgcgcagcagcgactgaagttccgcatgagatacgtcgatttcccccttgtagacgaactcgatgatgaatttcagatcttcgtaaccgacatcctgaggcattatgatcgtcgggtgcttgcaggggttttctaaaagcagcttttggaaatacgacgagcacgccgatagcactaccttgtgagcttttaacgaaaggtcattacaggccagagtaacgtcaacgaaatcttcattctgtaagagttgatgaaataccgacgtcatattactctggtaattgttccaacgtaagcaataatgctgatcgtccattgtttcacttcctgtcagccaatgtcctgatatcattgttttgatagccaattcagatgttcaaaactgtttagccgtgaaaacttgtagtcacaagtgtacatgcaaaacaaacacgattaaaatcgcgggtaaaggaataaaatcaagaccacagtggaaaacggactgtacgattagaagagacaggctcactattttgttgtggatcaaattcgtttctctcttctcatctctacgctctctctttcaagttttcaccatcctctctctcttc

SEQ ID NO: 5553 - DNA, 532 bp, Diabrotica virgifera
  SmartBlast Evalue=1E-45; Info=Protein bric-a-brac 1 n=1 Tax= Harpegnathos saltator RepID=E2BJ91_9HYME
tgcgcagcagcgactgaagttccgcatgagatacgtcgatttcccccttgtagacgaactcgatgatgaatttcagatcttcgtaaccgacatcctgaggcattatgatcgtcgggtgcttgcaggggttttctaaaagcagcttttggaaatacgacgagcacgccgatagcactaccttgtgagcttttaacgaaaggtcattacaggccagagtaacgtcaacgaaatcttcattctgtaagagttgatgaaataccgacgtcatattactctggtaattgttccaacgtaagcaataatgctgatcgtccattgtttctgtttagccgtgaaaacttgtagtcacaagtgtacatgcaaaacaaacacgattaaaatcgcgggtaaaggaataaaatcaagaccacagtggaaaacggactgtacgattagaagagacaggctcactattttgttgtggatcaaattcgtttctctcttctcatctctacgctctctctttcaagttttcaccatcctctctctcttc

SEQ ID NO: 5554 - DNA, 595 bp, Diabrotica virgifera
aattgtcctaccttgttttattcaatacttaacctactaataacagccaaaatcaaaaaacaattattttaaaacagtttcacaagacacaagagaagcaactgataaaattttgtaggtccggctataagactctgtgcctatccgtccgttcaaaatcgtagaatagggtcgctagtaaacagagagagatcgcacgtcagttcggtgttggcgtcgttctatttcaggctacgttttcaagtgcctgaccaaggaagaatatagaatcttatacagtactactgatactacaaggagcgtacaataattataactacggagaaaattttttggatattttaaaaataatttggataatttttgctattttattgtaggtattgtgtcaaaatttataaattacaattttgaaataagtaatttatattaataatttatattattgtactacatttgaagagggtaggcggcgcctaccttgcctaccccgacgggtcgcccctgcgttgtctggtggttatcaaggactacatgataaagccgatattaaaaacataaatcacaactacaaacatattattatatgctctgt

SEQ ID NO: 5555 - DNA, 522 bp, Diabrotica virgifera
ctgataaaattttgtaggtccggctataagactctgtgcctatccgccctctcaaaatcgtagaatacggtcgctaccagcagacctgcagcaggcctgctcgcgtaaacagagagagatcgcacgtcaattcggtgttggcgtcgttctatttcaggctacgttttcaagtgcctgaccaaggaagaatatagaatcttatacagtactactgatactacaaggagcgtacaataattataactacggagaaaattttttggatattttaaaaataatttggataatttttgctattttattgtaggtattgtgtcaaaatttataaattacaattttgaaataagtaatttatattaataatttatattattgtactacatttgaagagggtaggcggcgcctaccttgcctaccccgacgggtcgcccctgcgttgtctggtggttatcaaggactacatgataaagccgatattaaaaacataaatcacaactacaaacatattattatatgctctgt

SEQ ID NO: 5556 - DNA, 666 bp, Diabrotica virgifera
  SmartBlast Evalue=3E-10; Info=Reverse transcriptase (Fragment) n=1 Tax=Chelonia mydas RepID=Q68VM4_CHEMY
tgagggtgcattggttggtctggtcgttggtgtagattgtagatgttaaatagggatggcgctagaacgcttccttgaagtaggccatttttttgggtctccatctgctcttctttccatttagcacaacgtagaagcgtctattacacaacagtgatctaatgatatttaccaggtcatagtcaagcacagtgttatagatcttagttagcaaggttctgtggtttatcgtatcataggccgctgtgaggtctatcaaggctactcccactatctctttctgttcaaatcccccctctatgtactctgttaggttcagcacttggcctgtgcatgatttacctggtctgaagcctgtttgttgtgggattagttttgcatctaatttttcctggatgtggttcaaaatgttcatacaatttatacaaatggcatggcagagatatcggacggtagctaccgggtataaattgtaacaagctcagacaatagattgttaccaagaattctgcattccgactaaaagagaattttctagtttcccttttgtttgaatagatgtcgctaatgcgtccagcagcaaataattgtttattattttgcttagtagacagccagatttaattcgcttcagggtacaccacaggtagttctgatgactctaaa

SEQ ID NO: 5557 - DNA, 443 bp, Diabrotica virgifera
ggaggagtgcttcctcccctcctgtagtcactcctggtggatgacctgatctcgctccttgacgcagaggagcagaagtgcaggcttggataatgtagtagttatggtaatcggaaatacttactcacatttgagtactaaggaagcagaaatctgttaaatttttatataaataagcagacaggtgatgaatgcaaattatagattctcccatgtccactatttatcggtctatttgctttataaattgtaacaagctcagacaatagattgttaccaagaattctgcattccgactaaaagagaattttctagtttcccttttgtttgaatagatgtcgctaatgcgtccagcagcaaataattgtttattattttgcttagtagacagccagatttaattcgcttcagggtacaccacaggtagttctgatgactctaaa

SEQ ID NO: 5558 - DNA, 579 bp, Diabrotica virgifera
  SmartBlast Evalue=6E-10; Info=Endonuclease-reverse transcriptase n=1 Tax=Bombyx mori RepID=D7F171_BOMMO
ctacttattaacttttgctctcagaacgaatttcgaataaacaatacgttcttcagacacaaagatcaacaaaaatatacattcaaaaatacaagagcacacagatccgatattgattatatattgacaaacagaaacatccatcattctcaagtactagacataagatgtttaagtgcagctaatattggaagcgatcacaacctagtacttggaaaaatcagaatagagctacaaagaaacaggaaagaaaaccctgttgaatgtgagacaagaataaaggtagaacagctacgagacttgtcaacacgagatctataccagagaagactgcaaaaagtactgaacgaaaactacataacaccagatgaagacatagaagaaagttggaggaagattagagataatatcaaaatggcagcaacgtacgcacttggagaacttaagataagtaaacatatacgaaagaaaaggagaacaccccatggatctgtgaagaaataaaaataaatgccaagaaaaaaagaaaatctagctagaatacaaattcaaaagaacgagacaaacatgtgaagaata

SEQ ID NO: 5559 - DNA, 523 bp, Diabrotica virgifera
tgtggaatattctagcatgtgtaaaatgctgaaattggaacccaactgtggcctctggttttcttgacactctgtttttttatttattcgtttatgtttgataataatacgatgtttaagtgcagctaatattggaagcgatcacaacctagtacttggaaaaatcagaatagagctacaaagaaacaggaaagaaaaccctgttgaatgtgagacaagaataaaggtagaacagctacgagacttgtcaacacgagatctataccagagaagactgcaaaaagtactgaacgaaaactacataacaccagatgaagacatagaagaaagttggaggaagattagagataatatcaaaatggcagcaacgtacgcacttggagaacttaagataagtaaacatatacgaaagaaaaggagaacaccccatggatctgtgaagaaataaaaataaatgccaagaaaaaaagaaaatctagctagaatacaaattcaaaagaacgagacaaacatgtgaagaata

SEQ ID NO: 5560 - DNA, 713 bp, Diabrotica virgifera
cacacattcaagatgaaatctgtctatttctgtctttttgttattttattagctacctatatctcagctgcggtacacaaccttgctctaaatctaaatgatgtgagatcaggaacaccggagagtgtatttggatgctcaccagcgttaacaccttgtgatcctaccaactgtacgaagtgctgcgataccatcccgataaatagtcatgctaaggtagtactagttggtaaatgtgatgacaacggagaaggtggatcgcaatgtaattgtcgccctcaatggtaggggagtccaatcggggatttttgcagttactcgagcgcgtcagattattatatggggagaaaccttgtaccctgtaaatgtacccctaccatatatggactcttaatacaggggaattcgttaagggggtcctaaaaaatctaaccttagaaaaattcgaagtcgtagattaaggtagggtaagtacatgcagaacagtctatgaatatttaaaaaatctgacgatttgagcggggcgtaagggaatgggcgtgtcacaaattttcacaaaacaaagcgattatttcgcaaaatgaacgtcagctcaaaaaactaaacaatacatgttcaatatttttgaaaaatttatcgaatgataccaaacacgacgcaccacagtgagaggtaggggtaactttaaaattttaaataggaaccctgcgata

SEQ ID NO: 5561 - DNA, 402 bp, Diabrotica virgifera
cacacattcaagatgaaatctgtctatttctgtctttttgttattttattagctacctatatctcagctgatgagcagaaacaaaatgctatgagtatggggaaaaagagatttttcttccgtggtgtgacggattgcttaacagcgattgtaccttgtgacagtatcaagtgtgccgaatgctgcactggtggtatatgtaaagttcaagcaccaggtgtacccgctatatgtcaatgtccaccactctaatctgtgccatgaaaaactactacaacattttatgataaacattttaagacatcctgaacatataaggacatataagaacatattaaggtacatataaggaacatataagaacatataaaagtatatatttaaataaatgaagtgatttaa

SEQ ID NO: 5562 - DNA, 556 bp, Diabrotica virgifera
  SmartBlast Evalue=3E-16; Info=Endonuclease-reverse transcriptase n=1 Tax=Bombyx mori RepID=D7F165_BOMMO
ctaatgatttctcagtaatttgctttatgacgaatattgcatctgtacacgataaccctgttgttcatctgctaaatttatcctccgattcagtagtttttgtagaattttactagtaagttttagggtagtatttgacaagttgatacctctgtagttttctggctgctttttatctccttttttaaatagtagaattagttcgctcgttctccattcttccggtattttattgtgttttatgattttgttaattaatgttgttaattgttctgtcattgctgctccacaatatttcagtaattcgtttggtattccatccttacctgcagcttttctgttcttcagcttttcgagtgtttttcgtacttcctgtgcacttatattaacatcttcatttgtggtaatttctggtgtttccggttctagcatcatttgttcttcctctgcatagagcttttttagatagtcaatccatgtatccttttctatgtgttttggttctattagttcctttacctccgttctttgacctcttataaagcgccacatttcc

SEQ ID NO: 5563 - DNA, 554 bp, Diabrotica virgifera
ctaatgatttctcagtaatttgctttatgacgaatattgcatctgtacacgataaccctgttgttcatctgctaaatttatcctccgattcagtagtttttgtagaattttactagtaagttttagggtagtatttgacaagttgatacctctgtagttttctggctgctttttatctccttttttaaatagtagaattagttcgctcgttctccattcttccggtattttattgtgttttatgattttattaattaatgttgctaataaattaaccactatgtcataatatttttgttatttagaagcaccaaatgttatatcgcagcctgacggcatttgacaaattcatttcaagtgaaaggaaggcactgagtgaaccatttaataacttttaattatgtacatccaattcgaaatgcctatttcagtttatgtattcaacaggtgtgcctcacttcattacgataatgccttttcatcggctcaaacaaattttacgattagttatttatagaataaaatagtgagcattctgtgaaatatgtgtatat

SEQ ID NO: 5564 - DNA, 607 bp, Diabrotica virgifera
tgcctcttggactattcgtgcatcacaccacaaccgataatataataatatgcttctttattttagagtggacaagtcatctcttgaaagctaaaattgaggggggaaatagaaattatgacactgtgacgaaacttttgaaagttatcttacgactttctccaaatcgtgaagtgtttacgttcatgtgtaaaattctcaagaagaaaaatctattttggccaacaatataaatattaaaacatatcttatgataaaattgagtatgaaattctgttactccttacaatcaaataaagcctttaaaataaagcctacttagtctattcaccatgttccttaaatgaatctcttatataaataactatctaatttttgtatgtgtttcaatgtttgctaaattatgcatggcttatagatctaaaaatagaactacttctattacacaatagtagcagtacaagatccgatacacaatgtatagaaatagtttacctgacaaatatactatattttattacttaaatattatatagtatcacatatattaatcatctgatagctaaatattgataatttcctaaagaaatcaaatattgtagataac

SEQ ID NO: 5565 - DNA, 510 bp, Diabrotica virgifera
ctccgagcttctcattcgaagaagtccagaaatcttatgcacgaatatgccattctagacggagaggcagcgctgaaaaaatctctttgaattcaccaaagccagacccttcacagctgaccactgtgagtgtgtagagaaacacactgcggtcggtcaagcgaaacgcagaacaggggttactccttacaatcaaataaagcctttaaaataaagcctacttagtctattcaccatgttccttaaatgaatctcttatataaataactatctaatttttgtatgtgtttcaatgtttgctaaattatgcatggcttatagatctaaaaatagaactacttctattacacaatagtagcagtacaagatccgatacacaatgtatagaaatagtttacctgacaaatatactatattttattacttaaatattatatagtatcacatatattaatcatctgatagctaaatattgataatttcctaaagaaatcaaatattgtagataac

SEQ ID NO: 5566 - DNA, 896 bp, Diabrotica virgifera
  SmartBlast Evalue=2E-74; Info="Neuronal PAS domain-containing protein, putative n=1 Tax=Pediculus humanus corporis RepID= E0VVP1_PEDHC"
tatcacgagaccttgagtttgtgtttggcttcttcacaaatctttttggaattttggacacgacccattatgcatttcttttatacaggcttggcccgtgcgatctgcaagacccggtttggggtaagatgagcgccttgacagcaggtgtcaataagaaaaggaaaaaatcggagacaaaacctcaagcgcaaataaataagtgcaataatgagaagcgtcgccgagaacaagaaaacatctacatagaggaattggctgagctgatttcggcaaatttcggggacatgagctcgttgtcggtgaagccggataagtgcgccattcttcaagaagctgtcaaccaaattagaagtataaagcagcaggagagtgctacccaatcttcggatcccgtccaacaaggagaggtttcgtcttccaggccgacgatactctccaacgacgtttacggtcctttactactggaggctttggaagggttcctgtttgtcattaatagtgaaggcaaggttgaacatgtaaccgagaacgtctccaattacataaaatttacaaaagacgacgtattgggcagcagcatttataatttcattcatcatggggaccacgctaaattccattcgagccttctgcccatgaccattgaatggggcaatgaacagcaagtaaacagcaaatcaaaatctatagatataaggcttctggtgaagcctcccgatgacctagataaaaccatagaggaaaagcaacaaagagtcagtagttacgagttgatgcatatatctagtaccaattaaagatcacttatcggtatcagaagaggacggaagtgatagtggtccgtgtttgttgtgtgtcgcgtctaggatttctcatagggacaaggctacttg

SEQ ID NO: 5567 - DNA, 217 bp, Diabrotica virgifera
tatcacgagaccttgagtttgtgtttggcttcttcacaaatctttttggaattttggacacgacccattatgcatttcttttatacagccagaggccaaaatccatatcaaattgaaccaatcgtcaacaatattgcaagggacataaatgttttgaaatgttcaataactttaataatcagtcatctaaatattagcaaaaacattttatgattaa

SEQ ID NO: 5568 - DNA, 562 bp, Diabrotica virgifera
ttttaacgagtatacgataacattcaatgatgggcgataataataatggttccaatggttatcccttttatcccacttatctcactatcccaccaataaacaccgatgatgatcctattgatataggtaaaattttaataccaaccttcgttctaatagggttggtagtggccactcaagtgttttttatattccttaacacccacatagctaaagcttttagaaaggaagtcattagaagaggacgactaatatcagttttaccaataatttcgacaattggtgcaacgatgcccgttcatgtaaacgtccaacaaactgtaaatgttccaaatgctccacaacaaaatacttacccaccgaatgctatacagctcctgatggctccagaatgttcgatgataaagtagcaccaccagcatacgtaccgtaacaaaaataaattgaggtttaattattaaaaagataaataaataaatacgtttatcctaaactatttatcaatatgatttcttacaatttttagagaaaataaaatattttttgtcttttttattacttc

SEQ ID NO: 5569 - DNA, 546 bp, Diabrotica virgifera
attttcaagggtttggttttggttacaagcatacgctaacatctaatgatgagcgataaccctgataattataatggccgtatcccatttcccaaagataattcacaggataaaattttaacaacaatcttcgttctagtggggttggtagtagccacacaagtgttttatatattttttatcacccacacagctaaagcttttagaaaggaagtcattagaagaggacgactaatatcagttttaccaataatttcgacaattggtgcaacgatgcccgttcatgtaaacgtccaacaaactgtaaatgttccaaatgctccacaacaaaatacttacccaccgaatgcttatacagctcctgatggttccagaatgttcgatgataaagtagcaccaccagcatacgtaccgtaacaaaaataaattgaggtttaattattaaaaagataaataaataaatacgtttatcctaaactatttatcaatatgatttcttacaatttttagagaaaataaaatattttttgtcttttttattacttc

SEQ ID NO: 5570 - DNA, 616 bp, Diabrotica virgifera
ggtagacctagaaatagtactatcgggggatggcaggagacagattaatcaaaacgaaaccgtatatttttctattgaattcaaaaaacgatttttcatttgaaatatatcagtggcgtaccacttttatctttaaaaaatttcagaccacacgcgtaggcgcgccaacggtgaatataaaattctcacttgtatgtcaaaaattgcgcaataactacggcttaaaacccgccaaacttcattggcacatccccacccggttttaaagcaataaaataaatcgtcagcttgtaagaaaaattttaacaccccgtatcttggaaacaaatgaaaatcgaacaacaacatatgagttatttttaattgttattattacgtatattatacagtcttcaagcttggtgcgttcctcatcactcaccctgtatataacaaaagtatttcagctctcaaagcaacccagtatttataacaaacagtattgacactttccataccagttctgcatactttcaatcttgaagatttgactatcaactcaggtgcgtagtagcacaattgctgctggtttaaccttgtacattcgttttaatatgctgcctcttgaagctgttgg

SEQ ID NO: 5571 - DNA, 483 bp, Diabrotica virgifera
gcgaatgagttaattcaagtcgatttttcgttttaaaatctaacagatgaagaaattatcattaaaaatttaacatatatgaataaactataaattcacttaaactctaccttggttatgatcgtaaaaaaatttaatttatattacaactaaattaggtaccgaaattatcatatcgtaaacaatatcttcaaaagaacatacagggtgagccaacaataccataaaataacttccatatccacagataagcatcccagtatacagggtgagcggggagaaacgcaccctgtatataacaaaagtatttcagctctcaaagcaacccagtatttataacaaacagtattgacactttccataccagttctgcatactttcaatcttgaagatttgactatcaactcaggtgcgtagtagcacaattgctgctggtttaaccttgtacattcgttttaatatgctgcctcttgaagctgttgg

SEQ ID NO: 5572 - DNA, 651 bp, Diabrotica virgifera
  SmartBlast Evalue=5E-27; Info=Endonuclease-reverse transcriptase n=1 Tax=Bombyx mori RepID=D5LB38_BOMMO
gcaatagcaagatctggcttcatgaacatgcgtaaaatgctctgtaaccccaagctatcagtcacaataagattgagaacactaaagtgttatgtgtggtttctattactgtatgactgtgagacctggacattaaaacagtatgacgtcaacaaactgaattcatttgaaatgtggatgtaccgccgaatgttaagaataagctgaactagcagaactacgaatgaagaagtgctgggctggaaataatgaacacacgtcctcatctggtcaatacaatcaaaattagaaagacgtcatatctaggacacataatgcgccatagggaatttgagcagctccaggtaatattagaaggcaaaatcgaaggtaaaagggtataggaagaaagaaaaaatcttggctccgaaacatcagagattggacccacacaacagggaatgacttaattcatcaagcccagaacagagagaaatttgccatattgatcgccaacctcaatagagaaggcacttaggaggaggaggacaacgcaagagaccctaagaggtagttttctgtcccgattaaaccccgattagctaaccaggacataaaatacctggtcttaaggctcaaagatagatagagagtagcttgtgaagtggttac

SEQ ID NO: 5573 - DNA, 453 bp, Diabrotica virgifera
  SmartBlast Evalue=3E-30; Info=Endonuclease-reverse transcriptase n=1 Tax=Bombyx mori RepID=D5LB38_BOMMO
gcaatagcaagatctggcttcatgaacatgcgtaaaatgctctgtaaccccaagctatcagtcacaataagattgagaacactaaagtgttatgtgtggtttctattactgtatgactgtgagacctggacattaaaacagtatgacgtcaacaaactgaattcatttgaaatgtggatgtaccgccgaatgttaagaataagctgaactagcagaactacgaatgaagaagtactggaaataatgaacacacgtcctcatctggccaatacaataaaaattataaatacgtcatatctaggatacataatgcgaatgcgccatagggaatttgagcagcttcaggtaatattagaaggcaaaatcgaaggtaaaaggggtaataagaaaaaacaaaaatcctggctctgaaacatcagagattggagccacacaacaggaaatgacttaatt

SEQ ID NO: 5574 - DNA, 637 bp, Diabrotica virgifera
aggtgtgggtagagggcaccatgtaaagcaaaaaactcttaaaacatttttttctaaatgcaatcgtttgaccaaaaaattaaaatacattttgctatgcaaattaaaatctggcaactctgcgaggtacgaaaatttaaacgtagacttctttttagtaaacatacaacagatagtttggaagaatcttgtttagtctcaatgccgaaaatattttcgaatcgtgagttcattaccattaccatgttattgttgattagttatggcagatcactaaatggagaggcttaggtactataatttttcaaaaatttttgccgttttttctcgtcgttatgagtgaatgtgttcgcgaaagtgtaaagccggactcaaacgactcgtgtacttggcgaataatcgtcacttgcgtatactggcaatgctgtgtgagtgggttactagtacaatcattgtactatttgtcaaacactaataataataatggtaatactactattaattgtcaaagaattgttctagtaacgctcccaaaagatatagtaagtaacgcaattaacgattgttcgttaagtacacgagtcgtttgagtccgccttaataattattttcaacttaattatgttagttcacaagt

SEQ ID NO: 5575 - DNA, 474 bp, Diabrotica virgifera
aggtgtgggtagagggcaccatgtaaagcaaaaaactcttaaaacatttttttctaaatgcaatcgtttgaccaaaaaattaaaatacattttgctatgcaaattaaaatctggcaactctgcgaggtacgaaaatttaaacgtagacttctttttagtaaacatacaacagatagtttggaagaatcttgtttagtctcaatgccgaaaatattttcgaatcgtgagttcattaccattaccatgttattgttgattagttatggcagatcactaaatggagaggcttaggtactataatttttcaaaaatttttgccgttttttctcgtcgttatgagtcgtttgagtccgccttaataattattttcaacttaattatgttagttcacaagtaaacaaattactgacacattatcaatctggtgtatttaatttccactgtgaactatgtaatttagtcaaagtcctcagc

SEQ ID NO: 5576 - DNA, 605 bp, Diabrotica virgifera
  SmartBlast Evalue=6E-31; Info=Endonuclease-reverse transcriptase n=1 Tax=Bombyx mori RepID=D7F170_BOMMO
ttaacaagcatctataacctaatagttagaatatggggagcagaagaaatgcccgaggattggaaagaaggcagaattataccaatatttaagaaaggagaagtaacaaactgtaacaattatagagcaatatctctactgagtacaacatataaaattctaacagccctcatcaaacaaaaactcaatcaattcacagagagaaaaattgggaactaccagcaaggattcagagaaggcagatccactacagatgcgatccacatagttacacaaacaatcgaaaaatgccacgaacacaacgtagaactctacatcctcttcgtagacttcagacaagcctttgactgtattggaataaataatttatttattgaaatgaaaaatatatataaagatataccaccaaagttaatcagattaacaaaaatgactatggatggatctcgagttaaagtaacaacagagaaggtagcacaaaagcaattgcaatagaaacaaaagtgcgacaaggcgattccctgtcaaccacattattcaccagaaggaacagtcaaggccagctaaattaaaggaactatagcctatagcccactcctcaacac

SEQ ID NO: 5577 - DNA, 490 bp, Diabrotica virgifera
  SmartBlast Evalue=1E-32; Info="LINE-1 retrotransposon-like element, putative (Fragment) n=1 Tax=Aspergillus flavus NRRL3357 RepID=B8NZ53_ASPFN"
ttaacaagcatctataacctaatagttagaatatggggagcagaagaaatgcccgaggattggaaagaaggcagaattataccaatatttaagaaaggagaagtaacaaactgtaacaattatagagcaatatctctactgagtacaacatataaaattctaacagccctcatcaaacaaaaactcaatcaattcacagagagaaaaattgggaactaccagcaaggattcagagaaggcagatccactacagatgcgatccacatagttacacaaacaatcgaaaaatgccacgaacacaacgtagaactctacatcctcttcgtagacttcagacaagcctttgactgtattggaataaataatttatttattgaaatgaaaaatcaagatataccagcaaatttaatcagattaacaaaaatgaccatggatggagctcgagccaaagtaacaacagaagaaggtagcacaaaatcaattgcaatag

SEQ ID NO: 5578 - DNA, 562 bp, Diabrotica virgifera
gtaataatattgttgctaaacgggtaaatttttattgtataccgggtgcacgaatcaaactgtgttttttctcaaaggtcgcatcaccctgtgaaatattctagcatttataaaattctgaaattgaaacccaattacagcttcgggttttcttaatattctgtttttgaagttatacttctttaggcgcgattgagagtaaaatttcataatactgcgcgcatgcgcacacagacagtatggcgtttagttgctaaatctttcaagttatgtataaatatatcagtgcaagaaaaggtgtgaaaagaatatattagtgtttttatttctagggtgttctatttgaaataagaaagttcaccagacctccagaaaaaccgaaaatctgacaacgtgattgccactataacatcggtcgcctcagaaaaccgtcacccaccaaaatccataaaaatcgttcaagccgtctccgagacaattaagagcctccacacacaaaactaactctgtatatatgtatttagttatgtgcatataaaataaaatgctgaatatataaata

SEQ ID NO: 5579 - DNA, 533 bp, Diabrotica virgifera
gtaataatattgttgctaaacgggtaaatttttattgtataccgggtgcacgaatcaaactgtgttttttctcaaaggtcgcatcaccctgtgaaatattctagcatttataaaattctgaaattgaaacccaattacagcttcgggttttcttaatattctgtttttgaagttatacttctttaggcgcgattgagagtaaaatttcataatactgcgcgcatgcgcacacagacagtatggcgtttagttgctaaatctttcaagttatgtataaatatatcagtgcaagaaaaggtgtgaaaagaatatattagtgtttttagtaaatatatttattataatttttgtgtatctggatttgtcttccttgggcgtaaaataataaaatatctatttttatatttcacttgtcaccgtgatgtgtgattatgtatatccgaaacatcaataacaggcgccttgatagcctggttggtagagcattggaccagagatcgaagagatcgcgagagcgcaggttcaaatcccgg

SEQ ID NO: 5580 - DNA, 638 bp, Diabrotica virgifera
  SmartBlast Evalue=1E-14; Info=Transposase n=1 Tax=Agrilus planipennis RepID=D2WLV0_AGRPL
cggcaagataattttttgatattcaaaacttcgttaaaactatgactagtactctctttactaatttttgtggcctctgccaattcacgcaccttcactttacgatcagctagaaccattttgtggactttcttcaccatattttctggtttaactgcattggtgggccgtccagtacgttgttcatgtagatatacggccactacgaaattcacggaaccaacatttgacagaattgcaaaggaataattttaatcgactatcttcaaaaaggtaaaattattaatagccaatattactctgcgttattggaaaaactgaaacaggaactcagtgatatgccagaagaaaaaagtattgtttctccaagataatgcaccaactagcaagagcgttatggtaatggaaaaatgcacgagttggacttcaaattactttctcatgcggcttattctcctgatttggtcccctccgattataatgtgttctcaaatctgatgagatggctcgtaaataaagaaatcagctcgaacgaagagataattgacgaaacaagcaccaattttgcagagcgtaaataatcgtattaggctgcacctacattggatccgtatttctccgatccgacgtcagccgac

SEQ ID NO: 5581 - DNA, 462 bp, Diabrotica virgifera
  SmartBlast Evalue=2E-13; Info=Histone-lysine N- methyltransferase SETMAR (Fragment) n=1 Tax=Camponotus floridanus RepID=E2ANT1_9HYME
agaaccagtctataccagaaaatgtgaagaaagtactcgaaatggttctagctgatcgtgaagtgaaggtgcgtgaattggcagagaccacaagaattttaaagagcgtactagtcatattttgaataaagatttatgaaaaaaatataatgccgatgggtaccgcgtttgctcactattgaccaaaaacattatcgtgtgatcacttctcagcagtacttggaacttatgaagcgtaatgagttaggcttcgaattgctttctcatccggcttattctcccgatttggtcccctgcgattattatgtgttcccaaatctgatgagatggctcgtaaataaagaaatcagctcgaacgaagagataattgacgaaacaagcaccaattttgcagagcgtaaataatcgtattaggctgcacctacattggatccgtatttctccgatccgacgtcagccgac

SEQ ID NO: 5582 - DNA, 639 bp, Diabrotica virgifera
  misc_feature (137)..(137): n is a, c, g, or t
caatcgaagcaaatgttttcagcctgaatgcatgagagtatatcaaacgccatgaaaccacttttattgcacgaaaatcatgattagcagttattaagattaaacatgcagggccgccgctaccatgtgtgctaagngtgcatcgcacacgggcggcaaacaataggggcggccaaaagcaggccactgataataatacttttttaaaacgaaaataaattgaaaaaattaaatagtaatgattcaaataattctgtaaactattattattattacctgataatactaaaatgagtttcatttatcatttgtagttcctttttcatcccaatctaaacaaaaatatcagaaaatattatttattgtatgtactgccgttttgcaagtatggtcataaagcagttccgggaatactttttcattcaaagcggctggcggctttcggacttttagatatttttctcgtccccgtgtgaaggcgggccgctcaagtagaatacctccacagcttctccagctcatcgtaaaagtcaacaaattggagcagctgtccgctctcgtctagccaaagtcataacctgtcccctgtgacatagctttaatactcccaactatcatacgacgcctacccctacccat

SEQ ID NO: 5583 - DNA, 433 bp, Diabrotica virgifera
  misc_feature (137)..(137): n is a, c, g, or t
caatcgaagcaaatgttttcagcctgaatgcatgagagtatatcaaacgccatgaaaccacttttattgcacgaaaatcatgattagcagttattaagattaaacatgcagggccgccgctaccatgtgtgctaagngtgcatcgcacacgggcggcaaacaataggggcggccaaaagcaggccactgataataatacttttttaaaacgaaaataaattgaaaaaattaaatagtaatgattatatttctataaactctaatattccaaacattctaaacaaaaatggcagaaaatgttatttattatatatgaactgcccttttgcagctgtagtcataaagtagttccgggaatcaggggtgtagtagagccagaacgcaccggaacgccgttccggtactccttttttttgttcctcataccccgcgg

SEQ ID NO: 5584 - DNA, 732 bp, Diabrotica virgifera
taaattgtacagcttatattcgtagatatattatataattcgtaaatttttttcgattatagcgccatctatcgacaactagaataaatgttataaatgtctctaatcacagacgtgcctttttttctgtcacatacaatttaatgcgttagaaagaaatcgaaaaactcttgacgcactgaaagatgctcatgagaaaaagaatatttacatgattaaaaaatttaacaaaaatttaatataattcgctgtaaaacgaaaccaaaagacgtcttatatttcagttcgttcagagagcgtcataaacgcccttaaatatgtttcactctcagagatcctcagagtgtgtatgactatctgtatacgtgtaaatataagaatttatttcaagaatatacacttacatttactaagtaaatacttacacttatattttactatcccttgagatacacctaatcaattaggttaaagctgtaagtaccgaataattatctgttgccggcgcaatcgtgcccatagattaaatacctctatcgaaaccggattattgtagttaccatcggcacaatcgtcccatactatttcactttaattaacgttagtaataaagtaaattttatgacatacctatctggaggtactctgaatcgattggcgtaataattttttaagggatgtttacaatctaagtggctcacactatatatatttaaaaaaacttgataggac

SEQ ID NO: 5585 - DNA, 368 bp, Diabrotica virgifera
taaattgtacagcttatattcgtagatatattatataattcgtaaatttttttcgattatagcgccatctatcgacaactagaataaatgttataaatgtctctaatcacagacgtgcctttttttctgtcacatacaatttaatgcgttagaaagaaatcgaaaaactcttgacgcactgaaagatgctcatgagaaaaagattacaagcatttttgataggcaatttaattgctggcaattctatttgtatccatttttgtcatgtatgttatgctttcgaaatattcagagtgaaaggttgaaaatcggatgtataccatagatttttcttttttccttaatttttcataattgtttcatggagc

SEQ ID NO: 5586 - DNA, 573 bp, Diabrotica virgifera
  SmartBlast Evalue=2E-61; Info=DNA-directed RNA polymerase II subunit RPB9 n=2 Tax=Aculeata RepID=E2B8V2_9HYME
atttagataaatacaaaaatggcaaaaccttctggatacgattctcacagtgaaggaccaggttttgtaggcataagattttgccaagaatggtaacaacgctaaataattttacattatactctgtgagaaattataacctctaaacttcctcaaacaaatattttgtttcagtaataatatgttatatccaaaggaggacaaagaaaacaaaatccttttatacgcctgtcgaaattgtgactacaagcaacacgcagattcaaaatgtatttatgtcaacaaaattatgcacgaaatcgatgaactgacccatatagtggcagatgtaatatctgatcccacattaccgagaacagaagaccatcagtgtccagaatgtaatcatagggaagccgtatttttccaagcacaaacaagaagagctgaagaagaaatgagactgtattatgtctgtacaaatccgcactgtgcccacagatggacagaatgaacaatttacgattacaggacacattcaatcttttaatattttttgtaactagatcttaaggaaatatagtttatttgcag

SEQ ID NO: 5587 - DNA, 526 bp, Diabrotica virgifera
  SmartBlast Evalue=8E-68; Info=DNA-directed RNA polymerase II subunit RPB9 n=2 Tax=Aculeata RepID=E2B8V2_9HYME
ctgggcttgcaattttcttcaaaataaaaatatttatttagataaatacaaaaatggcaaaaccttctggatacgattctcacagtgaaggaccaggttttgtaggcataagattttgccaagaatgtaataatatgttatatccaaaggaggacaaagaaaacaaaatccttttatacgcctgtcgaaattgtgactacaagcaacacgcagattcaaaatgtatttatgtcaacaaaattatgcacgaaatcgatgaactgacccatatagtggcagatgtaatatctgatcccacattaccgagaacagaagaccatcagtgtccagaatgtaatcatagggaagccgtatttttccaagcacaaacaagaagagctgaagaagaaatgagactgtattatgtctgtacaaatccgcactgtgcccacagatggacagaatgaacaatttacgattacaggacacattcaatcttttaatattttttgtaactagatcttaaggaaatatagtttatttgcag

SEQ ID NO: 5588 - DNA, 758 bp, Diabrotica virgifera
ttgcaaagggggctctctgggatgaacaatttgaataaaatttgaacaactgaatgaatcgctttgaaatttttgtcacatgttgagcgccggagagccctcatttgacaggaatttcaaagctctatatttgtttttacaatggttattgcgatattaatttttttgaaatttcgacatctttttgcaattgtattaacaatgaatgagtgtattaactttgcaatgcgccgttttgaagttttttccattctctcgaagatgtttgtactaagaaagccgttctactgttttccattaatttgcaaaaaaataacgttttttgacactgaattgtttgtaaataggaggtggccgccagatcctgcgcaggaaatggttacaatttgttcttacaggtgttacctgtcgaagggatgcttcagtaccctggctgttgaagtgtcatggaaaaaaccttattaccctggactattacacattatctggtactttattatatatctttatgtaattaattgtctgtgttatattagtcgtagtgttaaatataattgattataagaaacattttcaaaatgctataccataatgcttcgctaacattttataattaacttaaactagctgattttctatttcttatgatcaattattagataaagacattcagtttggcacgttggtttatttattatatagttttgacactctattttataagttataaattataataaaactaagttgcaaacctt

SEQ ID NO: 5589 - DNA, 330 bp, Diabrotica virgifera
ttgcaaagggggctctctgggatgaacaatttgaataaaatttgaacaactgaatgaatcgctttgaaatttttgtcacatgttgagcgccggagagccctcatttgacaggaatttcaaagctctatatttgtttttacaatggttattgcgatattaatttttttgaaatttcgacatctttttgcaattgtattagcaatggatgagtgtgttgagctttgcagtgcgccattttgaagttttttccattctctcgaggatgtttgtactaggagaaccgttctactgttttccattaatttgcaaaaaaataacgtttttgacact

SEQ ID NO: 5590 - DNA, 563 bp, Diabrotica virgifera
aatatgtactgcatcaggaagtaacggtgctgatttctcatatgtgtcccagatactgcagttttatgtgtttaatggtaaacacaatctccaattctttcttcattcctcctagaacctccttgttcgtgatccatttcatgccatcagtatttgtttatttaaacattgaccaaaaaaattaataaaaaccagcataaagcttaattcttctattatctttttgtatatcgggaagtttatctgacagattagaggttttttcattttcagataactaattattgggaagtttatataacagtatccttagtatctgtcttttcagctccggataactagttaacgggaagtttttctctgtcagatatctattagtatctaatctgtcagataaacttcctgataactagttatccagaggtgaaaagaaagaaagagagggccataatggataaaagatcaaacgccaatagcatgtatgtatatactttataaatttattaacaaactgcagtccaataaaaaataaaattagtttaagcgctagctttaaatgtcga

SEQ ID NO: 5591 - DNA, 505 bp, Diabrotica virgifera
aatatgtactgcatcaggaagtaacggtgctgatttctcatatgtgtcccagatactgcagttttatgtgtttaatggtaaacacaatctccaattctttcttcattcctcctagaacctccttgttcgtgatccatttcatgccatcagtatttgtttatttaaacattgaccaaaaaaattaataaaaaccagcataaagcttaattcttctattatctttttgtatatcgggaagtttaacagtatccttagtatctgtcttttcagctccggataactagttaacgggaagtttttctctgtcagatatctattagtatctaatctgtcagataaacttcctgataactagttatccagaggtgaaaagaaagaaagagagggccataatggataaaagatcaaacgccaatagcatgtatgtatatactttataaatttattaacaaactgcagtccaataaaaaataaaattagtttaagcgctagctttaaatgtcga

SEQ ID NO: 5592 - DNA, 818 bp, Diabrotica virgifera
  SmartBlast Evalue=7E-28; Info=Small heat shock protein 21 n=1 Tax=Gastrophysa atrocyanea RepID=Q3LGX2_GASAT
tgccacaacctagtacctctgctacaactgacaaaaccaattttgaagccaatgcagtgggacaatattaaagaagatatttaaattccattgcaatcgctaaagccatgttctgtccagaatatgacaacagcaatcaatgtgtgagtggtaattctgaagtgccacaacatagttcctcttccacgactgaaaaaactaatttcgaagccaatctagaggacaatgttaaagaaggtatcttaaattccatcgcaatagctaaagcaatgttctgtccagaatatgacggcaacaatcaatatgtgaatggtaattctgaagtgccacaacccagttcctctgctactactgacaaaactaatttcaaaggcaattcagtggatggtattaaagaagacatcttaaattccatcgcaatagctaaagcaatgttctgtccagaatatgataacaacaaccaagatgtgaatacaaactctgaagtgcaacaacatagatcctctgttacgagtgacaaaaataaattccaagccaactgcgatgtacagcatttaagcctgaagaaatcactattaaggtaaataatgataaatctattactatagaagccaaacatgaagagaaaccagatgagcatggtacaatttacagacatttcgtaagaaagtatgttttacccgaaaattgtgacattgacagggtagaatccaggttgtccatcgatggagtattgaccatcacagctcccatagtcactgagaatgcagtagaacatagaaccatcccaattataaggacaggagaactggttagac

SEQ ID NO: 5593 - DNA, 573 bp, Diabrotica virgifera
caatagatatttcgcttatcttattattgctggtttgatttttattatttatttttatattttcatactgcctttctttccgtatattcctatcgtcatctatttccattttgtgttacacacataccacaaaagtaatagttcaatagacccagctaatgttaaaatctggtaataatatttcacactgcctaactgcttccgatgtacacttaatgttaacaccgacaactaaactataacgaaaaacccttaaaattgatattttcttcagagaacttttccaaatatccgttttttaatttgacgtttatgtgacactcgaacttattgtttgtataataaattttatcaaaaatggtaaatacaaatattccattaacgtcaaatatgtcataatatgtgtaacatatgtttaacgtcaaattgtgttcgccaaaaatttcaggcgactacgctaggtgtcgcgtcagtcatgcacggagcgaataggaccagacagtccctacaggtaagacaatacaacataggggttaaaacttttctcgtttggaggtagctgccaagctaaac

SEQ ID NO: 5594 - DNA, 514 bp, Diabrotica virgifera
cccgatctggtggtatatttctatcgtcatctatttccattttgtgttacacacacaccacaaaattaatagttcaatagacccagctaatgttaaaatctggtactaataattcacacggcctaattgctttcgatgtacacttaatgttaacaccgacaactaaactataacgaaaaagtgaagaaaaacccttaaaattgatattttcttcagagaacttccaaatatccgcctttttaatttgacgtttatgtgacactcgaacttattgtttgtataataaattttatcaaaaatggtaaatacaaatattccattaacgtcaaatatgtcataatatgtgtaacatatgtttaacgtcaaattgtgttcgccaaaaatttcaggcgactacgctaggtgtcgcgtcagtcatgcacggagcgaataggaccagacagtccctacaggtaagacaatacaacataggggttaaaacttttctcgtttggaggtagctgccaagctaaac

SEQ ID NO: 5595 - DNA, 619 bp, Diabrotica virgifera
gcttttgtaccatcagttctttttgtaacgtacaaattcacaatgaagtttttcgtactttgtgccttagtactgtactgctcttcggaagtgttaggaggtccttgtgatggtgttaagtgcagtcctccacaatgtggacttggtgctcgtccagtagtgaaaccaggtgattgttgcgccacttgccaaggattcggtgctcctgatttcgatgatgcagcagatttaaaagcaaccagacagaaaagaggaggtccttgtgatggtgtacagtgcagtcctccaaactgtggacttggtgctcgtccagtagtgaaaccaggtgattgttgccctacttgccaaggattcggtaacccaaaatgcgaaggtatacaatgcggtgtaccaaactgccctcctggatctatattgaaactcaaagatgatgcttgttgtccctcgtgtgagccattcggtaatccactgtcacattaaggatagagattgttgtgaaacctacaaccacttggtaactaataataaatcaagaaaatgttgcaactatcagaaaaaatggcccatggaaaatgaaaaattaccaaaaaattaatatagtatgacaaaacttaaaaaa

SEQ ID NO: 5596 - DNA, 470 bp, Diabrotica virgifera
gtttcaacttttgtacccatcagttatttgtgtaacatacaaattcacaatgaagtttctcgtactttttgccttagtactatactgctcttcggaagttttaggaggtccttgtgatggtgtacagtgcagtcctccaaactgtggacttggtgctcgtccagtagtgaaaccaggtgattgttgccctacttgccaaggattcggtaacccaaaatgcgaaggtatacaatgcggtgtaccaaactgccctcctggatctatattgaaactcaaagatgatgcttgttgtccctcgtgtgagccattcggtaatccactgtcacattaaggatagagattgttgtgaaacctacaaccacttggtaactaataataaatcaagaaaatgttgcaactatcagaaaaaatggcccatggaaaatgaaaaattaccaaaaaattaatatagtatgacaaaacttaaaaaa

SEQ ID NO: 5597 - DNA, 549 bp, Diabrotica virgifera
tcttttttcatttaaacaatataaatacacctaatctacaagattaatcagtattttttctttaacctaatttccctaaacatgtttgtaaactagatgtcacctggtccatcctagcttttttttacatgaaatgcccacttctttgttgtggctacacagcacagcactgactctgcttttcactaattgctcacgtatttgttgtggctacaatacaatgcacaacactaactaagcccggcacaacttcacacattacacgagctcgaacggtttagtcctcttgagccttcgcatctggggttcgttgacaagaagctgaagtgcttcatggttgggatgcttatggagcctctcttcatgtctcctggcgactttcttaatttcatttggaatagattcgattttaagatctctacgcaaatcgtcattccaaacataccaaggagcacatacaatattccttaatattcggttctggagcgtttctaaatttcggtaattgcttttttttggttcagccccataattgtaggccataggtcc

SEQ ID NO: 5598 - DNA, 521 bp, Diabrotica virgifera
ctacaagattaatcagcatttttactttaacctaattttcctaaaattgtttataatctagatgccacttggtccatcctagatttttttaacatggaatgcccacttcgttgttgcggttacgcagcacagctccacagcactgactctcctttgtactaactggttacgtctttattgtagctacaatgcacgcacaacactaactaagtctttcacaacttcacacattacacgagctcgaacggtttagtcctcttgagccttcgcatctggggttcgttgacaagaagctgaagtgcttcatggttgggatgcttatggagcctctcttcatgtctcctggcgactttcttaatttcatttggaatagattcgattttaagatctctacgcaaatcgtcattccaaacataccaaggagcacatacaatattccttaatattcggttctggagcgtttctaaatttcggtaattgcttttttttggttcagccccataattgtaggccataggtcc

SEQ ID NO: 5599 - DNA, 565 bp, Diabrotica virgifera
aaggctcggatagtttgaatttgtgtttgcatgataaagaatataacgtttccgagtgtcatagactattagttcgtgaatcttgcacatttttgacgagtgtttctgatctgtgttgcagcaggtggttttatttgagttttcgattacctgtacatcatcagacccctcgaaggtgataatatttccgagttccttggtttcaacgccaatcgagcatcaccaactgtgaagaagtagtacttgaagaggagagctgatccagctgagtctagtttattgtgattttaattttaatgataaaaagtgatattatgtataatttaaacgtagacttggctacttcggcccaaaacgccgtcaacaggtggaatcaccaacgacgaacccaccaagtgtccaacatacttgttcccaactcattaaggctggactcaaactaacgatcgagcaaaaacgaaaacagcagagcgacggagaagatcttctcgacttggataaaataaagaagataaagaaaaacgactatagcgaatcagaagaggataaaatcaaaacggaacac

SEQ ID NO: 5600 - DNA, 523 bp, Diabrotica virgifera
aaggctcggatagtttgaatttgtgtttgcatgataaagaatataacgtttccgagtgtcatagactattagttcgtgaatcttgcacatttttgacgagtgtttctgatctgtgttgcagcaggtggttttatttgagttttcgattacctgtacatcatcagacccctcgaaggtgataatatttccgagttccttggtttcaacgccaatcgagcatcaccaactgtgaagaagtagtacttgaagaggagagctgatccagctgagtctagtttattgtgattttaattttaatgataaaaagtgatattatgtataatttaaacgtagacttggctacttcggcccaaaacgccgtcaacagcctcctggtagacagtacatcaagcacaccgcgcacgccagagatcctaaattcccttatagccatgaccaatcccctggacaactattcctttaacgattccacgaaaaagactccgaccaatggtacagcgagtgggcatttcaattccagtag

SEQ ID NO: 5601 - DNA, 825 bp, Diabrotica virgifera
gacgtaagcctatttttgtagtaaaaaaactatatcataatatttataaacaagtctgaagactgtccgtaggaaacaaaaagaatattaagttaatatcattatcataaatacaataggataaaatctaacaaaatctgcgcatgactttttattgcatcacaattctattcaataaattatatggtttaatacatcacattttcgtttcttaaaaaaataataaattatctacgagttatcatgctcagatccttttgactatgtacggtcattttaaatggtttgttttgcacttcggcatttccttcaaactctacatcacaatcattatgtgctcatttttaattttcaatcgttttgcacgaaatttacaaaatcccgaaaaaataaatacgtacagtgcttaaatttgtttacttgtgatagatatacctttatacatgagatcaatttcgtaaagatatatcttagtaatatcgagagttcattactatatctcagaacttgtaatggatctacgaggaatacatattttaatagggaacttgcatgtattaagaatcttttttataatgggtgttttttggtatagaaatgtgtatagagcttttcaacgtttctcacttgtttcgagcttctgtcatatcgttcatttggaagaagagggttataatatctaagaatattcactttttcagtagaaaggatttaagattcatattttatttttatttcatttattttgcgcagtgtttattgatattataggatttaatgattgagtatgatagatttctgatctttttatcgctctgacaagaa

SEQ ID NO: 5602 - DNA, 252 bp, Diabrotica virgifera
ttgtttctgatggatgtgccattatttggtcttacactggctttataaattcttgacttcatctcagtgttaatatgtatatcgttcatttggaagaagacggttataactaagaatgttcactttttgaatagaaagattttaagattcatattagtttatttcatttattttgtgcagtgtttattgatattataggatttaatgattgagtatgatagatttctgatctttttatcgctctgacaagaa

SEQ ID NO: 5603 - DNA, 533 bp, Diabrotica virgifera
cgaatatttccctccaaaaacctaatgcgcaggcgatctccctctgggtaagttcagaatacgttcagagcatgcagcgcgaataggcctataaattactattttgcattggctgatttaaattttaaatacaaaaatagaaggtaatcctatacagtacgttctttaacgtaaaatattgcaaaacctctaaactttaaagaaccgcttggattgacatgaaatttggcatacacatagctaacaagtcaaagaaaaaagtgatattgtgccgatgtgtgcttttgccctggggatgagtttcacccccctgttgggggtgaaggaatccgtgtccagaatgagtccggaaatggataaggtgactaattttgagcggctttttgttccatagagttttttcgccaagtcgatacttttcgagcttttgcgagtggatatgttcattttttcagcaaaatagccacgtttttagacggtttgtcgtaaacaactcaaaaagtaagtatttactggagtaaaacattcttagc

SEQ ID NO: 5604 - DNA, 520 bp, Diabrotica virgifera
cgaatatttccctccaaaaacctaatgcgcaggcgatctccctctgggtaagttcagaatacgttcagagcatgcagcgcgaataggcctataaattactattttgcattggctgatttaaattttaaatacaaaaatagaaggtaatcctatacagtacgttctttaacgtaaaatattgcaaaacctctaaactttaaagaaccgcttggattgacatgaaatttggcatacacatagctaacaagtcaaagaaaaaagtgatattgtgccgatgtgtgcttttgccctaggggtgagtttcactcccttttggagacaacggtatggaaaatcgacattattatttagggcggctgtcaataaagtcagaatagcgaacatgatagcaacgatcggtaacgttcatgaaaatagaagatgaaaaagatattccaattgaaatatgtccaaacttaatttaatatcatcacctcccatcaccatacctcattagagcatcactagattgtctcacatc

SEQ ID NO: 5605 - DNA, 677 bp, Diabrotica virgifera
ctcattttaatgcatttcatgactgaagtttcttgtagctacatattgctattttagttgaccaacacaaaaaaattttgaaatcaccctattttaagttcaataattttgcaagtaccatcttatctgttttatgcaagtactcggctacaatgtggttcctttcacgtaccaatatgtggcctggggtaaattggttaaggcaatacctatagctgggacgggggccccatattccggttgcattttagtttttatttcgccaaaatgactaattttctcagtaacaatttatatctttacgaaaggtctcgggggccaagcttagcgcgggcctcctacttccaatggcattttaggttttattacgccaaaataactaatttcctaggtaataatttaaatttttatgttatggtctgggggccccaacttagccccctgaaccttatgttgaggtatagggtgcatctgtaaggtctttttaaaattgtgtcatttgaaactatttcgttgggatcggcttttaaaatacatattttattttcctcgttaaaatctatgcacggcaaccaaacgagggcccctgcggggccctctcatggccgggggccccggggcactgccccggttgccccaatggtagttacggccctgaaagtcaccggcggaaacag

SEQ ID NO: 5606 - DNA, 381 bp, Diabrotica virgifera
tccggttgcattttaatttttatttcgccaaaatatctaatttcctcagcaacaatttatatctttacgaaaggtctcgggggtcccagcttagctcaggtctcagggcccctgttctattccaattgcattttagccgaaaagactaatttccccagtgaaaattaagattttatgttgctgtctttttaaaattgtgtcatttgaaactatttcgttgggatcggcttttaaaatacatattttattttcctcgttaaaatctatgcacggcaaccaaacgagggcccctgcggggccctctcatggccgggggccccggggcactgccccggttgccccaatggtagttacggccctgaaagtcaccggcggaaacag

SEQ ID NO: 5607 - DNA, 557 bp, Diabrotica virgifera
aaaattatatccttgtttttaggattgagccaagatgacactcgaattaacaggtccaaattgccgacatacatcagtaattttcgaccattttcaaatgttcttataacacgcactttatctttaataggcaaaaccttccttttagtactacaacttgccatattaaaaaataaaaagctaattaccaaattaaaatctgaaacagaaaaatttgactgttaggacggtactgacaaatgagaaatcatagaactgttaaggtcacataactgtacacagaagggatgatttaactttctcacattcttagaaggagcaatgtcgcaaagccggaaacgcattgcactttattcttcataaaataaaaatatgacaacctactgtaaaattttatgacgctatagacgagggttactttattttagccgctaaaaccgggtttttaataatgttatcgaatagtttttggccggacctattaaaaattgacgttacaaccgagatgacgtaactaccgaggccgtaatatccaagttccactgtatatggagtat

SEQ ID NO: 5608 - DNA, 511 bp, Diabrotica virgifera
aaagtggaacttgcttatagcgtcatcgaagggtcaagtaaaaaaatgacgctatatcagagtgacgctatatcagagtgacgctataaaagaggtagaaaaaaaaatgagattttaacgaggctaaattttattacagcattattgctgaatttaggataaaaaaagaaataaaacctattatgtatatataaaacttacattttatgaaaagttctctaatgctaaaaaagtcaattattttcttctgcacaaccctttccgaaaaataaaagtttgcaaaccggaaacccattacacttttatccttcataaaataaaaaaaaatgacaaccgtctgtaaaattttatgacgctatagacgagggttactttattttagccgctaaaaccgggtttttaataatgttatcgaatagtttttggccggacctattaaaaattgacgttacaaccgagatgacgtaactaccgaggccgtaatatccaagttccactgtatatggagtat

SEQ ID NO: 5609 - DNA, 556 bp, Diabrotica virgifera
ttctagtttcgatttgacgattacctactctactattgtttgttttttaaccaagaggagtgattcaaatttaccgcgccgtaatgcttgtttctaattggtccaaccgcaggcaagtttactttccactgttattaaattttgacactaatgacatttatgaaattttggcacttctgtcattttataggttaattaagtatatcggcgattttttgtgttttctgcattattcctttaatttttagatttttagtctacttttatataaaaacagttgttttagaactctttagcgatgtgttagtataatataatatgtatggattatcatcgaaagctgatatgatcaacgaaaaaagaagatgaatttggtgacttttctagtaactttcttgggtgtgaatatgtctttctagtttactcctcttggttaaaaaattaaacattagaagtggatgaagatcttcgggaaaattggctccagttagagtaataagttcaatgatgtatgcgaatacgattatctttgttcgcggaaatcttcccgtcaaag

SEQ ID NO: 5610 - DNA, 510 bp, Diabrotica virgifera
ttctagtttcgatttgacgattacctactctactattgtttgttttttaaccaagaggagtgattcaaatttaccgcgccgtaatgcttgtttctaattggtccaaccgcaggcaagtttactttccactgttattaaattttgacactaatgacatttatgaaattttggcacttctgtcattttataggttaattaagtatatcggcgattttttgtgttttctgcattattcctttaatttttagatttttagtctacttttatataaaaacagttgttttagaactctttagcgatgtgttagtataatattcgcggtgtgcaagtacttggaagggaaacgagaaacgaccgtgcgcgagtcgcggagaaatattgcaactatcttaaataattcatattgtcaattgaaattgtcaaattgacgtatatttcataccttctgtcattgaagcagaaaaattatatattgctccacaatattgatatgatatgcaattattatat

SEQ ID NO: 5611 - DNA, 610 bp, Diabrotica virgifera
  SmartBlast Evalue=3E-10; Info=Neural lazarillo n=6 Tax= melanogaster subgroup RepID=Q8SXR1_DROME
gttgaatatcaacacatacctattgcctctcgagtacactagataaaataagaaaatgattatttttgcagtaattttttgttctgttgtaatatatgcgcaggcacaagttcctgtgaccaaatgttcaactactgtaaaagtagtgaaagattttgatcaggaacagttgttgggtgactggtacgaacaagcaagataccctagtacactggaagataatgcaagatgtgttcatactaattatagcccaaatccagttaccactacaacaacaactccaaacccaagtccaacacttacacttgatcctatattgagttacactgaatttattaattcagacacaaatgaatggaccatcctagaaggaaatgcaatagcagatccgtctgagcctgccaaatttaatgtaacctttactaatccaaaattaactgtaccttattggattctcggaacagactattcaggattttttgtgggttactcttgttctgtaataaagaatgttactggagtgagtcttttcgttctaacaagaagttttgaaccagtacaaagtgctatagatgatgctattgccgttattaaagccaacaaactttct

SEQ ID NO: 5612 - DNA, 453 bp, Diabrotica virgifera
  misc_feature (7)..(7): n is a, c, g, or t
gcaaganaccctagtacactggaagatcacgcaagatgtgtttatactaattattataaaagttcaagtactacagctgcacaaggtcttgaaggtgcagctccaactccatctacagctgcacctgaacctacagatgcacctgcagataattctatattgagcaccaccgaatttattaattcagacacaaatgaatggaccatcctagaaggaaatgcaatagcagatccgtctgagcctgccaaatttaatgtaacctttactaatccaaaattaactgtaccttattggattctcggaacagactattcaggattttttgtgggttactcttgttctgtaataaagaatgttactggagtgagtcttttcgttctaacaagaagttttgaaccagtacaaagtgctatagatgatgctattgccgttattaaagccaacaaactttct

SEQ ID NO: 5613 - DNA, 784 bp, Diabrotica virgifera
taagtaacaaatatacatcaaataaaatgaaatttttggagccctcaattaagtgaacaacaaaattttattttaataaatataacatcctaatgtctcgaagagcaggttactactaataacaaaatacactcaacaacacaaaatttggtctgttcccgaattggaatattggagttaacccgaaaatagtataaaattctggaaaaatactattggctgcgccaattacaatattaagagccgagaacgtgttaaaaatgaattttgtaataaaatttatttgttcgaaaagtatatttcaagtaaagtaacaaccacaaactaaaaaatctcttaatacaatatagtctctatattatagtatctatacttcgtaaccactttgaatccagtttagaacacaaaactaaaagtacagtagattccttctataacgagatctgaaatggcggactaattacctcgttataagcggatctcgttatatcagacaacaataatattgtgcatacatatgaatatatagttttctaaaacattaacttcctatagtgaagccattcggagcaatataagatgctaaatattgttccctcgacaataaggcttggccatcacaaattgtaaattttcttacatgtattcaatatcagtcgatacataaacagaacaggaacaagtttattatagccggtggattttattacagcactatcctcgataaccgcacagatgttggggaatttttgtatacaggtagttgggtatttatttatagcca

SEQ ID NO: 5614 - DNA, 261 bp, Diabrotica virgifera
taagtaacaaatatacatcaaataaaatgaaatttttggagccctcaattaagtgaacaacaaaattttattttaataaatataacatcctaatgtctcgaagagcaggttactactaataacaaaatacactcaacaacacaaaatttggtctgttttgtctgaaaatagtctattttttggtcataaaattttgtctgaaaatagtataaaattctggaaaaatactattggctgcgccaattacaatattaagagccg

SEQ ID NO: 5615 - DNA, 543 bp, Diabrotica virgifera
gcctgggttttggcgcccctaaaggatgacgcccgtgtgcattgcacactttgcacatatggtagcgggggccctgtttgctgcagtcataaatgacaggtcaggatgaaataattccggactatggtatataaagcctgaaaataatgtatcatttcaaaacaaaaatcgagtataaatattcaaaaaattcattttctgatggattgataatttgagacgtggctaagactgtttagacatgattaaaatttcccagttgagataaaatatgctatcgaattataatctaagcttactgctaaggatcacaaatgacacaatccaaatctgaaagataaatttttctgaaactgactccttttatttttcaattataatccattgttccatttttgtgacgagaatttggaataaattcatttccgggtatttgtcctgactgtaatattttctgcaacctttcgacttcttgcagtgaattggctttgttgatagcttccctgatcttcttgatttcttcatcagtcaatcctctacttt

SEQ ID NO: 5616 - DNA, 520 bp, Diabrotica virgifera
gcctgggttttggcgcccctaaaggatgacgcccgtgtgcattgcacactttgcacatatggtagcgggggccctgtttgctgcagtcataaatgacaggtcaggatgaaataattccggactatggtatataaagcctgaaaataatgtatcatttcaaaacaaaaatcgagtataaatattcaaaaaatttgagacgtggctaagactgtttagacatgattaaaatttcccagttgagataaaatatgctatcgaattataatctaagcttactgctaaggatcacaaatgacacaatccaaatctgaaagataaatttttctgaaactgactccttttatttttcaattataatccattgttccatttttgtgacgagaatttggaataaattcatttccgggtatttgtcctgactgtaatattttctgcaacctttcgacttcttgcagtgaattggctttgttgatagcttccctgatcttcttgatttcttcatcagtcaatcctctacttt

SEQ ID NO: 5617 - DNA, 673 bp, Diabrotica virgifera
gttattttattcaaagtgaccccacaattcgatagagggacaaattataagcaaggtttgttatataaagttattaaaataaatcaaaactttttgagttattaagatcaaagattttaatttttcgtgagaaaaatgcatgtttttaaccgatttttcataaataactcaaaaactataagtttttgcaaaaaagttattattatcaagattgaggctaataaaaaattaaataaactccttactagaaaaacctttcaatgttaactaagagtgagttatgggtagttgaatctatgtttctttcgtcgagtgcccaaatctaagtgttcaagcttaaataccgggaaaatgatgtatttataaataaacttattaaacatttgtaaaagttcatagaaatatttatcaaataatccctcgaacaagttgatagcattaaaatatatgtaccaaaaatgtctcaaaatgaatcttttaaaaattgttccaaaaaatgttattgtttttttgtaaatattaatttttaagacgtaagtttcacctaaaaactaattgaaatttgattccaagagctatagagtttgctagagcaaacgtcaaaattagtcttttaaacctcttacttttttaaaaataaaaggttaaatggccccggttacatggttctcgc

SEQ ID NO: 5618 - DNA, 379 bp, Diabrotica virgifera
gtgtatgtttctttcgtcgagtgcccaaatctaggtattcgagcttgaataccgggaaaatgatgcattttataacataaacttgttaaacatttgccaaagctcattgaaatatctatcaaataagtgctcgaacaagttgatagcattaaagtttatgcaccaaaaaatgtttcaaaatgtatcttttaaaaaattttctaaaaaatgttattgtttttttgtaaataactccgttaaattttaaagtagcaagttcatctaataactggttaaaattttattccaagagctattaaaaaacgtcaaaattagtcttttaaacctcttacttttttaaaaataaaaggttaaatggccccggttacatggttctcgc

SEQ ID NO: 5619 - DNA, 642 bp, Diabrotica virgifera
aactaaagacgggaatcaacccaacgtaaaatagcgttacttccttcaaaatttgttatttacgatccttggactaggaccaaaccctctatttgtggccggcgtgaaatctctcatcgtttgtcggtaaataaacacatttcaaaggaagtcagaagctgttatagaaccttccaactcggctagggacagttacggtcagtaccgtggtaattttattgtggagtggtctaacgacattgtgttggaattttttcattgtatgaattaaccaatttactaaaatttctaccgccaacactggtggtgtaccctcgatactcgaggggacaagcaccatcggaacggtccgaccacatttatcaaaaaattttatatttatcaaatatttattaatttcgcagtaaacgggggacagccgtgctctcttttcttttcactattacgaggaccacaccacgcttcattggatccctgtttaatattacattatgtattttcaaaaaaaaacatgttaccacatagtggtgtagggtgtttaatattacaaaacagaaagtttgtatttcgtttgcgaataatcagcgatgtattgggctgtaaaaataaaatattttaatgagatataatattagggcaatt

SEQ ID NO: 5620 - DNA, 420 bp, Diabrotica virgifera
aactaaagacgggaatcaacccaacgtaaaatagcgttacttccttcaaaatttgttatttacgatccttggactaggaccaaaccctctatttgtggccggcgtgaaatctctcatcgtttgtcggtaaataaacacatttcaaaggaagtcagaagctgttatagaaccttccaactcggctagggacagttacggtcagtaccgtggtaattttattgtggagtggtctaacgacattgtgttggaattttttcattgtatgaattaaccaatttactaaaatttctaccgccaacactggtggtgtacccttggtactctagggcagcgtttcccaaactgtgctccgctatatggcgataataaacgtttaacattagaaaaaaatctccgctataaataacgataataacggtt

SEQ ID NO: 5621 - DNA, 599 bp, Diabrotica virgifera
tactattctcaatatggttactgggtgtaaaagataaatcttattctatctgttcttaatgagttttagataattttagttgtatttctttgtaattttgtgttgtacaaagattaatttaacattttctctggaagtattaatttagaaagataatatgcttcattggtgttgtgttttgaagtgtgaaatggataaagtcaagataaagttcacttttaaactgaactaaataaggtatctgagagacaacaatggttaaatgcaatacaatgtacaggttttactagcgaaatgaaaattttcctgtcctgtctgctgtaatcattttatatctggaaaaccagccgacttaatagataataacaatctccagattgggttccttcaataaatatggtctataaacacaatgaaataagttccccaaaatctaaaatggagtggtatcaaaggagaattaaagggaaaaatattcatattgaaattatttataaggcactggactgtcttaaattctacaataatactagaatcagctgagagaagtggtctacaaaaaaaccaggaaggaaacggaatatgtggctacgaaaggc

SEQ ID NO: 5622 - DNA, 458 bp, Diabrotica virgifera
tactattctcaatatggttactgggtgtaaaagataaatcttattctatctgttcttaatgagttttagataattttagttgtatttctttgtaattttgtgttgtacaaagattaatttaacattttctctggaagtattaatttagaaagataatatgcttcattggtgttgtgttttgaagtgtgaaatggataaagtcaagataaagttcacttttaaactgaactaaataaggtatctgagagacaacaatggttaaatgcaatacaatgtacaggttttactagcgaaatgaaaattttcctgtcctgtctgctgtaatcattttatatctggtaagttacaattacaacagtaacgatttttgaagatgttaacattttaatcttataggaaaaccagccgacttaatcgataataacaatctccagattgggttccttcaataaatatgg

SEQ ID NO: 5623 - DNA, 574 bp, Diabrotica virgifera
ataattgctcctttttctttgtttactactttttacctttctatacagcttccacttggtcttccatttttgattttgtatgtccttatcagattttccattacttaaaatagatttttatttctattgattctgtgactttactgtactttacttttcttacatgtacttttattagagacatgctttacttctctttttaactttttagtcttccatttcagctatttcgtgcaatcgaaagcagaaattcttcaaatatggcgattttctcttcaacacttcttgatcttgtccaagtgcaagtatgtaatgtcaactgtaatgtaatgcaataataatatgtaatgcaactgtcaacattgacagatgacataacaactactgtaaggcaacaaacatcacgaaattgcattaaaatacgaaattaatgtaactagtattgtcaggagttaaaaaagtgaatatcaattataaagaaatttgacagaatgggagaagatcaagagacggatggcaaatgaacagaaaacaaaggttttacattaaacaaacttatacgctgtgagctcgt

SEQ ID NO: 5624 - DNA, 486 bp, Diabrotica virgifera
ataattgctcctttttctttgtttactactttttacctttctatacagcttccacttggtcttccatttttgattttgtatgtccttatcagattttccattacttaaaatagatttttatttctattgattctgtgactttactgtactttacttttcttacatgtacttttattagagacatgctttacttctctttttaactttttagtcttccatttcagctatttcgtgcaatcgaaagcagaaattcttcaaatatggcgattttctcttcaacacttcttgatcttgtccaagtgcaagtataactgtcaacattgacagatgacataacaactactgtaaggcaacaaacatcacgaaattgcattaaaatacgaaattaatgtaactagtattgtcaggagttaaaaaagtgaatatcaattatatagaaatttgacagaatgggagaagatcaagagacggatggcaaatgaacag

SEQ ID NO: 5625 - DNA, 551 bp, Diabrotica virgifera
gtcccatagtttccaatttctgttagtttttctgatttatgttagtattattcttcttttaaagcacgtattcattatgttggtgctccgtgctccgtgtagctccacataatggatacgttggtgcttccgctcggcgctcaccctcggcgatccaaccggtggcgatttatacagagtgtttcattgggaaacggaaatactttaatgatgaatagaggtcaccgagccggttctagatatactacatttcttgccctaccgacttttataaccgagccacagggtgccttatctattttgcccatttctttcctaagccataactcggaaccaccctgtatattttttgatatttggttacacatatgtctcattcaaaacccaaacgaccgacatactaaccataagaaaaatccaggtccggattaacaaaaaattataaagtaattgtgaccttaaaacaacaccctgtatattcaaattttgaaaatctgtttgcatatttgaaaagagcacaaaaaagtaagttcgcttcaatttccagacaa

SEQ ID NO: 5626 - DNA, 500 bp, Diabrotica virgifera
gtcccatagtttccaatttctgttagtttttctgatttatgttagtattattcttcttttaaagcacgtattcattatgttggtgctccgtgctccgtgtagctccacataatggatacgttggtgcttccgctcggcgctcaccctcggcgatccaaccggtggcgatttatacagagtgtttcattgggaaacggaaatactttaatgatgaatagaggtcaccgagccggttctagatatactacatttcttgccctaccgacttttacaaccgaattacagggtccctcatcgattttgcacatttctttcccaagccacaactccggaaccaccctgtatattttttgatatttggtacacataatatgtgtacatattatgtctcattcaaaacccaaacgaccgacatactaaccataagaaaagtccaggtccggattaaaaaatcattataaagcaattgtgaccccgaaacaacaccctgtctattcaaa

SEQ ID NO: 5627 - DNA, 656 bp, Diabrotica virgifera
gtacgcacatacctacagtatgaagttagtggctaagtcttttaagttacgtatgtttcaatacaaataaaaacaaagtatgaacaaaatttattagtatttttagtaaatatatttattttcatttttgtgtctttggatttgtcttcgtttggaataggataataattattaatattaaaatataatgaaaaaaaaattaaaaatttgtgtagaaaatctgacgttttttagattttccatgattcatcaagggaaaagtaattgcagggaggctacagttaataaaaaatgacgatttaacgttatttgtaatttttggtattattttaagtattaaaattagtttaatatataaataaaaatacaattaaattgtttaaaatatattatttattttgttgaaatcataataatagaaatataacttcttacgtacgtacaaagtacacactattttttttaatggaacatcctgtatatttttacaacttttaattctcctcgatgttctggttttttttgatataatactttgcaatgttatacggggaagtttaaaagataattacgtttttttattaatttcgtagcaatattaacaccctgtagaattgtagagacttgacatcaaaaaatctattcgtattcaaatg

SEQ ID NO: 5628 - DNA, 401 bp, Diabrotica virgifera
caatttgccatgatcttcatcaatacagggtgtttttatacagggtgaggcagataactggcctattagaaatatctcgagaactaaaggcaacgaaatcatgaaaattggaatacaggggtttagaaggatgatctattaaatgaaaatattttcatctctttgcaacttccggttataccggaagttgcttataacttcgtttttttaaatgggacaccctgtatatttttacatttttggattctgctcgatgtcttctttcttaaaatatgaggttttgtaatattatacagggtagtttaaaagataattacgtttttttattaatttcgtagcaatattaacaccctgtagaattgtagagacttgacatcaaaaaatctattcgtattcaaatg

SEQ ID NO: 5629 - DNA, 660 bp, Diabrotica virgifera
tggtgcagcttcaatggatggttattctacctatggtgggtatccaccttctggtaacccggactacccaccacagaggccttcttcacaatcagctccttcacctcatggaggtgtgaatcatctgaacagtgcaacacctggaggacccagtcctgcaagcggggctgcagataacgtgagcgtttccaaccccttcgacgatgtatccccaagtccgcctccaaggggtggtccattttctggtggaccgcatccttcgtatccatcggggacacctccacggccttcaggtcaaaattactccggacaacccggataccagtatccaggccctggaccaggttcgggtgcacctccagatcagtattctccttatccttctggttcaggttatcctccatcagtaagaccagtgtatcctccttattccggcggtgattcttctgctcctccacaaagtcccaacaatgcgcagggtccaccttcatctgtggcacaggatccttaccgatacaatacgacccaaggctcaggatacaacccacgacctgcatatggacaagctcccagtaattctggaccacctacttctcagtcagccggacctggaaattatgctccacatccagattactaccgccaagaacaagtacaaca

SEQ ID NO: 5630 - DNA, 386 bp, Diabrotica virgifera
acacgattataatatatcccggtattttctgttttttttgcggtatttataatgactgaacaagtgactaggagtgtgacccttctggatctgttggtttacaaaccatattcaaatggttatcctccatcagtaagaccagtgtatcctccttattccggcggtgattcttctgctcctccacaaagtcccaacaatgcgcagggtccaccttcatctgtggcacaggatccttaccgatacaatacgacccaaggctcaggatacaacccacgacctgcatatggacaagctcccagtaattctggaccacctacttctcagtcagccggacctggaaattatgctccacatccagattactaccgccaagaacaagtacaaca

SEQ ID NO: 5631 - DNA, 528 bp, Diabrotica virgifera
gcctgagaaacaaactagtatattcaacttacattatttgtaggttctattacaattatgaatgatagtcgtaatggtaagtgttgtgagaggtcctgggcatataacttcaacttcaagaccaaggacagcaatacggttaagcttgggaatatatgccaccgtatttctggcagaagttgcagctaaacaaaggtatgttatggaactaatatgtccacaagtatagaatgactcaatctgatttactacgatagtcaagcagttctataaacctttaattctatgcatgttgatttaaatcttgcgtggaactgtttaggtaccctctcccaggttgtaaatcgtaatagattgacactaatctgagttgaagggcacaaaggctacgtaggcaatgagaagactgatacgctggacctagaaagcgcgtgtgtgccattaattaccacgaagccctgctttgaggttgcgaacagccaaaagttttggaatggtggaaaaatgagacagaggacaaaccaggac

SEQ ID NO: 5632 - DNA, 514 bp, Diabrotica virgifera
gcctgagaaacaaactagtatattcaacttacattatttgtaggttctattacaattatgaatgatagtcgtaatggtaagtgttgtgagaggtcctgggcatataacttcaacttcaagaccaaggacagcaatacggttaagcttgggaatatatgccaccgtatttctggcagaagttgcagctaaacaaaggtatgttatggaactaatatgtccacaagtatagaatgactcaatctgatttattccgatagtcaagcagttctaaaaaccttcaattctatgcatggaactgtttaggtaccctctcccaggttgtaagtcgtaataaattgacactactctgagttgaagggcacaaaggctacgtaggcaatgagaagactgatacgctggacctagaaagcgcttgtgtgccattaattaccacggagccctgctttggagctgcgaacagacacaaaacagcagcattgataaacgggtgcaaaaaagtttttaaaatggctga

SEQ ID NO: 5633 - DNA, 819 bp, Diabrotica virgifera
  SmartBlast Evalue=6E-26; Info=Interferon gamma inducible protein 30 n=1 Tax=Danio rerio RepID=Q5XJN2_DANRE
tttttcgtttcacaagtattatttatttatatattacgaaaacatgtatttaaacgaaacacttatttcattcaacattttttaatatttttaatcatctttggatgaacatttgtcacatgatctttacaaacgtctggtttattatcttttagtaagttgcaaaccacagatgtaagatctgtaaaagcttgatcttctatatctgcatcatagacgccattaaatcttatatttggtacccaaggtaattcgggattaagctttgattgcctatcctcgtacgataataaaagttcagttccacgatcaccatgataacaatcactaactttgttccaggaaaggctgcttggcaacaaactttgggctagttctaattcttctctttcgttgcgatcgcgttcgtcagtcttagacaaatgttgatatatgaaagtaacgaagtctaatgaggatggattttgatcaagaacacaagcgtgtattctgttaatataacattcctcatcaccatgctggcaagtaaatgttacttttccatctgcgctacgtgaagattcactccatccaaagggcaccaggtccaattttatgctatctgccaatttagcgtatgaaggatatagctgtgttagaataaattgatgacaaccagggcatagaccttcataaaacacagtaagagtcagatcagcatcctgcacgctggatgacacgcacgcagtggctgcgaaaaacaatactaactttgatacgaacatcttgtttaatattgtaaatactttggtaaaactaatgtttttatagtatattcag

SEQ ID NO: 5634 - DNA, 521 bp, Diabrotica virgifera
tattttattttgtttattttatttatatacggttataaccatttacagaaaaaaacaatagattaaaatataaattacatacaataaagagaacaaaaaaatacaaattatcaatataaatatgttacaatacaaattacacaaataatcatacctcagaacattaattactgtggtctgcggacaaaagcagataagtcactttttgagtttataattattattattatttttacagcacaataagtcttagttaatgtttactaaaacctgactcagcaacttgctataagtttggaaaaggtcaatgttaggtactggtttgctagtctggcagttctagtgaggaagttgttaagaccatagttggattgggtaatggaaactaactgtatccctgattgttcttagtgggacatgaatattaattttttgaagaagctctggcgttccagtttttccatgtaggatgttgtagaaagtgatgagatcccttctctcatgatgagcagtgatttaac

SEQ ID NO: 5635 - DNA, 495 bp, Diabrotica virgifera
tattttattttgtttattttatttatatacggttataaccatttacagaaaaaaacaatagattaaaatataaattacatacaataaagagaacaaaaaaatacaaattatcaatataaatatgttacaatacaaattacacaaataatcatacctcagaacattaattactgtggtctgcggacaaaagcagataagtcactttttgagtttataattattattattatttttacagcacaataagtcttagttaatgtttactaaaacctgactcagcaacttgctataagtttggaaaaggtcaatgttaggtactggtttgctagtctggcagttctagtgaggaagttgttaagaccatagttagtacggtggattgggtaatggaaactaactgtagccctggttgttcttagtgggacatgaatattaatttttgaagaagctctgagttccagttttccatgtaggatgttgtggaagtgatgagat

SEQ ID NO: 5636 - DNA, 679 bp, Diabrotica virgifera
  SmartBlast Evalue=4E-13; Info=Endonuclease-reverse transcriptase n=1 Tax=Bombyx mori RepID=D7F171_BOMMO
gcggacgacgtggttctcatagcagacaaaccgagaacgatgcaacaactaataattggtgtatgagctaaggaaattgagaaaatgaaattagaaataaacatcagcaaatacaagacgatgaaaataggttagcaggagcaggggattggatgaaacacgagtgttctgtaaaggacaagaattggagagggtgacggcctacgagtacctgggcacgataatatcaaatgacggaaagttggacctagaaattgcaaataggacaaagaaagctacgaaaatatattatgcgattaataatacgatactggggaaaagggaaatcaggcaggaaacaaaaatacatgtatataatacaatcacagtaccaactcttctatatgcaagcgagacatgggtcacaaataaaagacatgaaagtgccataaatgcagctgagaaaaatagctggaaagacgaagatggacagggaaaggaacgaaaacatcagaaacatgctaagtcaggaaccaatagagaaaaaaattgaaaaaagaaaactgaattggtttggacatataactaggatgaacgagaacagactagtaaagaaggtgacagatgccaaaagacaggggaaaagaagaaggggcagacctaggaagtggtggatggagcagatcgaggaaatcgggac

SEQ ID NO: 5637 - DNA, 343 bp, Diabrotica virgifera
  SmartBlast Evalue=1E-13; Info=Reverse transcriptase family member n=1 Tax=Glycine max RepID=Q1AKH8_SOYBN
tatataatacaatcacagtaccaactctactatatgcaagcgagacatgggtcacaaataaaagacatgaaagtgccataaatgcagcagaaatgaagcagctgagaaaaatagctggaaagacgaagatggacagggaaaggaacgaaaacatcagaaacgtgctaagtcaggaaccaatagagaaaaaaattgaaaaaagaaaactgaattggtttggacatataactaggatgaacgagaacagactagtaaagaaggtgacagatgccaaaagacaggggaaaagaagaaggggcagacctaggaagtggtggatggagcagatcgaggaaatcgggac

SEQ ID NO: 5638 - DNA, 516 bp, Diabrotica virgifera
ttttattgaacaaaatataaatttttcgtttttttgcataatctataaataaaaaaaaaatagttataatggtctaattagcaaagtacaaggaacggttatttaccagcaattgcactgctgtaatcgaatacatgatcccatatatcaataatataggtatgccaagtccgcagacagtgtgccactttttttattaacaaaatggcgccccgaaaatcgtgttttttttcaattattgctctataactccgaagattttaactttacaacaaaaacacccaaataaaaattcaccgtaattaaattcgcatagagacgtgtttttcccgatccgctccgacgaaaattttcctcgtaaaatgcgggttgtcccaacaaaatctctaatttcaaataaagttttaggtaagtaatataagctttcttggtatatgtagattgtaattccagaagccggtaaaaattaaacgaatattttagcaacaattcaattgttaattaacaatttacgat

SEQ ID NO: 5639 - DNA, 488 bp, Diabrotica virgifera
ccagtgctactcttcaaccgcctattagtctgggctgattatcggagaataggccatttttgggaaaagttatttaccagcaactccactgctggaatcgaattataagatcctatccattaataatataggcatgcaaagtcctcagacagtgtgctacttcttgtataaacaaaatggcgccccgaaaatcgtgttttttttcaattattgctctataactccgaagattttaactttacaacaaaaacacccaaataaaaattcaccgtaattaaattcgcatagagacgtgtttttcccgatccgctccgacgaaaattttcctcgtaaaatgcgggttgtcccaacaaaatctctaatttcaaataaagttttaggtaagtaatataagctttcttggtatatgtagattgtaattccagaagccggtaaaaattaaacgaatattttagcaacaattcaattgttaattaacaatttacgat

SEQ ID NO: 5640 - DNA, 537 bp, Diabrotica virgifera
gtagctacacaccaccacgtaaagaatcaataggcaggttaaatatgtggaacgaatgagtggacgaagagataagtaataaagagggagaaaacaaaatatgggaaatgaagtagaatatggaagaaaactaaagaagcccaatgaattcaacaaaaatatgggaaatgaagtagaatatggaagaaaaactaaagaagcccaatgaattcaacaaaaataacaccagacattgtaaaagaaaacggattgcacggaattaaagaatcttcaagtaccatcagtaatatatgtataggtaccgctatatctttctgttccgtttaaatgtaaaaatggatacatacacaatcgaacaatacacacgaatacatagggtgagccagataactggcccattagaaatatttaaagaaccaaaggtaacagaatcatgaaaattggaacgaaggggctttgaagggtgatctattcaatgaaaatactttcatcaatttgccacctccggccataccggaagttgctcaaaacctcgtc

SEQ ID NO: 5641 - DNA, 479 bp, Diabrotica virgifera
gtagctacacaccaccacgtaaagaatcaataggcaggttaaatatgtggaacgaatgagtggacgaagagataagtaataaagagggagaaaaccaaaaatatgggaaatgaagtagaatatggaagaaaaactaaagaagcccaatgaattcaacaaaaataacaccagacattgtaaaagaaaacggattgcacggaattaaagaatcttcaagtaccatcagtaatatatgtataggtaccgctatatctttctgttccgtttaaatgtaaaaatggatacatacacaatcgaacaatacacacgaatacatagggtgagccagataactggcccattagaaatatttaaagaaccaaaggtaacagaatcatgaaaattggaacgaaggggctttgaagggtgatctattcaatgaaaatactttcatcaatttgccacctccggccataccggaagttgctcaaaacctcgtc

SEQ ID NO: 5642 - DNA, 559 bp, Diabrotica virgifera
cattgtgttggggacgcagcagtgaacacgtgaatatgaatgtaaaaaaagagagtcctacgaattcaagaacagcaaaaataatgagcttagtaacccatatagcacacaacatccgatggacgtccatataacgtacatttaaagtccaaacgtccatggaccaaaactggacgtactgtgtacgtccattacgcgacgtccattggacgtttgaggtcaacgtacattggacatccatttgtggtccatggagattttacacaaaagcgactattattatgagtaattaatatagcttcttgttttaatcaaagcaatattattagtagaatacaagaagcttctaataaatgtagtcacatattttttcatcatcgaattaaaacactgaaccactaaaattattttaattaaacctatataatattagatgatgataaaacgatggtaaactttttcagaataacggagctacatcgcgcatcggtaattatagaacttataataattagacactaccaatttaaatcttaaatgtgcgttttttaactgttaa

SEQ ID NO: 5643 - DNA, 464 bp, Diabrotica virgifera
tatagcacacaacgtccgatggacgtccatgtaacgtacatttaaagtccaaacgtccatggaccaaaactagacgtactatgtacgtacattacgcgacgtcgcgtcgattggatgtttgatttcaacgtacattggacatccatttgtggtccatggagattttacacaaaagcgactattattatgagtaattattatagcttcttgttttaatcaaagcaatattattagtagaatacaagaagcttctaataaatgtagtcacatattttttcatcatcgaattaaaacactgaaccactaaaattattttaattaaacctatataatattagatgatgataaaacgatggtaaactttttcagaataacggagctacatcgcgcatcggtaattatagaacttataataattagacactaccaatttaaatcttaaatgtgcgttttttaactgttaa

SEQ ID NO: 5644 - DNA, 593 bp, Diabrotica virgifera
caacccgcaagtttgcgatttttttgtgacgcccctgttcgaggtagtatccccgggtcaaaagtgacattattcctaacccttagctttaaaacccaacgaaattttttcgcctttgacaatcgcaccccctcccctaagcaaaactcgtaccccttaaaaaatccgaaagcacgcctttgaccgaatcgaaatccgcaccaaaaatcatcaaaaaattcaaaaagcttaacccgaaaagcacaaatctcaccacctcgtacttccggagctacaaaaacgccccaatttgaattatgtatatagactagttaggccgtactaaatccatagaatagtataattttataatgtactatactctaatactaatatactataatatactataatacggcacttatggttagaacttgttaaccagaaattgatttgctaagacacgtcgaataatatatcgctttatactatttcagtgatttaaaacggtacttctatttactactcaaaaaccttatttttgaggtcaaaattctgacgttttccgtacaaactcgtacctttaaacaaatacgaaagtacgccactgacaa

SEQ ID NO: 5645 - DNA, 408 bp, Diabrotica virgifera
caacccgcaagtttgcgatttttttgtgacgcccctgttcgaggtagtatccccgggtcaaaagtgacattattcctaacccttagctttaaaacccaacgaaattttttcgcctttgacaatcgcaccccctcccctaagcaaaactcgtaccccttaaaaaatccgaaagcacgcctttgaccgaatcgaaatccgcaccaaaagtcatcaaacaatttaaaaagcttaactcaaaaggcacaaatctccaagcctcttacttccgaaactaaaaaacgccccaatttgaattatgtatatagatagaagatagaaagtacgcccctgataggattaaaatcggcacgaaaaaatctctaataattcaaaaagcttaagtataaaagtacaatgctcgtgatgtgt

SEQ ID NO: 5646 - DNA, 514 bp, Diabrotica virgifera
attgtgttggggtgcaatcatgaagggaacaatttttttcgtcctaattgcttgtattctatcagctgttatagctgatgtagctcaacacctcaaagctagcagtatagtccaacaatgtcaaggtactgacggaccagtaaacttgattaaacagatcagaagtggtcagaagctcaatgtggaagaagctggccagattgccctttgcatgaacattaaagccggtgttatgaacgagaacggtgacattctgactgataacttaaagcccaagttagaaaggcgtctgggaaactctaaagcgacaaacgttatcaacgattgtggaacgcgtaatggaaatagtgccaaagaggttgcgcttaattttgttaaatgtatgcaaaaatatatttaggaatttttgtgtaactgacgttcacaagattttgtaaataacacaatattcaaataatactgtaaattatttttcctaattgtcattaattataatataaattaaatttgattc

SEQ ID NO: 5647 - DNA, 508 bp, Diabrotica virgifera
gatttgtgcaatcatgaagggaacaatttttttcgtcctaattgcttgtattctatcagctgttatagctgatgtagctcaacacctcaaagctagcagcatagtccaaaaatgtcaaggtactgacggaccagtaaacttgattaaacagatcagaagtggtcagaagctcaatgtggaagaagctggccagattgccctttgcatgaacattaaagccggtgttatgaacgagaacggtgacattctgactgataacttaaagcccaagttagaaaggcgtctgggaaactctaaagcgacaaacgttatcaacgattgtggaacgcgtaatggaaatagtgccaaagaggttgcgcttaattttgttaaatgtatgcaaaaatatatttaggaatttttgtgtaactgacgttcacaagattttgtaaataacacaatattcaaataatactgtaaattatttttcctaattgtcattaattataatataaattaaatttgattc

SEQ ID NO: 5648 - DNA, 536 bp, Diabrotica virgifera
aaactgagagaataaaatgtaagggaaagtgcactcttgccgctggtgctgtgcaactttagattaccgataagtcatcatcgagggtaaggtgaaatgaaatcctaagctacaaatacatgataacagtccatatttggttatcttaaccttcggatgaccaagggggtaaatttggaccccagtgtatgtttttctttaatacattcaaaagtattttcaatttttaactcattatttttttatttgactttaatatcattctagatatcctcatattttgaaataaaaaaaattccctatattttacgaataaaaaatatattctgaagttgatgtttagtaaaataccgtctattattggaatagacggtggaattccaagtagttttacactgcgcgttattaaaatctatttttggactgtggtgcctgttatgtacgaatcatgacattcctgtctgatacagttagtcattattattatttcctggcgtataatattatagtttcttagtattttgtgtacatataag

SEQ ID NO: 5649 - DNA, 482 bp, Diabrotica virgifera
aaactgagagaataaaatgtaagggaaagtgcactcttgccgctggtgctgtgcaactttagattaccgataagtcatcatcgagggtaaggtgaaatgaaatcctaagctacaaatacatgataacagtccatatttggttatcttaaccttcggatgaccaagggggtaaatttggaccccagtgtatgtttttctttaatacattcaaaagtattttcaatttttaactcattatttttttatttgactttaatatcattctagatatcctcatattttgaaataaaaaaaattccctatattttacgaataaaaaatatattctgaagttgatgtttagtaaaatagcgtctattatgtgtaattccaagtagttttacgctaatgacgtcgactttgcaaagtaacaagacacttactcaacatacacactacacatgacactaatactcatgttgtgactgtctgaataaagtcca

SEQ ID NO: 5650 - DNA, 628 bp, Diabrotica virgifera
cgcccgttcaaattttaaacagcaaacaaatggaatcacttttatcgttttgtgataaatatgacacatataacacttttttactaatcgaaatcaatgcaaatcaatgcaatcaggtgtggaacatagaaggtgtctctacattgatcaaacatatatttctagcacagtattcaaattatttatccagtcgtttattatagatatctcgttactaataaaagctgaattagacacaccctgtatgtatactacatttgtttaaaatgaactaccttgaaaatttaaatatctcatcatcatgtggaaaaaatcaataataatgttgaatgggttgcacacgtgagtccatttctatttaggtaaaagaaataaataaaatccacgaggaaaaaggttttcctgtagttggctgtataccatttattacaaaaatttaagtaaaaccccctatcaaaagatatattcattaaaattccccaaaaagggctccatcacaaaagcagaactagttttcgatctgattacagatcattatcagtgctgaacctaaaataagtataacctaataagttaaagcaaaatttaaaatgttgaccaaggtcgaaaaagatacaggtcacacaca

SEQ ID NO: 5651 - DNA, 365 bp, Diabrotica virgifera
taaataaatactatatacaggttgatcttaaagcaataggacgcaacgtacttaactattccagcatgaaaatatttattgatgtcaaattctgcaagtctaattacatatttacaaatccacgaggaaaaaggttttcctgtagttggctgtataccatttattacaaaaatttaagtaaaaccccctatcaaaagatatattcattaaaattccccaaaaagggctccatcacaaaagcagaactagttttcgatctgattacagatcattatcagtgctgaacctaaaataagtataacctaataagttaaagcaaaatttaaaatgttgaccaaggtcgaaaaagatacaggtcacacaca

SEQ ID NO: 5652 - DNA, 580 bp, Diabrotica virgifera
ctgtaatacaagtaaacataatatttcgccacccaggaagattacggtctaatttgcataatagtaaataaactaaatttgcataaagtttatagccatagagcaattcaatttaacaaatacaactactgttgtaggtgaagatgtagacttgctcgcattactcactgctcgaactccaatcgaaaaaaactatcttttttttaaaacctggaggaactcaacaccaatcggaaataatatattcatcgaaaagtttatctacttttgcaaagtgtcaaaaccatatactgtttttacacgcaataactggctgtgatacgacatctgcatttttcaggaggggtaaaacaactgctttttaaaatgtttgaaaaacaagatttacttgaatgtgctgaagttttgaaaaaacttaattcaactccacaagaagttattacccacggaattagctttcttctctccatgtatagagctcctaaaaaattacgtgcttagataagtttcgatatgttttgtaaaagcaagtgcagttatcttgtcttactcatcaacatcttttcgggtatattaccaa

SEQ ID NO: 5653 - DNA, 432 bp, Diabrotica virgifera
ctctccttgcatcaattagtctagagtaggtactacatggtactgctccgagtgaaaatacgtgttaaacctatatttacctataatctatataataaaaatgtcagaatattgttttatttgtgctaaaattttaactagaggtgaaattgttactgttgaaattgatgatacgacatctgcatttttcaggaggggtaaaacaactgctttttaaaatgtttgaaaaacaagatttacttgaatgtgctgaagttttgaaaaaacttaattcaactccacaagaagttattacccacggaattagctttcttctctccatgtatagagctcctaaaaaattacgtgcttagataagtttcgatatgttttgtaaaagcaagtgcagttatcttgtcttactcatcaacatcttttcgggtatattaccaa

SEQ ID NO: 5654 - DNA, 597 bp, Diabrotica virgifera
  SmartBlast Evalue=1E-13; Info=Endonuclease-reverse transcriptase n=1 Tax=Bombyx mori RepID=D7F173_BOMMO
gttctgttggataaattatattaattcctggtggtacactgagtcttaagactgattatgtccacatcacccgttacgcatgacgtcacagatttttttaatttcgagattcagagccaaactgtccttatttcttataccgaacatctacacagtaaatttctttccaattactttctataatgtctcaacttcttcaagattttcagctttctcgtcaacataactgaatccagctttctcacaacaatttaaaatggttcagtatttaatttattcctattactattccacaactgagcaacttgaagaatgctaatacatattggtcttcgcatattttgtgagcaaacgaacttttaataggcggaagtatctttaaacataagcggatacataaggaaacatggaaatcaccggagggagatacaagaatcaaatagaccacataataattgaatataaatggagaagctggctgcaagatgtcaggagcttaagaggtgctgatgtgggatcagaccacatgctaatcaaagcgagactaaaaatgaaattagccagagataaaaaccaaaaaatcagcagaaggaacaa

SEQ ID NO: 5655 - DNA, 409 bp, Diabrotica virgifera
  SmartBlast Evalue=1E-28; Info=Endonuclease-reverse transcriptase n=1 Tax=Schistosoma mansoni RepID=Q4QQE8_SCHMA
aataagattaataataaatatagaagagatataaaaatagtaatcggagactttaatgctaaaataggaaatgataataaaggacatgaacatgtgatgggaaaggagggaatcggagagagaaacgacaatggaaatcgattaatcgaattttgtgagcaaaatgaacttttaataggcggaagtatctttaaacataagcggatacataaggaaacatggaaatcaccggagggagatacaagaatcaaatagaccacataataattgaatataaatggagaagctggctgcaagatgtcaggagcttaagaggtgctgatgtgggatcagaccacatgctaatcaaagcgagactaaaaatgaaattagccagagataaaaaccaaaaaatcagcagaaggaacaa

SEQ ID NO: 5656 - DNA, 550 bp, Diabrotica virgifera
ttttagaaattgccaaccactaattcccaatgagagatggtttaaacaagaatcaaataggctatttataaaaacaataaaacagaatgaaggtcaaaatcacgcactaaccccagcatacaaacacagcataggtatcagtgataacccatattgcgcctgtggtgcaatgggagatctacagcacctcatattggagtgtggacagtacagacaaaatattaaagtaatgtatgaaaagttaattgatctaaattgtcctttacctgtcaatttaaacgaaagttctttttccaaaaaataagcagacgttaaaatgtctttacgaatatgtaacgtcctgtaaatttaaattttaaataggcttagataataaaattaaaaattgtaaaaatatcatacaaaattgaaaaatgtatccattaatatattataacaccctgtaaatttagataataagtaggcttagatattaacttaaaattgttattgtaataccatacaaaaaaaacaaatagtctggctaattggctatgtcaaagccattaat

SEQ ID NO: 5657 - DNA, 458 bp, Diabrotica virgifera
gcagtttaatcatacgagtaatctaaaaacacatttgatattgcacactggtgagaaaccttataagtgtgaaatttgctttaaggagtttagtcaaaatattaactattaaaatactttaacaaaatattaaagtaatgtatgaaaagttaattgatctaaattgtcctttacctgtcaatttaaacgaaagttctttttccaaaaaataagcagacgttaaaatgtctttacgaatatgtaacgtcctgtaaatttaaattttaaataggcttagataataaaattaaaaattgtaaaaatatcatacaaaattgaaaaatgtatccattaatatattataacaccctgtaaatttagataataagtaggcttagatattaacttaaaattgttattgtaataccatacaaaaaaaacaaatagtctggctaattggctatgtcaaagccattaat

SEQ ID NO: 5658 - DNA, 607 bp, Diabrotica virgifera
agccttgcgcgcagtttcgcggttcggctccagaacgatgactcttttttttatcctggtcattggtgattcagttaatcattttatcctggtaatttagttaatcaaagtaatccagaaagcctcccgagaaactaaagtctgaacatatgtgtcggaaagaacgaacccacggaacatgagggaacccttctttggttgacgatactcatttgtgtcgcctctaaagaaggtagtacctctatgttcgtcttgtgaagtgccaacagtctgaagaaaacttctgaagtcaacttactacatctgaagaaaagtctacgataaatttctacaccctcaaataattaaaaaatgggatttattgacggtgcgggccctcgggtccgcatcgttggactgcggtgcgagccttcgggtccgtaccgatggggaagatgttaactctcttccccatttctgagggtgtaattttgactgtcaccgtcgtccatcagacaacaaaatttgtactttagtattttcgcaaaattcttgttgctacattaatttttttccatttcaacagaaacaataaaattattgtacacaaattgatcaataaagcaga

SEQ ID NO: 5659 - DNA, 405 bp, Diabrotica virgifera
  SmartBlast Evalue=3E-13; Info=Phosphoserine aminotransferase n= 1 Tax=Bombyx mori RepID=Q2F5M8_BOMMO
agccttgcgcgcagtttcgcggttcggctccagaacgatgactcttttttttatcctggtcattggtgattcagttaatcattttatcctggtaatttagttaatcaaagtaatccagcttcctctgctgctactttagaccaaattccagtcactaagtaatctgcgctgcctgttcttccgatgaggttcatagggatggctgagaaggctccttgtcccccaccggccatgaacaaaattttataattcacaggaattgtcctgcaatggaagaatatagtcacaattggaattttgacaaaagtggaatgcttaatggaaagtgaaagcggtaaaccttaggcggtattggtatttgaaatttatttttataaagtgaaagttttaaaaagtgaagaagta

SEQ ID NO: 5660 - DNA, 539 bp, Diabrotica virgifera
gttcattgaagggattaggtttttgcatgtccccttttcggaaaggtattccgtagtctttctatatatcctttgcctcttggattgtaattgagtattattttctttcttgtagtcctttactttccatcctgtaatacgttcaaaatatttgacgatctagaactggaaggtgtggacaccttcacatacctagggtaactgttgactaaagataacgccagaaaagaaattaaaagaagaatagtgtttgccaataagtgttactatggcttgagaagacagatggtcacaaaactacccagaaaaattaaagcaattgtctataataaagaaatgaaagtgtagtgtgtcggggtgtgtaagtgtttatttctttagctgagcgctttctacatggacgtggtcatcggagctagtggtcaaatagtggaatgtgccgccacggttgaggtgtggtcatgtgcatcttatgaatataagtgtgatttttgattgcaggtgctaacttctttgtcctttgtacacgccaaacagta

SEQ ID NO: 5661 - DNA, 457 bp, Diabrotica virgifera
gttcattgaagggattaggtttttgcatgtccccttttcggaaaggtattccgtagtctttctatatatcctttgcctcttggattgtaattgagtattattttctttcttgtagtcctttactttccatcctgtaatacgttcaaaatatttgacgatctagaactggaaggtgtggacaccttcacatacctagggtaactgttgactaaagataacgccagaaaagaaattaaaagaagaatagtgtttgccaataagtgtttctatggcttgagaagacagatggtcacaaaacgttatcatcggagctaatggtcaaatagtaaaaagtgccgccacaattgaggtgtaatcatgtgcatcttatgaatataaatgtgatttttgattgcaaatgctaacttctttgtcctccttacaacatcaaacagtaaaaaacagaaaaaacggccac

SEQ ID NO: 5662 - DNA, 634 bp, Diabrotica virgifera
tgtacgctgtgcccacgcgaatttttttggtgtagtttattccctgcccaagaaataaatactataagtattattttaaagcatttggacaaagaaatttaactgttaataatttgaaaatggtaataataaattgtcctacttgggaatacatgcgaaaaacttgtgcccaagtaaaatatgtcacgtaattagaaaaaaaatggtcattatattaaatcataagaagatccagaaaaagaaccagataaaaaatgaagatattgagcaagtggacaaaatgaaatacttacttaggagtctggattacggaagatttaaattcgaaatcataaattcgatcaagaatagagcaattgagggtagactttttgaagatgaggacatttctgagtcaccaaagactcaatctgcaaatctgatattagttgataaaatgttgtatatccactctattcttttttatggtgccgaagcttggattgttaatgctgacttaatgagaaagctggcagcttttgagatgtggctttttaggagaactttgaaaataccagtggaccgatgctattatcaacgaaatggtgttatacagaatgggaagagagagagagagagagagagagagagagag

SEQ ID NO: 5663 - DNA, 367 bp, Diabrotica virgifera
gaaaaaaataatgcatgtttttcaattttatgggaattatattaaattttatctgatgtgcaatccatgttaaaaagtcccttaagggttttttttaactttttcttcgttagccttttaaagattagaccaaagactcaatttgcaaatccaatgtgggatggtaaaatgttacatccactctattcttctttgtggtgccgaagcttcttagacttttaatattgacttaatgagaaagctggcagcttttgagatgtggctttttaggagaactttgaaaataccagtggaccgatgctattatcaacgaaatggtgttatacagaatgggaagagagagagagagagagagagagagagagag

SEQ ID NO: 5664 - DNA, 572 bp, Diabrotica virgifera
acctgctgtatcgcaaaagctttatatgcctgtttcttcttctttagccccatttcgacccaaagtatatatgtagttaatcttatccttgatccccattagagcagacatgtaaaacgctatagcgtttacctcgctacaactctgttccattttaatattttttctgaaatttttacagtatatagctctaacatttctgaagacaaaggtacctgcttcaagtttttattcttattatgataaaggttatgcaaagtttaatcgcaaaagttgtgtgacgaagtttaaaatttagcttcttaatcacatttatttgaaagtagagagtacaaagaagttttctggtaagttttagatcaaaatgttttatagaaaaaaaaatagtgcaacttttaatgtcgacattagaaatccccaatttaacgcttattttttgagggacagacaatctaggtctaatttctcacctttagtactatccttggattataagctttcatttgacacctcagttgtcattctacgtagtatataatgacggagaagtaaacgttcttattctattattc

SEQ ID NO: 5665 - DNA, 431 bp, Diabrotica virgifera
acagtatatagctctacatttctgaagataaaggtacctgcttcaagtttttattcttgtcatgataaaggttatgaatatttcaaagaaaaaggtacggatttgtgcattgcaaagttttaatcgcaaaagttgtatgacgaagtttaaaatttagcttcttaatcacgtttatttgaaagtagagagtacaaagaagttttctggtaagttttagatcaaaatgttttatagaaaaaaaaatagtgcaacttttaatgtcgacattagaaatccccaatttaacgcttattttttgagggacagacaatctaggtctaatttctcacctttagtactatccttggattataagctttcatttgacacctcagttgtcattctacgtagtatataatgacggagaagtaaacgttcttattctattattc

SEQ ID NO: 5666 - DNA, 566 bp, Diabrotica virgifera
gaatttgtatgtactttttgtgtacattgtgtaaaaaatacagttggagaactttgccgatcaaaattcacaatagtggataatatacagggtgtttcattgacaactgtccacacagtaactggagacaccctagcacaaaatacgaagattcaacccaaaacacccaaacaaaatgtggtttaggtcaaatcttcgtattttatgccaaggcctctccagttacaacatggacaactatcaatgaaacaccctgtatataccaacttgaaaaaactaaacttcttttaacacttcaagtactttttttaacttcgtatataaaatgcattatttacactttgtgttaataccagaataaaaaaaaaacaaatactacctaaactaaagacaatttttattccttactagctcccggaccgaactatggccggtgagagaaattatgtctgcgtaaagtttaggtgagtgtacgaccgactacagcgtttgtcatcgaccatggttcgttccgggagctgtacctacatactttctttatggtcaacaaaaaattaatctatatg

SEQ ID NO: 5667 - DNA, 426 bp, Diabrotica virgifera
gaatttgtatgtactttttgtgtacattgtgtaaaaaatacagttggagaactttgccgatcaaaattcacaatagtggataatatacagggtgtttcattgacaactgtccacacagtaactggagacaccctagcacaaaatacgaagattcaacccaaaacacccaaacaaaatgtggctccctaccgagttacagggtgtttcatctaaaaattcaaaacatattcctgctcagcactttaaaactattcgacgtatccttttcatacttagcagaaagttcaactactagacaccctactaaattgtgataaacaaacgtttatatctactaccagaggcgtacgacaggggatggtgaatggttgacccttcttaaattctacgccactggaggaattactattttagtgccatttttcc

SEQ ID NO: 5668 - DNA, 498 bp, Diabrotica virgifera
  SmartBlast Evalue=1E-26; Info=Odorant binding protein 23 n=1 Tax=Tribolium castaneum RepID=D6X1W0_TRICA
aatcaaaatgtgtaaaatgaaatgcatgtgggtcatactagcgtgctctattattatgactacagggttaaatgaaaaacaaatgcaagctgctataaaagttgttacaaatgtatgttcccaaaaagcaaaagcaactttagaggaaatcgagaaaatgcaccatggagattgggaagtggatcattctgccatgtgctacatgtggtgtgcttttaacatgtacaaattgatgcacaaaaacaacacacttaactatgcttcagctacgactcaactgaatcagttaccagaatctttttacgaatctgcaaaatgtctatagaaaaatgcaaagacgaagcgaccttaaacgataaatgtgttgcagcttacgagattgccaaatgtatgtactttgctaatcctgataagtattaccttccctaaagtttactgcatacgtggtcacagtgtttagtataaatttagaacaaaaaaataaatagtctgtaacaa

SEQ ID NO: 5669 - DNA, 499 bp, Diabrotica virgifera
  SmartBlast Evalue=3E-32; Info=Odorant binding protein 23 n=1 Tax=Tribolium castaneum RepID=D6X1W0_TRICA
aatcaaaatgtgtaaaatgaaatgcatgtgggtcatactagcgtgctctattattatgactacagggttaaatgaaaaacaaatgcaagctgctataaaagttgttacaaatgtatgttcccaaaaagcaaaagcaactttagaggaaatcgagaaaatgcaccatggagattgggaagtggatcattctgccatgtgctacatgtggtgtgcttttaacatgtacaaattgatgcacaaaaacaacacacttaactatgcttcagctgtgcaacaactgactcagttaccagacagttattacccatctgcagtattgtgtacggaaaaatgcaaagatgaagctaagaccttaaacgataaatgcgttgccgcttttgaactttccaaatgtatgtacttctgcaatcctgagaagtatttccttccctaaaatttactggatacgtggtcacagtgtagtataaatttagaacgaaaaaataaatagtctgtaacc

SEQ ID NO: 5670 - DNA, 549 bp, Diabrotica virgifera
  SmartBlast Evalue=7E-18; Info=Polymerase delta-interacting protein 3 n=1 Tax=Harpegnathos saltator RepID=E2B9J8_9HYME
catcggccaactgctaacagccaaactagtacgtcccggagtagcggaagtcgtgtacaagaacttgaaggatgctcaaaaggccgtcgatacataccacaatcgacaactagacggacaacccatgaaatgcctgttggtgaacaagagaccactcaattaccccacagctgctcccatctcaaaacctgaatcgtttttgaaagatcgtatcggcctactatgaaaacaaaaatccataaaacgaacaaatgatgtaagtttgctgacgttgttgttttattttttattttcaggatgacggcatcaagaaaaatatccgaagtagcgccgtgcccgcctgaaaataagttagtgcccgatattactacaatacataaagtactttttcatcggaaatagtatatagtgttagaaaatatatgtttctcttcattatcttaaattgaattatttatatgacctgaacagtgcgagaaatgctcgaaaacgtcacaaaaacgtttggacagcttgtatattagtgcaccctaatatttacgtggcatt

SEQ ID NO: 5671 - DNA, 448 bp, Diabrotica virgifera
  SmartBlast Evalue=1E-19; Info=Polymerase delta-interacting protein 3 n=1 Tax=Harpegnathos saltator RepID=E2B9J8_9HYME
catcggccaactgctaacagccaaactagtacgtcccggagtagcggaagtcgtgtacaagaacttgaaggatgctcaaaaggccgtcgatacataccacaatcgacaactagacggacaacccatgaaatgcctgttggtgaacaagagaccactcaattaccccacagctgctcccatctcaaaacctgaatcgatgacggcatcaagaaaaatatccgaagtagcgccgtgcccgcctgaaaataagttagtgcccgatattactacaatacataaagtactttttcatcggaaatagtatatagtgttagaaaatatatgtttctcttcattatcttaaattgaattatttatatgacctgaacagtgcgagaaatgctcgaaaacgtcacaaaaacgtttggacagcttgtatattagtgcaccctaatatttacgtggcatt

SEQ ID NO: 5672 - DNA, 518 bp, Diabrotica virgifera
aaacggtcatcagaaggggctaaagaggaccaacacagttacactcagataaagacaccaaagtggctaatacactagaaaaaaaaaggcacaaacgataattgtgattagcagtattagaggtattggaattttacaagagctatgagtcatgccgatttagtacacaagtttacgtgcaattttcaaggtcatagctcttatcaaaatccattacctataccacaaacgagataattgaaaatctcgggaaatcagtctaaatcgaaacaatttccagtctcataaatttatagtcacagtgtgttgaacatttcctgatattaagaaaacacaactgggtaaagtgaaggtatcccaatattttttaataatagaaagcttttactttcaaatctatatagtatttccagaatttatatttttaaaacttgatgtaatagtcgtttggttttttacatatgtaatatataaaacggagatattatttaaaatccatcaactttaacataactcat

SEQ ID NO: 5673 - DNA, 471 bp, Diabrotica virgifera
aaacggtcatcagaaggggctaaagaggaccaacacagttacactcagataaagacaccaaagtggctaatacactagaaaaaaaaaggcacaaacgataattgtgattagcagtattagaggtattggaattttacaagagctatgagtcatgccgatttagtacacaagtttacgtgcaattttcaaggtcatagctcttatcaaaatccattacctatacccagtcctgtttttgtgacggtacgcgccggtacggcgtaccggcaccttttgggacaaaaaataaaaaaaaacaatacattatagacaaattcctgaattttttccttgctcccaaatagctttaaaacgcccttattgaggctaaatttaaaaagtttcccgggtgcagaccccctttatgagcagtccccagacccccggaaaattgcgtaccggaacctatattgttcaaaaaacagcactggt

SEQ ID NO: 5674 - DNA, 541 bp, Diabrotica virgifera
gccccatctcggggggtggaagttttttattatattttcaccgcaggagttgataaaatcattcattctaagcaaaaattgttctatacatttttttgataaaattaatagttttagatttgttcgctatcgaaagtgttagttgtatacctgtctaaaaaatcaatgtttttcgatatactcatttacgattcactcaatttttgccgtagaaaaaattttttcaaccaagttcttgggaattaaataactacaatttcatatttaaacattttttcgtatctctgatgctaatctttctattctgaagaaaaggcattttttaccaaactacaaaaattcgttattcgttttaactccagttttttttaaaactaatcattctaagccagtcaaacttctagaactattactaatacataaataaagaagaatgaataaggccaatgactaaaaacaccgctaacttacattattatgcttacaattggatttctcctttttttttttcaaaaaaatatattgattttttaaccgtaac

SEQ ID NO: 5675 - DNA, 448 bp, Diabrotica virgifera
accaaaatacaaaaagtcgttattcgcttttaactccaattttttttaaaagttaatcattatattctacatttatgtcaagatgcagtggaggtgaataagccgagacacgttaactgttacacaagcagcactcctgaatcatgatttacaatgtgtaaaatttgtaaatcattatatgtgatttacaatgtatacacattttaaatcatgattcaggagtgccccttgtaacagttgacgtgtctccgtttgtttacttctgctgcatcttgagtgtgaatgtagaataagctagtcaaacttctagaatatattaaccgtacataaataaagaagaatgaataaggccaatgactaaaaacaccgctaacttacattattatgcttacaattggatttctcctttttttttttcaaaaaaatatattgattttttaaccgtaac

SEQ ID NO: 5676 - DNA, 672 bp, Diabrotica virgifera
  SmartBlast Evalue=4E-49; Info=Macrophage erythroblast attacher n=2 Tax=Formicidae RepID=E2BV49_9HYME
ttttatttatgtttttatacattagttagatagtctcaaaatggcagatgtaaaatctctggaacatcctacgttaaaagttccctacgaaattctcaacaagaaatttagaacagcccagaaggcaatagatagagaagtgtcacacgttcaacaacaagctacacttatagaggaaactctagaatcagatgtaaaagcaaaagatatttctagccttttgggaggaatggttgaaaaacttcaagttttgaaaagaaaagctgaagagagtatagccgaggagttggtggcctctaatgtttgtaaaagaagattggaacatctgaaagaacacaacactttcagtccctccggtgggctgtcacaggctgctcttaaccaatggcggcgcaaacgtttagatagaatggtagtggagtattttttaagaaatggatattacaatgctgcaattactcttgctgatagatctgatattaaggatttaaccaatattggcgttgaccgaaatggctcgacaaaatagcggacaagtgatctgtcccaaaacgaaagaagtgtttcaatttaagaaggtagaaaaagtattcgtaatgtaatgtgatattgtaagtaggtactcggtactgttttagtatcttttcagaatatatcttatgtatatattta

SEQ ID NO: 5677 - DNA, 321 bp, Diabrotica virgifera
  SmartBlast Evalue=6E-22; Info=Macrophage erythroblast attacher n=2 Tax=Formicidae RepID=E2BV49_9HYME
tatgtcagccatatctcaacgaactcgctgactcgttaccatttgctcattgctcacaaagtcgtctatattgccatattagcggattacccatgaacgaaaacaatcaacctatgatgttaccaaatggtcacatatatggagaacaggcgttgaccgaaatggctcgacaaaatagcggacaagtgatctgtcccaaaacgaaagaagtgtttcaatttaagaaggtagaaaaagtattcgtaatgtaatgtgatattgtaagtaggtactcggtactgttttagtatcttttcagaatatatcttatgtatatattta

SEQ ID NO: 5678 - DNA, 537 bp, Diabrotica virgifera
aatgatccaaaaaatctgatataatatctgaccaggtcgaattttttgttaaattcataaaaaaatgtttaatttttatttattaattaattatagttggaacaagattatatcaggcaacccttgtttttttgtaattgttaacatgctaaattgcatatccaatagtttttgtccattgaacggatcggtgcagatcgaccttatatcggatcctctactaatatatgacattaaaaattgttaccaggatgtcgatgttgtcatccttcgacagttttagggcttccgtagtaaggccatccggtccaggagtgttgtccagttttgctatttttatagcgtagcccacctcggcacgaatttggagggccagacaaagtttctgcgggcatgatacaataactgattttactgtcaccgttgcatgtggttgtattttttaaagacagatcacatgctatgatttttttgtggcggatattcttgagttggggttgatttcatgtaatcgaatgaacagttggcaatatcatt

SEQ ID NO: 5679 - DNA, 454 bp, Diabrotica virgifera
aatgatccaaaaaatctgatataatatctgaccaggtcgaattttttgttaaattcataaaaaaatgtttaatttttatttattaattaattatagttggaacaagattatatcagacaacccttgtttttttttgtagttgttaacatgctgaattgcatatccagtgatttttatccattaagacggatcggtgcaaatcgaccttatatcaatttttaggcgtgtcttaggtgtttcttgtatatactcgaaatttcttgaacctttttaaagtaagccttttttataataaactcataggtttactattgtcaaattaggtcatctggtatttataccaatattttcaagtttccagtcatttgtccagcgttacatacatttctgtaatttcagtatggtacttcatccagttgctagacattatacactgcgcgtcatagaaaacgag

SEQ ID NO: 5680 - DNA, 637 bp, Diabrotica virgifera
gggatattattacatttaaatataaatgtatatatttatttatttattaattttaatttaattaatatataaattaatgaaaattgaagtataatttaaattaataataaaaaaaaatattttaatagtaatatttagataaaaataattattttaaaattttaaattataaaacttaaagtaaaaagaaaaatataaatagaaatataaagaataataaaaattatttaaatttatattataaaaattaatatataaatattttatagtaaattattttaatctaatttgttataaatatagattatattgggtggctatgctggaaaatttcgacaaaatcttaataggtgattattagtttattttatggtaaataataaatgttgaaattttatttaaatttaagctagattatgataatctattagtgtacattatagcggggataatgtattgagattttgctaagatttaagctgttatggtaatttattagtgtacattatagcggggataatgtgctgagatttaaactagattgtgataatctattagtgtacattatagcggggtaatgtatgttgagattttgctgagatttaagctagttatggtaatttattagtgtacatta

SEQ ID NO: 5681 - DNA, 352 bp, Diabrotica virgifera
tatggtaatttattagtgtacattatagcgggggtaatgtatgttgagattttgctgagatttaagctagattgtggtaatctattagtgtacattatagcggggtaatgtgctgagatttaagctaggttatggtaatttattagtgtacattatagcggggataatgtattgagattttgctaagatttaagctgttatggtaatttattagtgtacattatagcggggataatgtgctgagatttaaactagattgtgataatctattagtgtacattatagcggggtaatgtatgttgagattttgctgagatttaagctagttatggtaatttattagtgtacatta

SEQ ID NO: 5682 - DNA, 497 bp, Diabrotica virgifera
  SmartBlast Evalue=1E-17; Info="Protein takeout, putative n=1 Tax=Pediculus humanus corporis RepID=E0VZK3_PEDHC"
attaaactcatcaagatgaagtggctatttgttttgtcttgtgttgtgtttgttcaaagtgcaaagaaattgccttcctttgtcgaagtatgtccccgtgataataaggaggcatcagaatgtctagcacgaaacgtgaagaatctaacaccaatgcttgggaagggaataccggaactttttatacctccgttagcaccacttgtcttacagtcagctgaaatagcaactagtccaagttttacatgtagtttaaagaacgctaaagtataccacttggattccatagtaatgactgatgtcttcataaattttgacacaaaatcgtggggtgcggacgtattctttccggtgatagaagttgaaagtgattacaagatgaacggaaaaattctagtacttgaactaaacagcgaaggaaagagtcgaggaaatatgactaacatcaaaacgaatgtacttgttttctttgacgtagtgacaaggaatggtaaaga

SEQ ID NO: 5683 - DNA, 493 bp, Diabrotica virgifera
  SmartBlast Evalue=9E-18; Info="Protein takeout, putative n=1 Tax=Pediculus humanus corporis RepID=E0VZK3_PEDHC"
attaaactcatcaagatgaagtggctatttgttttgtcttgtgttgtgtttgttcaaagtgcaaagaaattgccttcctttgtcgaagtatgtccccgtgataatataaagacggcagaatgcgttgaacgaaacataaagaatctaataccaatgcttgctaagggaatacctgaacttgcagtaccaccactaggtccccttcacttaccgtcagctgaaatagcagcgagtgcaggtttttcagctactttaaaagatgttaaactctaccatttagacaaccttatagttcataatatatttatgaatttcgataccaaacaatggggcgtagaagcaacttttccgtcgttaggaattgagagtgattacaaaatgaacggaaaattacttgtctttgaattaaacggcgaaggaaagactcgaggaaatatgactaacatcagggcaaatctaactgttttcttcgactatataacagtgaacggca

SEQ ID NO: 5684 - DNA, 511 bp, Diabrotica virgifera
cgcgaaaacagtgtcataacgttacatatttagttggctccggaccaatatgttctaatcacctccaaattttgtataattgttgcaaaactgacacttaggatcctgaaacagtttgcagttggtgatctgtgattacttgagttacttgagtgtcgtcttacttctcctgaagatgcttaagttaagatacgatcctgtccatgggtatgactactcatacgaaaatacctatatcccggactatagaatccatcgagcctatgattactattttgattggccatggagataccgcgtatggctaccaaacagaccttacaggcgctttttgcataaggagcttcgcggagtacgtgatatcgtctactactcataattaatacgataatataattaaatatggcgcatttttgtaaatattttaacacgtttcaatattttttaatttaatattcatattgtactgatttttctagcttattttataactaataaataaattggtttt

SEQ ID NO: 5685 - DNA, 477 bp, Diabrotica virgifera
cgcgaaaacagtgtcataacgttacatatttagttggctccggaccaatatgttctaatcacctccaaattttgtataattgttgcaaaactgacacttaggatcctgaaacagtttgcagttggtgatctgtgattacttgagttacttgagtgtcgtcttacttctcctgaagatgcttaagttaagatacgatcctgtccatgggtatgactactcatacgaaaatacctatatcccggactatagaatccatcgagcctatgattactattttgattggccatacgcggtatctccatggccaatcaaacagaccttacaggcgctttttgcataaggagcttcgcggagtacgtgatatcgtctactactcataattaatacgataatataattaaatatggcgcatttttgtaaattattttaacacgttttaatatttttaatttaatattcatattgtactgatttttc

SEQ ID NO: 5686 - DNA, 513 bp, Diabrotica virgifera
ggaaaactttaatagtgaggtatatggggccatggaggtgtgaactagttgattcttcctccttcctggtctggtcagttttgtctttgctcctgtgtttttgagctgatgatggctcgtgaggggccgaagcgcgtcgttgtatgaccgttttattaatatatacgttgtgtggtgcttctttgagttttgtacttcctttcgatagtagattttttattaaaacatttcatgcatggtatttaattagactacagtctgattattatcagtcaaggtcagagtgcagtggcgatggcgtattcgtgttcagctaccccaaaaaccaccgagtaagaaaatctatcccttaatacattaggtacttattttgacatttttatacacttttggataaattttttggacattacagtacagcaattagccccggagcaaattgaacctaagccagacacaacctgagctggcgggacaggtgacccgtgcatttattttttagcgtgccgcata

SEQ ID NO: 5687 - DNA, 456 bp, Diabrotica virgifera
aagcacatgtattgtttgtagttaaatgttatttttattatttcttattttggtgcatacgtagctatcctcctttgtagaatcactgttgctatcaacacgtggtcatatttttagttatttaaattttatactttcaaaacatcgatagtagattttttattaaaacatttcatgcatggtatttaattagactacagtctgattattatcagtcaaggtcagagtgcagtggcgatggcgtattcgtgttcagctaccccaaaaaccaccgagtaagaaaatctatcccttaatacattaggtacttattttgacatttttatacacttttggataaattttttggacattacagtacagcaattagccccggagcaaattgaacctaagccagacacaacctgagctggcgggacaggtgacccgtgcatttattttttagcgtgccgcata

SEQ ID NO: 5688 - DNA, 568 bp, Diabrotica virgifera
ttattgcaaaaaaatcgctcaaacacatccatctaagatgataactaagaacttgttggtgctgtgtttagtggtggtagctattactgtggtttcaggggcaccaagagctatcaagaacgaagatgaccttaaaaggagtgtagtcgagttcctgtcacaagataaagaatttttaacagcccttgaacactctggacttgtggttgagcagagtcctcttggaaagcaaataagcaaaagagacgctgaagaagaaaataatgaaacaactggattttttaagaaagcagccaaggttatacttaagataatagtagaaaaagtaatcgagaccattggaggaatgttatttggttaataagaatttcatatgtaatgtaaagcattatttacctatgtataaaataaagttaagttttgttataaaaatgtataaatgtttatagaatttttccgtacaaagctggcatgtgatatattattttttcatgttgctccatgatatttcctagatctaaaagcttcatcacatagttgtagtaatttttccatttccttttttgac

SEQ ID NO: 5689 - DNA, 422 bp, Diabrotica virgifera
ttattgcaaaaaaatcgctcaaacacatccatctaagatgataactaagaacttgttggtgctgtgtttagtggtggtagctattactgtggtttcaggggcaccaagagctatcaagaacgaagatgaccttaaaaggagtgtagtcgagttcctgtcacaagataaagaatttttaacagcccttgaacactctggacttgtggatgtacaacatgatcatttgtcaagacaaaaaagacaagctgacgttgacatggatattgatggtgatgtagaagatgttcctaaggaaggcttctttgatagagcagccaaattcgtggtcgaacttgtacaaagattccttaagtggattaatacagataattaaattaaacgataattattactgtacgataaataaatgattgttaattttt

SEQ ID NO: 5690 - DNA, 575 bp, Diabrotica virgifera
gaatattatttcaattagcggggtagtccatcgcttttcgttacactggcgccgcaacgtttctcatgtgcgctttttcgttacactggcgcaccaacgcacttgtcttatccgaagaatcgagctgtgagtgtgtggtttggtagcagacaacaagcattaataaatactattttcttatattcaatttttgcagtaaatctatatatattatctattttggtactttttgactacctttttgactaatttttatatattttcacatgttatgggtcaaaaagtattaccaatctcaataatttaattatatatttcaacatatttaatttaaattacatttacagttgcaaatattggtatttttaacatttggaactttttacctacttttttggctaatgtttatagtagaaatcttcacattaatgtccacatggcattttttgttttttcaatttaaccagtttttttggtagttcttctttaattactttcttattttgtcgcaactttccaaaacccaagagaatttttccattctttgtcacattttctgtactttttatacatac

SEQ ID NO: 5691 - DNA, 409 bp, Diabrotica virgifera
aatatatttcatttctatattcaattttttgcagtaaatttatatacttatctactttggttactttttgactaatttttatatattaaacgctaatttcatgttatgggtcaaaaagtattaccaatctcaataatttaattatatatttcaacatatttaatttaaattacatttacagttgcaaatattggtatttttaacatttggaactttttacctacttttttggctaatgtttatagtagaaatcttcacattaatgtccacatggcattttttgttttttcaatttaaccagtttttttggtagttcttctttaattactttcttattttgtcgcaactttccaaaacccaagagaatttttccattctttgtcacattttctgtactttttatacatac

SEQ ID NO: 5692 - DNA, 531 bp, Diabrotica virgifera
agatcataacaatacattgtaaattatgattcgggagtgcccctagaagcatccaacgcgtcttggcttgttcatttctactgcatcttgattgtaaatttagagtacaagtacttaaaatttaatttataactggtgaaaactggtggcattttgtgaattttttgtacaatttggaatgtagaaaaacggtggaatagaacaaggcactggtcgcattgtttgtgaactacgagagagcatttgagttgacttagaccagggcggatctgttttgaggtggatgtgagaggtggcattcggacctttgcagataaagccaggtaacaacttcaacaattataattgacccatgctccctctcaaatatgcccggaacattaataaaaaaattcaaatattcaaaaatttcgaaaaatatcgacttcttttccactttcaccgcttacaacttcaaaaaacgattcattttggaacgaagtcgtagataaagaaaattgaactttgtataatatacgaccggtttaaaat

SEQ ID NO: 5693 - DNA, 417 bp, Diabrotica virgifera
agatcataacaatacattgtaaattatgattcgggagtgcccctagaagcatccaacgcgtcttggcttgttcatttctactgcatcttgattgtaaatttagagtacaagtacttaaaatttaatttataactggtgaaaactggtggcattttgtgaattttttgtacaatttggaatgtagaaaaacggtggaatagaacaaggcactggtcgcattgtttgtgaactacgagagagcatttgagttgacttagaccagggcggatctgttttgaggtggatgtgagaggtggcattcagacctttgcaaataaagccaggtgagaacttcaataattataatttacccacgctccctctcaaatatgcccggaacattaataaaagattcaaatatccaaaaatttcgatttc

SEQ ID NO: 5694 - DNA, 558 bp, Diabrotica virgifera
tggcattaggatttttgactatattagatgatttttctttatctttttttaatacatttcgattatatcacttttctactttcatttggcatacgcggaattgccatatcttcattattttctgtctcatgttattgcaaaataaaggtctctgggataaacaaatagaataacttttaaactaattattggatcggtctcaaattttgagggtctattaagtaccccaataaccaactttgggtgaaacactaaagttctaagttagttttagtaaaagttattaatagataacgattttcacttattttgcagtctgcgtagcaacaaattaactttttaaaaatgtataaacattctcaatttctttgtaacacgaaaatgcagcagctgcataatactctggttaaatctgagagtgcaggaagagtctataccggtttcgggggttgtttcccctcatcagtagtcccatatcctcctctctcagattcttccacgtaccacactttgggcctttccgaattgcaaagaaataaatgtcacggatgaactagg

SEQ ID NO: 5695 - DNA, 416 bp, Diabrotica virgifera
tggcattaggatttttgactatattagatgatttttctttatctttttttaatacatttcgattatatcacttttctactttcatttggcatacgcggaattgccatatcttcattattttctgtctcatgttattgcaaaataaaggtctctgggataaacaaatagaataacttttaaactaattattggatcggtctcaaattttgagggtctattaagtaccccaataaccaactttgggtgaaacactaaagttctaagttagttttagtcaaagttattaacaaataacgattttcactcattttgcagtttgcatagcaacaaatcaactttcaaaaatcggcattttgaaggttttcaatgttctaaaaatctgaattttgtaattttatgtcaactattactaatta

SEQ ID NO: 5696 - DNA, 509 bp, Diabrotica virgifera
cttttgcaaaagctcatagtttctgagttatacgtgaataacagatttaaaacatgcattttttacgaaaaaaataaaatctttgatctttaataactcaaaaaagtattgatttatattaataactttatataacaaattttgcttagaatttgtccctctatcgacttatggtattattttaataaaataattttcaccccgagaaggggtggcatccacccccagggtaaaagcgcaagttggcacatgtcacctttgttccttgagatatcctctaaccactcaccaattttcatgcaaatcgatggaggttcaacgaaatcggaggtaatagctcatataatagtcaccttcagtgactacactattttgccatcattctttttttgctattattcttttttcacagagaattctaatagaattgacttaccgacaaacaattttcttaccaatatagtaaacaacttgaaaactctatacactcggttttagttgtcacaacg

SEQ ID NO: 5697 - DNA, 452 bp, Diabrotica virgifera
cttttgcaaaagctcatagtttctgagttatacgtgaataacagatttaaaacatgcattttttacgaaaaaaataaaatctttgatctttaataactcaaaaaagtattgatttatattaataactttatataacaaattttgcttagaatttgtccctctatcgacttatggtattattttaataaaataattttcaccccgagaaggggtggcatccacccccagggtaaaagcgcaagttggcacatgtcacctttgttccttgagatatcctctaaccactcaccaattttcatgcaaatcgatggaggttcaacgaaatcggaggtgaaaaccttcagtgactccactataacactgactaaacattctgcaaataaattgagagtcacccaaaaaaatggaaagagcaatgttgggaataacaagaagagatatggtactaaata

SEQ ID NO: 5698 - DNA, 585 bp, Diabrotica virgifera
  misc_feature (253)..(256): n is a, c, g, or t
ttaattaaactgatttttgtgtttactttattgcaacttctaataaattataccatatcgattcacataataataatcaagatgattttattttcattggggaagaaggaaatggatgtaaatcagaattaataaaaataattatataaaatcatgaagtagacacaccataatcagaaaacaatattggtttaaaaagaaaacattcaaaaatatggattggtgaagaagtaaaaacaaaatgaaaaagttnnnngaagagtttgaacaagagggtaatcagttttaaataaatatatctattatattacctacatatgaaaacttttgatatatattgcaatcatgtagatggaatcccgcattctttaagaaaaaaaaaaagcaatttccagaaggatataataagaagcaataataaaataaagtagataatgcaagaaagaacaaagccattatttaacatagctcaacaacttcacatagaaaaagatgaggaaagggcacaacagaagtatgccagataaaagggtagaagggagaagagaagtggatttattcaatttaaaaattaaactgcaaatg

SEQ ID NO: 5699 - DNA, 365 bp, Diabrotica virgifera
ttaattaaactgatttttgtgtttactttattgcaacttctaataaattataccatatcgattcacataataataatcaagatgattttattttcattggggaagaaggaaatatattgcaatcatgtagatggaatcccgcattctttaagaaaaaaaaaaagcaatttccagaaggatataataagaagcaataataaaataaagtagataatgcaagaaagaacaaagccattatttaacatagctcaacaacttcacatagaaaaagatgaggaaagggcgcaacagaagtatgccagataaaagggtagaagggagacagagaagtggatttattcaatttaaaaattaaactgcaaatg

SEQ ID NO: 5700 - DNA, 509 bp, Diabrotica virgifera
  misc_feature (122)..(122): n is a, c, g, or t
  SmartBlast Evalue=5E-11; Info=Zinc finger MYM-type protein 1 (Fragment) n=1 Tax=Camponotus floridanus RepID=E2B181_9HYME
aggggagagaataagtctggtaataggggcgcacaggaatacttgcattgggcgcaggtcagactagttacgccactggcttcagtgttcgaggttgtgcagacacacagtttgctttccgngaacagtgaatatgtagttgaaagtagctgtttcaacagttttgtgactttaccatgaagaggtatcagaagcagacttcttgctagaaataccaaggctcagaaggacatttacaagcggccaatattacagctaaatggttagctgtagactttttaaaattcatggtggaatgcgattttatggaatctctcccaaacttggtcgccttaaacttgtttatgaccatttttgcatcggttgcttcatgtgagagaagttttgggaagctaaaatcaatcaagaattacttgcgagaaacaatgacgtcaacaaggcttaataacctcggtttattaactatcgaacggagcaattaatgttaggagaatggagcggtcaatgtt

SEQ ID NO: 5701 - DNA, 455 bp, Diabrotica virgifera
  SmartBlast Evalue=2E-22; Info=Endonuclease-reverse transcriptase n=1 Tax=Bombyx mori RepID=D7F170_BOMMO
aggggagagaataagtctggtaataggggcgcacaggaatacttgcattgggcgcaggtcagactagttacgccactgttaatttttcttggcttgtcgaaatctacaaagatttggtagatatctatgtcgtccttccaggatttagctaatatttgtttcaccttgaacagctggtcaatagtagaccgtcctggtctgaatccggcctggtattgtcctatgatttgttctgtgaagtggctcttaatcttcggtttatgatccacttaaaacaccatttaactcacatagagtaaggatatgcctctataatttttgtagttaagtttgtctccctttttgtggactgggcatataattgctcttttccaatctcctggaatttcttctgtgtgccatacgtctctttttattacaaattttactacatagcaaactattacacactgtat

SEQ ID NO: 5702 - DNA, 515 bp, Diabrotica virgifera
tacaagtatttaagtgtttacttaatactaattgaataaagtcatttctttaatgctttattcaattgctattgagtaaatacttaaatacgaggaagtaaaggcaacaacttttttttattcaatagacccactatctgtatatttcgtttttaatttttaataaacaaaaattatgtaaaacaaaaatgtaatatgctgacaagttgaatttgagggtaatacgatatttttatcgatcacggttttaagtaacatgaatcatttttcaccttattttctaataatgtgtttttgtaaaggcataactttgattattaatttcgtatcgccgcttatttagtctaccaaaagttatcagaatttaatgacaaagacaacgcagttttcactcggggtgttgactatgctaatacttttatttatcataataaattgtacttaggtaccatccgtattcatttcagatacttccatctcgcaaacaaaaacaggtcaaaataaacatctggcgg

SEQ ID NO: 5703 - DNA, 450 bp, Diabrotica virgifera
gcaataatttacaattactgcaggtcatactccctccgttactgatcggtcataaaaataacactatctgcatatttcgtttttaatttttaagcataaaaatgtaatatgtaataaacaaaaatgtaatatgctgacaagttgaatttgagggtaatacgatatttttatcgatcacggttttaagtaacatgaatcatttttcaccttattttctaataatgtgtttttgtaaaggcataactttgattattaatttcgtatcgccgcttatttagtctaccaaaagttatcagaatttaatgacaaagacaacgcagttttcactcggggtgttgactatgctaatacttttatttatcataataaattgtacttaggtaccatccgtattcatttcagatacttccatctcgcaaacaaaaacaggtcaaaataaacatctggcgg

SEQ ID NO: 5704 - DNA, 611 bp, Diabrotica virgifera
gatggaaaacatattaagttatgcgataaaaagaaatgaaactggtagagttgggaagtttagcggtgaaggcctataggtttgcattatatttattgtttttcatcttatagataggtgtatcagaggagtattcaactaaaattatcacagttacagtggcagttgccaaactcgtccgatacgtctaaaggtgggaaacaataaatggaatgtggatttgtaggtttttaccgctaagtttccgaactctactagtatcatttcttttgttttccatcttttgcgttattttgccggttattagcgcgctcatcactgtatagcgggcgggctagatcaggtggtagatgtctgatttccacgcaggtaggccggagatcgaaatccaatgccgacgagaacatctagacatttttaaaaatgtctataggccccaggtcgactcagcctgaataaaatgagtaccttgggtaaaaccaggggtaataataggcggttgaagcgtagcactggccctgttaccttccttgtataccgtaggccctagatatagcagactaccctgctataatcccaaagccgcgtagcggtataaaacgggagactat

SEQ ID NO: 5705 - DNA, 341 bp, Diabrotica virgifera
cacattttagctgtgcccgttggctttttcattttctaccttttatcttctatgtgagggccggcgtagccgagtggtagtgtgctaggctagcgtgccggtggtccggagttcaaatcctaccgccggcaagaacaactagacatttttaaaatgtctataggccccaggtcgactcagcctgaataaaatgagtaccttgggtaaaaccaggggtaataataggcggttgaagcgtagcactggccctgttaccttccttgtataccgtaggccctagatatagcagactaccctgctataatcccaaagccgcgtagcggtataaaacgggagactat

SEQ ID NO: 5706 - DNA, 531 bp, Diabrotica virgifera
  SmartBlast Evalue=6E-13; Info=Endonuclease-reverse transcriptase n=1 Tax=Bombyx mori RepID=D5LB38_BOMMO
aatctctgatattcctcagccaagatttttctttctccccaagccttttttcctgtctaaatttccttgtatgacgacgtagcagagagtatttatcgtttcgaagtctgtggtccagatacgatgttttttcttattttaattgtgttcagcttaagctttctgccatgtccaattcgtcttaacagttcttcgtttgagacttttgcagtccaaggaatttgcagaatacgccatatagccacatttcaaatgccttcaatttttttacggattgggcttttagagtccaagctgctaccccatatagtagttgcgaccacacatatcattcgacgaacctcaatctgctatttctaaataacagattgagatttacagaaatctgctaattataaatccttctcgggctatttcgattctgaaattaatctcctgatcttgatcttcatcatcatcattatcagtggcgttacagctctttatgagccaaagccttcttcagaataatcctccactcaccctgtctct

SEQ ID NO: 5707 - DNA, 431 bp, Diabrotica virgifera
gttatgaagtatgtgacccagatacgatgtttttcttatttttaattgtgttcataagcttcctgccatgcccaattcttcttaacacttcttcatttgagacttttgcagtccaaggaattttcagaatacgccatatagccacatttcaaatgccttcaatttttttacggattgggcttttagagtccaagctgctaccccatatagtagttgcgaccacacatatcattcgacgaacctcaatctgctatttctaaataacagattgagatttacagaaatctgctaattataaatccttctcgggctatttcgattctgaaattaatctcctgatcttgatcttcatcatcatcattatcagtggcgttacagctctttatgagccaaagccttcttcagaataatcctccactcaccctgtctct

SEQ ID NO: 5708 - DNA, 502 bp, Diabrotica virgifera
aaattagttttttaacatatttggtgtttatgttaaaaattacttacattttgaaattttaattgaaaaaatattgataatactgcaacttaatctcaaaatatatatcactaaaagctaaaagcttaaaactacttactttgcattatatcgtaaatgtaagatttaataataggtttgttctagcaaacagtcaaactagtcagaaaccgtcagcaaacagttggtcagtgagagaacataatacagtcaccagtgctatcccctctactcgcgctggtcgactattcgctgatggtttcaaaccgtttgaaactgatgctagaacaaacctatgagtatcattatgatacttgaatgaacagttctaaattttatatctatacacatttttatacctctttatgtgtattaaactgtgctaaattatatttaagacagactgggttaaaatccaaaaggagacaattaaatagattttaaaagtctcagaatatgatag

SEQ ID NO: 5709 - DNA, 467 bp, Diabrotica virgifera
aaattagttttttaacatatttggtgtttatgttaaaaattacttacattttgaaattttaattgaaaaaatattgataatactgcaacttaatctcaaaatatatatcactaaaagctaaaagcttaaaactacttactttgcattatatcgtaaatgtaagatttaataataggtttgttctagcaaacagtcaaactagtcagaaaccgtcagcaaacagttggtcagtgagagaacataatacagtcaccagtgctatcccctctactcgcgctggtcgactattcgctgatggtttcaaaccgtttgaaactgatgctagaacaaacctaatagtatatgtgtcacataaaagtcattatttgcacttctataataaatttaggaataaagctgaaattaagaatttgtttattatatgagctttgttttattattagttcgtttggaaaggtccaatgttc

SEQ ID NO: 5710 - DNA, 582 bp, Diabrotica virgifera
tacatactgagattatagaagatcgagttaatgatgaatatgttcagtctacagaaaatatgaaggatgatattgacataatctaagtgataatgaacatgaagtaacaaatgacaatgttgatatcgtgaaaacttcacctccgtgtggtactaaaaagtgtaaagattgtatagcttgctgttacgctgttttgcgataagtacaacttatatcagtgtgcttatcaaaatttaaatagcatttattaactttttcaatgacacaagtatcttgcgaaagaagcttttcaacgttgaaatatataaaaaattggttaagaagtactttaacacaagatcacttggaaacattgatgctaatggctatagaaaaaagaagctttgaatgagcttaaaaatgatgaaataatctacgaatttgctcaaaaatttactttattgcggaaattataaaataatgtttggattattgtgttgtattaacatttaaatatttttaaatcaaagtatttgcactgtacttgtatttgtactctcttgtacaattgatttactaaactcccaacttaacacataactg

SEQ ID NO: 5711 - DNA, 387 bp, Diabrotica virgifera
tacatactgagattatagaagatcgagttaatgatgaatatgttcagtctacagaaaatatgaaggatgatattgacataatctaagtgataatgaacatgaagtaacaaatgacaatgttgatatcgtgaaaacttcacctccgtgtggtactaaaaagtgtaaagattgtatagcttgctgttacgctgttttgcgataagtacaacttatatcagtgtgctgtgctgtgtgcttatcaaaatttaaatagtataatataaagcatttattaactctttcagtgacaccagtatcttgcaaaaaaaagcttttacaacattgaaatgcataaaaaaatcggttaaagaagtacttactttaacacaagatcacttttatgctaat

SEQ ID NO: 5712 - DNA, 529 bp, Diabrotica virgifera
ctgatataaaactaaattggtaatagtagatcgacccgaaaaaaacccatgctgattcttatttattaaatttcgacataaccaactcaactgaccacaaaccaagctgtcaaaaagtttgggaatagatgactgtatgcaaacacttctatagttcttaacattgcttttatctccgttcttgtaatttgatcaatccatcttgtagtacagataattttgactatagtgaaagtacagaatgtagtaataatagttatgacaaagatgaggaacagcaaaatgttagtggtaatatcaatgatccaggcgtgggtgtaagcctgaataaaagttcaaggcctggtaggtgtattaaacgaccacaaaggtttgatgactttgttacgtattagttataaggactttgtataaagagggggatgttacatatgatacttgtatcattacgtacataggtggcagtagacactctcaatgtaatggtcactgtcaaccaataaagacagtcaataaaagttgtatcttg

SEQ ID NO: 5713 - DNA, 436 bp, Diabrotica virgifera
  SmartBlast Evalue=4E-15; Info=Reverse transcriptase (Fragment) n=2 Tax=Maculinea teleius RepID=Q0MWX5_9NEOP
ctgatataaaactaaattggtaatagtagatcgacccgaaaaaaacccatgctgattcttatttattaaatttcgacataaccaactcaactgaccacaaaccaagctgtcaaaaagtttgggaatagatgactgtatgcaaacacttctatagttcttaacattgcttttatctccgttcttgtaaataggcataatataactattttccagtaatcaggaaaaacagatgttagggacaaattatataaaacatgcaatggttttgtaagagtacagatacaccttttaagtagaatattgggtattccatcaggacctaatgtggttttactaggtaaacgcaaaattttattataaatttcttgtatagaaatgtctgcaaagtcgatattttgtgaacaatttacaggtaaaactaaactatccacagaac

SEQ ID NO: 5714 - DNA, 512 bp, Diabrotica virgifera
  SmartBlast Evalue=3E-11; Info=Isoform 4 of Protein MICAL-3 n=1 Tax=Mus musculus RepID=Q8CJ19-4
aaaccattcttgtaataagtccgcttcatccttagagggatcaaaactggcttctcctcgtaacgatttttctactaatactcctctatcttccagctccttcatcttcacttcagtctcttctaactttcgttgtaattcttgagccatacgatgccttttgagctgggcttgtcgactaactcttcgagatttaattgatcgtcgtccagccatgcttccagtagacatacctgtgagatctagggtgtcacatgagctgtcgtgctttccgtgcttttcttcgccatcagaactttcatctgtctttcttgtataattcactggcaaaggtggcactggtggtggtgatgcgtttctgttgatgaaactttctgatagacacttcctttgagctgcttcacgagccaaatgcgcttttttaaagtccagaatcgaacatgactttgacatctccttagatttcggcgataatttggagaacaatcctttggaaccgctggaggatggac

SEQ ID NO: 5715 - DNA, 452 bp, Diabrotica virgifera
aacaatcaataaaaataattaaattaatttatcaccagattcttgtacaaaaaatttgtcatctcttactaaagttacgtgcttattaaaaatatgaataacatttataaattccatttccgcttctgctggtagacactctatgaaacactatacgcatacaaaatatcacccttttttactttatgcttacctacaatatataaaaataaataaaacagtttagaatgttaaaagttacaaataaaattatatcttttattaaaatcttcaatgctccggcgacgtttttattggagttagttttaatcccttagcaagcatctgttcttctaggtctttgtcttcatttgaatattttttaaagtccagaatcgaacatgactttgacatctccttagatttcggcgataatttggagaacaatcctttggaaccgctggaggatggac

SEQ ID NO: 5716 - DNA, 605 bp, Diabrotica virgifera
ctcgagtaaaagttacttatttttacttaaggaatccaaatctgcaataaaaaatgggggctcctatttcaagattttaaagttaccctccaccccacccccgtcaggtctcattttaggtatcattcaatagatttgtcaaaaatattgaatacatgtatttttcagtttttcgatcagatgttcattttgcgaaatatcgcggggttcctatttaaaattataaatttaccccccatccctctccgtggtggatcgtgtttggcatcattcgatggattttttaaaaatattgaatacgtattttttaatttttcatctgacgttaatttcgcgagatattcgcttttttgttgtgaaactttgtgactcgcccatttccttacgccctgctcaaatcgtcatcatcaccaatggtgctacagccctatgaaagagcctcgaccttcccaagtctattacgccagtcagtcctatccattgccaaccgttgccagtttgctgcgcctatttttctcccatcctcatctacaccatctttccatctaagttttgacctacccctatttctacttcccacaggttgtgacataaggattcttcta

SEQ ID NO: 5717 - DNA, 357 bp, Diabrotica virgifera
gaactttttagttatgtgaattaccatttagtggatgcatggcgtatctgcacatgtacctgtgtgtggcagatgcgtgcaaatataagagttattgtgaatttggtagtggaagcatatcatttggaccacatatactacacatcatcatcatcatcatcaccaatggtgctacagccctatgaaagagcctcgaccttcccaagtctattacgccagtcagtcctatccattgccaaccgttgccagtttgctgcgcctatttttctcccatcctcatctacaccatctttccatctaagttttgacctacccctatttctacttcccacaggttgtgacataaggattcttcta

SEQ ID NO: 5718 - DNA, 487 bp, Diabrotica virgifera
aaaacggcgactttcgaccccttaaaactaccctcgcccccgctctggtttccgcccgtgtggagaagtgactaattcaacatatccccatatagtttctccatattacttatcacgagcaaaatccgcttccagctcttggactataagaataataattgaacttctattatctaaatcacttttatttctaaagaaacatataagccatgtctccctctaatcatttaaatttcacttcatttttctagtactttttgtattatttatacgtagatatcgaaatttgttagcaataagtgagaaaatttgtaaattgcagcctgtaaacattgtacctagctttagaggattttaaaaatgcgcggcatacggcattttagatacggtaggttaaagtaaatgaaagaacgcaaaaatcaattataaagttatatgaaattgttatgatattaaaaaaatcaacctttctttactagtcattaaa

SEQ ID NO: 5719 - DNA, 470 bp, Diabrotica virgifera
aaaacggcgactttcgaccccttaaaactaccctcgcccccgctctggtttccgcccgtgtggagaagtgactaattcaacatatccccatatagtttctccatattacttatcacgagcaaaatccgcttccagctcttggactattagtagactatccgatatggatcataaattcacggatcctgccaaagtttcataaacgaaacattatctttaaagcattataaaattttatgagtagtcatattcgaaattatgtttggataatattattctacaatatctaattgaacaaggaatgctggtttggtcgaattttaaataccttgtgatttattatgcgagctcaaatggcacagacagatactagtaaatttggagtgttttgtttattatttcaaaaattatgcagcaggtaattgagaccattcagataagaaacacgtcaataaactatctatataaaa

SEQ ID NO: 5720 - DNA, 499 bp, Diabrotica virgifera
  SmartBlast Evalue=3E-10; Info=zinc finger protein 64 n=1 Tax= Gallus gallus RepID=UPI0000ECA978
tccgtgagtatatttaacatgatttcttagagtatgaggtcgttttgtcttaaaagaacacactttgcatttgtgcaactgcattttcgatgagtccatgtgtttaaccatatgctgcatcagattcaattttctaacagttttatattcgcaattggcgcaatataaaaactcctgtttcatatgcattttcgtatgtgcaatgaatttggttctgttgtaacttttatatttgcatgaataacatatgtagacgttcaagtcaccttgctgatgggcgcaatacagatgttgtactagagaaggtttaaaagtataaacttttgcacatatttcacatacatattgtttcttttccggcttttcttgaaaatgcctggcttcagatccaaagtagttggaactagctacatatttaggtcaaaagaccttaatgtaataataattatgccatttaggctacaaaaatgtcgacaataagtcgatgtcacaagaaatt

SEQ ID NO: 5721 - DNA, 461 bp, Diabrotica virgifera
gggcgcaatacagatgttgtactagagaaggtttaaaagtataaacttttgcacatatttcacatacatattgtttcttttccggcttttcttgaaaatgcctggcttcgtataaaattgataagttttgatatcggatggtttatgtggcttattttttatctcagatttaagaccattcagagtatttcacgaagaataacttttttactaatgaagtaaaaacctcacatgtaggtaggtggtatataatttattaaaaaattttttctaaaaatgatccaagatggataaaatcacaaacgttttcggaccaatcagtccatcatcaggtggtagaaacttcagatccaaagtagttggaactagctacatatttaggtcaaaagaccttaatgtaataataattatgccatttaggctacaaaaatgtcgacaataagtcgatgtcacaagaaatt

SEQ ID NO: 5722 - DNA, 540 bp, Diabrotica virgifera
ctgacagcatttgaacgtttaagtcaaattatactggttttaattatttgcattgctaaaaactaatttttttattattaaacaaagctatttttttataagccaaaaaattgtttacaactttaaacattgctgaggcccctcaaacaatccgatttctgtatgtaaaaaaattagccaacttctaaatggtttagtttttgttcagaaagattttcaaaaaattagaactttcccaaaaatatttagattgcaaacttattatgcaaaatctataaatcgactttaatgaaatttagtagaccgtttaagtaagttacaagaattttccaagcgaattactaaggttctcagtgcaaccaaagtggttgaggaacattgaacaacaacaggcgtattctgcccccttattttgtatttattgctatatgcagaaaaggtaatatcttaagacatttttgaccagtcgtatatcattcaaaattcaattatctctattttatttctccaagactatgttccaaaacgaatcgttttaaa

SEQ ID NO: 5723 - DNA, 414 bp, Diabrotica virgifera
aaacattgctgaggccccccaaataatccgatttctgtatgtaaaaaaattagccaacttctaaatggtttagtttttgttcagaaagattttaaaaaattagaacttccaaaaatattctagattgcaaacttattatgcaaaatctataaatcgactttaatgaaatttagtagaccgtttaagtaagttacaagaattttccaagcgaattactaaggttctcagtgcaaccaaagtggttgaggaacattgaacaacaacaggcgtattctgcccccttattttgtatttattgctatatgcagaaaaggtaatatcttaagacatttttgaccagtcgtatatcattcaaaattcaattatctctattttatttctccaagactatgttccaaaacgaatcgttttaaa

SEQ ID NO: 5724 - DNA, 479 bp, Diabrotica virgifera
atcgctacaggtggaaatagggtgattgaacgtcttatttataatattcttctttttgtggatgagccaaggtttgaaatggcactttttgaattttcgtccgatccttttttgtttcggaaagtgcaaaataagactagaatttcaaaaataaaaatgtgctgtagcttttgcgagatggccttaggattttcatattgcacgaggggttgagttaggcattccatataattcacaaaaaattttgggacgattagtcaattagtttaaattttattcaatttgtttgtcgcaaagagcttttttttttcgcaatgtgattgttcggaaaataatagtgacatagcggttctgtcgaagccgcatgcaagaataatagttatatttttaaagtattgaaaaagaatcattaaaaggtcgtttttatcactccgaaaaaagtttagtaaaatagagtcatttttggcttctaagcaatt

SEQ ID NO: 5725 - DNA, 455 bp, Diabrotica virgifera
atcgctacaggtggaaatagggtgattgaacgtcttatttataatattcttctttttgtggatgagccaaggtttgaaatggcactttttgaattttcgtccgatccttttttgtttcggaaagtgcaaaataagactagaatttcaaaaataaaaatgtgctgtagcttttgcgagatggccttaggattttcatattgcacgaggggttgagttaggcattccatataattcacaaaaaattttgggacgattagtcaattagtttaaattttattcaatttgtttgtcgcagagcttttttttcgcaatgttattgtttagaaaatgatgacgacatagcaattctgtggaaaccacatgcaagagtaatagttatatttttaaagtattgaaacaaatcattaaaaaagtcgtttttatcattccgaaaaaaggttagtaaaatagagtca

SEQ ID NO: 5726 - DNA, 619 bp, Diabrotica virgifera
gtctactgtaagtacaattaactcgaaaatatcgacctcgcgacaaaaattgttaaaaagaaattgcaataattgtaaatacgatttatttggaacaatttcagttcctaccatttttgtcgaaaatttaaaaatggcggagatattgagcaaaacaggttcttctttaaattcaagatggctgctaacgtaacggaggaattcattcgtgattttaaatttaggctactattgactcccctaaagatcagaaaaataaaattttgggcagctcggcattcaaggtcaaatgctatcccgactggactaatatatacttttgagtctgatattactgcatgcaacttcctggtattgtaatataattcaaatccttctaaccactcaaagtcctatcttttggctatctgtgggcaaattttcagccaaatcgatgataatgtattttgggaatggaggaaaatgcaaaaaacggcatttcaacgttttccacactataaaatttgatcaaaaacctgttttgactcaaaacaacttatataatgccatactaatgacattcccgagtcctttccattaaaacattatgctctccatcaacactttacgacagaaaatg

SEQ ID NO: 5727 - DNA, 315 bp, Diabrotica virgifera
actaatatatacttttgagtctgatattactgcatgcaactttcctggcattgtaatataactcaaatccttctaaccactcaaagtcccatcccttggctatctgtgggcaaattctcagccaaatcgatgataatgtattttgggaatggaggaaaatgcaaaaaacggcatttcaacgttttccacactataaaatttgatcaaaaacctgttttgactcaaaacaacttatataatgccatactaatgacattcccgagtcctttccattaaaacattatgctctccatcaacactttacgacagaaaatg

SEQ ID NO: 5728 - DNA, 543 bp, Diabrotica virgifera
ctggaatctgattccatgataaataaaattactaataatttttttaatctgattttttacatgagaaaaagtattgtttataaagaaaaatatattttgtgccataatgaccaaaaaacaattgaaagactatatagcaagattatattactacttatattactataatcgtggcgtatattgtccaccaccggaaacaacaaataataaactgtaaattacgatcttcccagaacgccgattataacgaaactaaaaccaaattgtaaagcacattccagtgataggttaggaaaaataaacaaggtcaaaattaaacttttaaatatatttccagtagaattcttatatctggcgtacaaaatacgccagcgcgtgtagttaaaggttaaggtaataggtatgcggtgaaggcgcctaagacctgcatgattggtttgatgcaattgctttttttttcaatatccgccatttttattttatcgacaaaaaatggtaggaactgaaattgttccaaataatagtacaactaataattagtac

SEQ ID NO: 5729 - DNA, 404 bp, Diabrotica virgifera
atcgtggtgtatattgaccaccaccggaaacaacaaattactgtccacctattattgtccaccaacaaactgtaaattatgatcttctcagaacgccgattataacgaaactaaaaccaaattgtaaatcacattccagtgacaggttagatagataaacaaagtcaaaaaattaaatttttttaatatatgttgcagtagaattcttatatctggcgtacaaaatacgccagcgcgtgtagttaaaggttaaggtaataggtatgcggtgaaggcgcctaagacctgcatgattggtttgatgcaattgctttttttttcaatatccgccatttttattttatcgacaaaaaatggtaggaactgaaattgttccaaataatagtacaactaataattagtac

SEQ ID NO: 5730 - DNA, 471 bp, Diabrotica virgifera
cttttgtaccatcagttctttttgtaacatacaaattcacaatgaagtttctcgtactttttgccttagtactctactgctctacacaagttttaggaggtccttgtgatggtgtacagtgcagtcctccaaattgtggacttggtgctcgtccagtagtgaaaccaggtgattgttgcgccacttgccaaggattcggtaacccaaaatgtgaaggtatacaatgcggtgtaccaaactgccctcctggatctatattgaagctcaaagatggtgcttgttgtccctcatgtgagccattcggtaatccactgtcacattaaggatagagattgttgtgcaacctaccaaccacttggtaggtaactaataataaatcaaggaaatattgcaactattggaaaaaatgacctatggaaaatgaaaaattactaataaataattaatatattattacaaaacttaaaaaaa

SEQ ID NO: 5731 - DNA, 478 bp, Diabrotica virgifera
acttttgtaccatcagttctttttgtaacatacaaattcacaatgaagtttctcgtactttttgctttagtactatactgctctacacaagttttaggaggtccttgtgatggtgtacagtgcagtcctccaaactgtggactcggtgctcgtccagtagtgaaaccaggtgattgttgccctacttgccaaggattcggtaacccaaaatgtgaaggtatacaatgcgatgtaccaaactgccctcctggatctatattgaagctcaaagatggtgcttgttgtccctcatgtgagatatacggtaatccactttacacatcacattaaggatagagattgttgtgcaacctaccaaccacttggtaggtaactaataataaatcaaggaaatattgcaactattggaaaaaatgacctatggaaaatgaaaaattactaataaataattaatatattattacaaaacttaaaaaaa

SEQ ID NO: 5732 - DNA, 468 bp, Diabrotica virgifera
gtatacacctgcgctagtgaactctacttttggatggttttgtgatttaggagtcagtaaaaagagaaaaaatctacacgagtattgtgtcatatttgtattgggaccgtgcaagttcggcaaagcgacacctatttctacgctctgaacttttattcgcacttttaattatattggccaattatattagtcctggttactggataattgtcaaggccatagtccaaaaaaaataataagaagaaaaaataagattcaggttatgttattaaaacgtaaacaattgtatgtagtaaataaaattagttattaaaatgcagtactgcaagcaaaatacaattaattaaatttacctttatataataattgcatatcatatcaatattgtgaagcaatatataatttgccttcttaaattagacaataagtatgaaatgtacgtcaatttgacaatttctagttgacaat

SEQ ID NO: 5733 - DNA, 463 bp, Diabrotica virgifera
tgatatgaacacttgatattttaattacaattcaatatgtaaattaatataactgaaaaaatttatttattttagtttgatagcatctgtaggtattgggaccgtgcaagttcggcaaagcgacacctatttctacgctctgaacttttattcgcacttttaattatattggccaattatattagtcctggttactggataattgtcaaggccatagtccaaaaaaaataataagaagaaaaaataagattcaggttatgttattaaaacgtaaacaattgtatgtagtaaataaaattagttattaaaatgcagtactgcaagcaaaatacaattaattaaatttacctttatataataattgcatatcatatcaatattgtgaagcaatatataatttgccttcttaaattagacaataagtatgaaatgtacgtcaatttgacaatttctagttgacaat

SEQ ID NO: 5734 - DNA, 539 bp, Diabrotica virgifera
gtttgagacacctgtagggaggacagggtacaagggtgggttggtatacatcgaaatcatgtttagcatgtgcttttaagaataaaaaataacaattaacaaaacagtctagtttgtaaagatatcagggaaattaaaaaacgaaaatgttaacaaaacatgaaactacaacatgttttcaatatatacccatccttgtaccttcttcctcctaaaaggcgtttcaaagttaacataagaaaataatttcctttcctccacctggtataagcctaaaagagaagttggagtaaacttttgcctaacaatgaaaataccaaagaaaaaatctaaaataaaattagccgaatccgttaatatgcttattacgagaaaaccaactatgaaaatgagcataattttaggtgatgcaaacttttgaaactatgtttataatattttttatggattaccgtcgaaggacgacatgatcaaccaaaaagaagatgaatatgagattgttctttcaagaagaagacgtatttcgcagaacgtgcggg

SEQ ID NO: 5735 - DNA, 400 bp, Diabrotica virgifera
aaaccaaatatcataagcctacaatatgattttgatgcgtactcacagttgtaccttgtccttcctacagggtgtctcaaacttaacataataaaaccatttcttttcttccacccggtaatagtaacaaaaaaaaagaagtttgaataaagctttgcccaactgagtaaataaccaaagaaaaatactaaaataaataaaaaaactagcggaatcgttaatctgttcatgaaaaagtcaactatgaaaatgagcataattttaggtgatgcaaacttttgaaactatgtttataatattttttatggattaccgtcgaaggacgacatgatcaaccaaaaagaagatgaatatgagattgttctttcaagaagaagacgtatttcgcagaacgtgcggg

SEQ ID NO: 5736 - DNA, 484 bp, Diabrotica virgifera
  SmartBlast Evalue=7E-23; Info=Putative cuticle protein n=4 Tax= Bombyx mori RepID=C0H6S8_BOMMO
cgaccaaatacaatggctgctaaatttttagttctcgccgcattcgttgtagtagctagtggctacgaacatcatgatgaaaatttcggtcatggagctcaacatgctatctccacctactccaccgttcaacatcacgccccagcagtccacgcatatgctgctcacgttcccgcagtccaaacctacgctgctcaaccacttgtccaacaatatgctgctccagtagtccacgcctatgctgctccagttgccaaagctgtttatgctgaaccatctgcaccagctcattacgattttgcctacggcgtagctgacccacacactggcgactccaaacaccaacacgaatctcgtcgtggagatgttgttcacggaagctactcactcgtggaatccgatggaagcaaacgtaccgtcgactacactgctgatccacaccatggatttaacgctgtcgtacataacgaaccagctgtacacg

SEQ ID NO: 5737 - DNA, 455 bp, Diabrotica virgifera
  SmartBlast Evalue=4E-23; Info=Putative cuticle protein n=4 Tax= Bombyx mori RepID=C0H6S8_BOMMO
tagctaaggccggttcgttggggttcaggtttcggctacgccgcgccagctcttgtcgctcacggatctcacgatgccatctctacctactccactgttcaacaccatgctccagccgtacactcctatgccgctcacgcctccccttgtccatgctccagttgcccattcctacgcagctcctttggttcacgccccagtcgctcacgcttacgctgctcctgttgctcacgttcatgatgaaccctctgcaccagcccactacgatttcgcatatggagtaagtgaccctcacaccggagatgctaagagccaacacgaatctcgtcgtggagatgttgttcacggaagctactcactcgtggaatccgatggaagcaaacgtaccgtcgactacactgctgatccacaccatggatttaacgctgtcgtacataacgaaccagctgtacacg

SEQ ID NO: 5738 - DNA, 643 bp, Diabrotica virgifera
ggttgttaaagttttaaagccaattagtacaattaaaccaacaacccccttttaattcatagtaaattaaattttcatcaccacagttggacttacttcaattttgaataaggaaccacattcatcaacctattcatataagtaaaacatcttagcaaaaatattttccacttaattatttggtcccagatgttctttagatcctttaattcaacttcatttgaattatgtgtagatggctgcatacattctggctaattctctatttgcattataaaaatcattttatactctacctacatcttacattatcaaggtacttaaatgtaattatagccacaaccttgttgatgtttgttattactgttgaaaatttaaaaaaaatcttttattacaattagttggctgtatcttttattacaatacagggtaacttctacgtcacattgtcggtttgttttttggcacctttcagaaacatcactcattttgcatttagttgccattaagtcattgaaatgtaaacaactcaatttgcatcccacgtgttgggaaattcgatacattaccttagggcattatcctagttgccatgtgaccatcataaggcattttattaaagtattcacttttaatgcatcca

SEQ ID NO: 5739 - DNA, 296 bp, Diabrotica virgifera
gaatagacaacagaggaaattggaacaaagtcctttgtaaagggtataaagtttgttgaaatccctttaaggggctgtatcacaactggacgttttcgattttgtgaaaaaatcatcatcagtgtttacattccaatgacttaatggctcagttgccattaagtcattgaaatgtaaacaactcaatttgcatcccacgtgttgggaaattcgatacattaccttagggcattatcctagttgccatgtgaccatcataaggcattttattaaagtattcacttttaatgcatcca

SEQ ID NO: 5740 - DNA, 537 bp, Diabrotica virgifera
cggccgcatagggagcttggctccggaacggggctaagatagaatgatattttatttcattatttttaattttaaactgtatataaatatcctgaatatatttattttattctaacctgtgttttactgactctgttttcttgaaagaactaccggtcacaagcaatcagaaacaaacaaagtatatgacaactgacaagtgacagtgtatgataataaagaaaatgactaaaaacaacctaagttgctcgcattttcaattaaattggttgaggcacagtgcaaaggcaggaatcttgaataaatattgctatacaccttgagtagaataaaataagcacttaataaataatgagcaacaaaaaattaccgaatctttaacaaattaactggtagagtgagtattggactacgattgtgcacaaaacgtttttcagataatactttcacctctttcgtctttctgtactacagttcaagggatttaaagatcatttagtacgtacatgattacaaatgagtaaagacttctttatt

SEQ ID NO: 5741 - DNA, 405 bp, Diabrotica virgifera
cggccgcatagggagcttggctccggaacggggctaagatagaatgatattttatttcattatttttaattttaaactgtatataaatatcctgaatatatttattttattctaacctgtgttttactgactctgttttcttgaaagaactacccgttacatgcgacagagaaaaatgtttgtatttggggtagacatctctttctaatcggcggggtttatcaaataatttagtcacttggtcgatatacccaatgccattggataaaaacatgtcgattagaaagaaatgcttaccccaaatacaaacacttctctgtcgcactgggggaatagttttagattgcagtgagcaatctaggtattatatgtctatgtgtgcggcagagcaagaggcaataggaa

SEQ ID NO: 5742 - DNA, 493 bp, Diabrotica virgifera
tgtattaagaagctgtcaaactgtatagaaactcaccaaaacttcttatgagatgccaatgcaagatgagaaaatatttacaaaatttccgttatcgaacaatatcgctaggctttctgaagcaaaactaaaatttcctaccttacaagtctcttataactttatacacctttaaatacacatttaaatagacatttaactgttttatagttactttaaaatactttttgactagtccatagtttcattaagtgcacatgtgaacataggatcaaaacgaacgacaatattcgaaagtttttttgtcggaaataaggtatgtgatatgcgaattagtactatgtagataacgaatcaaagctagccgtacaaaaaattacgtatgtcctctttgaatctgaatttatatcattggtttatcaattaattttgattaacattataaaacataaaaaatcagtcaaaacctttaacacagaactttaatcaaaaa

SEQ ID NO: 5743 - DNA, 449 bp, Diabrotica virgifera
tgtattaagaagctgtcaaactgtatagaaactcaccaaaacttcttatgagatgccaatgcaagatgagaaaatatttacaaaatttccgttatcgaacaatatcgctaggctttctgaagcaaaactaaaatttcctaccttacaagtctcttataactttatacacctttaaatacacatttaaatagacatttaactgttttatagttactttaaaatactttttgactagtccatagtttcattaagtgcacatgtgaacataggatcaaaacgaacgacaatatattagacaagttttttttgtgaaaataaggtatgtagatattgtattgtatgtagatattaagtacatacgtcctatatatgggctattccacgaatatacgcctgtcctggattatcgcgacaacgaatattttagtgtgcaacataagaagtgcgaa

SEQ ID NO: 5744 - DNA, 462 bp, Diabrotica virgifera
tgtatcctaccgacttaaagcaagagtaccttttagtactagaatgcctcacaatttaataatccagtgtcaaaaagcttaaaagttaaagataaaaaaggaagataaatatgcgtaccagttttggtttctctaaatagaagcattctggaggtgtttaaaaaaactaattacaagacgcctttttcaaagagatctagcttctgtaataagcattttcagactaggtgatttaggttaaatcttaatacatattttgagccgaagaagctacagttaaaatatttccaattattaatgaaacaccctgtatatcgataccttcattcgacataatttgcagtatataaagttgaaatttgtcatatatttagtctcaaatacctctctatgataacaaatagttttaaactcaaaattcttataaatctacaataaacattatattaaacacttgctata

SEQ ID NO: 5745 - DNA, 465 bp, Diabrotica virgifera
aatgtgagatattctaatactaaaagacactcttgctttaattcggtagaattcaccgttttctatggtcgttactataaattcgaaatttttggcatcgattcatctctagaaaataaataggcagtttttcgctcttctaaatagaagcgttctggaggtattaaaaaaaactaattacaggatgccattttcaaatagatctagattccttattaagcatttttggaccaggtggtttgggttaaatcttaatatgttgagcccaggaatttacggttaaaatatttccaattattaatgaaacaccctgtatatcgataccttcattcgacataatttgcagtatataaagttgaaatttgtcatatatttagtctcaaatacctctctatgataacaaatagttttaaactcaaaattcttataaatctacaataaacattatattaaacacttgctata

SEQ ID NO: 5746 - DNA, 485 bp, Diabrotica virgifera
  misc_feature (473)..(473): n is a, c, g, or t
gcccggaatatcctctattataatcgtcattgcccttgttgtacggatcgtttatcctgtaatcgtagcctttgttatcgtaccctatcccccggtcggagtacctagtgtcgtaccgatctcggtcgtacctatcgtactgccgatcgccatatcggtcgtacctctcgtaagggtcgtatctgtcgtagtcgtagggatcgtagtaccgatctcggtcaccgtaccggtcgcgacctctgctgtagtaccgatctctgtcattgtatctgtcgtatctgtcataataagggtctctatagtagtacctatctctctcgttgtaccgatcccgatcccgatcatcgtaccgatcataatccctatctcgactcctgtcgtcgtagtagtacctgttcctatcgtaggaaggattattggagtactgggggtagctggcgaaacaactgatgcatcgttttccaggagagcgntgccgctatccc

SEQ ID NO: 5747 - DNA, 455 bp, Diabrotica virgifera
  misc_feature (443)..(443): n is a, c, g, or t
gcccggaatatcctctattataatcgtcattgcccttgttgtacggatcgtttatcctgtaatcgtagcctttgttatcgtaccctatcccccggtcggagtacctagtgtcgtaccgatctcggtcgtacctatcgtactgccgatcgccatatcggtcgtacctctcgtaagggtcgtatctgtcgtagtcgtagggatcgtagtaccgatctcggtcaccgtaccggtcgcgacctctgctgtagtaccgatctctgtcattgtatctgtcgtatctatctctctcgttgtaccgatcccgatcccgatcatcgtaccgatcataatccctatctcgactcctgtcgtcgtagtagtacctgttcctatcgtaggaaggattattggagtactgggggtagctggcgaaacaactgatgcatcgttttccaggagagcgntgccgctatccc

SEQ ID NO: 5748 - DNA, 529 bp, Diabrotica virgifera
gccagtgagaaagtgttaatctgtatcaaaagttatcagtgacagcgagcgagttttgtctttatttttgagagtggcgttgattggcgatagagaatttattttttgcgcctgtaatttttttttaatacaatattttgatttttttatttacgatatgaagtcagtggtagccgtttgtgccgtgctggtggtcatggtttttggtttcaaccacgtggtggctagacctaacaacagaattaagagggtctcagattcacacttagcagacttagagaccaaaattgcaatgaataacaggattaaagggattcgccattacaatgccaatcggtggaggaaaaatagatcccttacagattgggagacgcagacgatcaggggcagaatccaggttcctgaaaccgctattccaacaagtttcatcggaagaagacaccggtgaagattatgaatacccatacagtaacttcaacggttataataattatctactgtagaaacaaactaagcataattcagcaat

SEQ ID NO: 5749 - DNA, 405 bp, Diabrotica virgifera
gccagtgagaaagtgttaatctgtatcaaaagttatcagtgacagcgagcgagttttgtctttatttttgagagtggcgttgattggcgatagagaatttattttttgcgcctgtaatttttttttaatacaatattttgatttttttatttacgatatgaagtcagtggtagccgtttgtgccgtgctggtggtcatggtttttggtttcaaccacgtggtggctagacctaacaacagtgggagacgcagacgatcaggggcagaatccaggttcctgaaaccgctattccaacaagtttcatcggaagaagacaccggtgaagattatgaatacccatacagtaacttcaacggttataataattatctactgtagaaacaaactaagcataattcagcaat

SEQ ID NO: 5750 - DNA, 494 bp, Diabrotica virgifera
  SmartBlast Evalue=5E-11; Info=Retrovirus-related Pol polyprotein from transposon 412 (Fragment) n=1 Tax=Camponotus floridanus RepID=E2ARY3_9HYME
tatctggtgattaacaatttaaactaaaatactataccataataaaactaattaaaggcaaacacaggaagatattagcttaaacaaccctgttaagctaatcttcttccgatgaagttgaagaatccacatcgtccatggtgttgtcaggcagtaaatcctttacatgaaattgaccaattcgcttattagtcgaattgtcctttaattcataaatcaaaggagatattacccttgagacagtacatgggacatatttctggcaaaactttgcagaaatggcatcacccttattggatttgacaaaattgcgctttaagactcgatcaccaacaaagaatcgcagatctcgtttcctcaaattatagtgctgctggttccttaggtaagaagtttttaacttcttcctaatgtctgcgaaaatatgaggtaacgtctggagatcatctaagcgatgaagtttctcagatatttgaggaagattttcggaattg

SEQ ID NO: 5751 - DNA, 436 bp, Diabrotica virgifera
  SmartBlast Evalue=4E-11; Info=Retrovirus-related Pol polyprotein from transposon 412 (Fragment) n=1 Tax=Camponotus floridanus RepID=E2ARY3_9HYME
tatctggtgattaacaatttaaactaaaatactataccataataaaactaattaaaggcaaacacaggaagatattagcttaaacaaccctgttaagctaatcttcttccgatgaagttgaagaatccacatcgtccatggtgttgtcaggcagtaaatcctttacatgaaattgaccaattcgcttattagtcgaattgtcctttaattcatacactaaaggagatattaccttcacaaccgtacagggaatatatttctggcaaaattttgccgaaatagcatcacccttattagactttacaaagtttcgcttcaacactctatctccaacgaagaatcgcagatctcttttcctcaagttatactgctgctggttccttagataggaagtttttaacttcttccgaatgtcagaaaaaatttgaggtagagt

SEQ ID NO: 5752 - DNA, 499 bp, Diabrotica virgifera
cttaaaaagtattagtgataagaaaaatcttaacgagtaaaaaaatgtaggttttgctattataaatatgcctagtttcattttgtttctccgtaagacaaaaattggttaagatatggctgttcaaaatttgcatacactcgtgattagtgacccattcaagctttctcaattataaccctttcaaaaataaacactttaaaccggtgagactgacagatcatataaaaaatagataggtaagtaaattgtttgtaaagcggtagcgattaatttcatttggggagctaaacacggcgagattttcatgattttttacaaaaaaaaagagggccaaccccattttgagcgtaactggcttatttttaatgctaaaactttgttaacaattaaaacaaagctttttataaacacttcaaaaataaatgagtctttcccgaaaagtgctcaattttttggtgatttcaccttgaaataatctaatttggaaccagacgaa

SEQ ID NO: 5753 - DNA, 428 bp, Diabrotica virgifera
cttaaaaagtattagtgataagaaaaatcttaacgagtaaaaaaatgtaggttttgctattataaatatgcctagtttcattttgtttctccgtaagacaaaaattggttaagatatggctgttcaaaatttgcatacactcgtgattagtgacccattcaagctttctcaattataaccctttcaaaaataaacactttaaaccggtgagactgacagatcatataaaaaatagataggtaagtaaattgtttgtaaagcggtagcgattaatttcatttggggagctaaacacggcgagattttcttgattttttacaaaaaaaaaagagggccaactttattttgagcgtaactcgcttatttttaatgctaaaacttccataacaattcaaacaaagctttttataaacactttaaaaaagttt

SEQ ID NO: 5754 - DNA, 470 bp, Diabrotica virgifera
  SmartBlast Evalue=4E-25; Info=Histone-lysine N- methyltransferase SETMAR (Fragment) n=1 Tax=Camponotus floridanus RepID=E2ADI9_9HYME
attctcgcaattcttccgaacgaaattgataatttttttcccgtttctgtgttttgccaatacataaaattgttttgctccggagagtgagtaaccagtcgtgtcatttacgaggtctggctattaaataacgagactgcttatgaaaaagagttttattttaaacattattctacaatcgaatgctctccttcaatatattccccttccctcgccatgacaccgttccattcgttttttccattggttaaagcaatgctggaagtcttcatttgttagagcttttaggagctccgccgtttttcgcttcacctcttccatcgactcgaaacggattccttttaaggcagacttgatcttcggaaacaggaaaaagtcacagggtgttacatcaggcgagtacggcgggtgttagagcactggaatgcctctagcggctaaataacgcttcacagacatgactgtttgtc

SEQ ID NO: 5755 - DNA, 441 bp, Diabrotica virgifera
  SmartBlast Evalue=4E-25; Info=Histone-lysine N- methyltransferase SETMAR (Fragment) n=1 Tax=Camponotus floridanus RepID=E2ADI9_9HYME
ggacgattcgcgcagtttgtggacgcgctttttgcataaataagaaattattaccaacgaaaggggcctaggggacaacattgtcctccagatactatcgtacgaggttgcttatgaaaaagagttttattttaaacattattctacaatcgaatgctctccttcaatatattccccttccctcgccatgacaccgttccattcgttttttccattggttaaagcaatgctggaagtcttcatttgttagagcttttaggagctccgccgtttttcgcttcacctcttccatcgactcgaaacggattccttttaaggcagacttgatcttcggaaacaggaaaaagtcacagggtgttacatcaggcgagtacggcgggtgttagagcactggaatgcctctagcggctaaataacgcttcacagacatgactgtttgtc

SEQ ID NO: 5756 - DNA, 459 bp, Diabrotica virgifera
aaacccccacaaacttttgtgcacgtttcaatttaattattattgcgctaccattagttaaacaagtgttttaaaaacttttttgcctcctagtactttttcgataagccagtgtttatcgagatattttgaatatttgtcgaatccacacatatttgtatatggttaagtacgattatagagacctgttataatctgaaaatttatttataatgtacatttttgggtatattttgaaaaagaagccacatctcgataaaaggtgacttatcaaaaaaagactaagaggcaagaaagttttaaaaacactgtgttcaaccaatggtaccacaacaatagtttaattggaactagtttaattgtttaaaggaacaaaagccccataaaatttatatgtaaatatattaaaaaagaacccgtatctctataaaaactcgcttatagaaaaaatactaagag

SEQ ID NO: 5757 - DNA, 456 bp, Diabrotica virgifera
aaacccccacaaacttttgtgcacgtttcaatttaattattattgcgctaccattagttaaacaagtgttttaaaaacttttttgcctcctagtactttttcgaaaagtcagttttttatcgagttattttgaatatttgtcaaatccaccacatatttgtatatggttaagtacgattatggagacttggtaataatatgcaaatttatttatgatttacatttttctgtatattttgaaccatattaaaaaagaagccacatctcgataaaaggtgccttatcgaaaaaatacaaagaaacagaaaggttttggaaatactgtgtttaactaatggtaccgcaatatagtttaattggaacgtaatcgaacgagtttaaaggaacaaaacccccataattcttttatgtaaacatattaaaaaaagccgcatctcgataaaaactgccttatcg

SEQ ID NO: 5758 - DNA, 580 bp, Diabrotica virgifera
attaaggtgtcgatttcttaatactgttgacacaaaaaagcgatcatcacgagcagttgtaagtcgcttcgctttctaccagttccaggtcgtctacgaaaggattcagtctccttataacgttagaacattcttcgaaccgcggcgggcggcgagtgtcatatccagttgtacagcaacatctcgctggctaagttcattttctattaatacaatatattgggctgctgtctctggtgtagtatcttacacaatatcatgaaacttacacttgaacactaattaattatgaaaacgaacaatatggaattaaaaatgtataagcattttcaatttctttgcaacacgaaaatgcagcagctgcataatgctctggttaaatcggagagtgcaggaagagtctataccggtttcggaggtcttttcccctcatcagtagtcccatatcctcttctctccgatttccccagacatcacactttgggtctttccgaattgcaaagaaaaaatgtcacggatgtactaccgaaaaacaaagtaagttatcgatcgaagtagcacggaggacgacagtaggtgt

SEQ ID NO: 5759 - DNA, 339 bp, Diabrotica virgifera
atctactcagcatggtaaaagctccaacaagaaagattccttaatactcaaacaaaagagtaaacgaattaaaaatgtataaacattctcaatttctttgcaaaacgaaaatgcagcagctgcataatactctggttaaatcggagagtgcaggaagagtctataccggtttcggaggtcttttcccctcatcagtagtcccatatcctcttctctccgatttccccagacatcacactttgggtctttccgaattgcaaagaaaaaatgtcacggatgtactaccgaaaaacaaagtaagttatcgatcgaagtagcacggaggacgacagtaggtgt

SEQ ID NO: 5760 - DNA, 459 bp, Diabrotica virgifera
gctcgttttaaaatgttatgaaaagtaaaaaatatacaactttcaagatttccaataaatacagagtctaatatattaaaaaaatgaagtgcatgaaaccagtttgaaattattaggtctcatacagttctaaatctcataaaatggttaaaaagttatatgaatagataaaaattacaacgggtctacagaatatgatacaaatgttgtgtaatccaccatatttataccactcacccaagcagggcaggcaggcaaatatacaaacagtagaaaaagagtgtaaatgtttacaaatcatatcattacttatttgtaccatgttgtaaatggttatccaagcgaaagacttaccacgaacgtagtgttttttctacgcttggtctatttacagaattacctagaaaccaatattaattttcggtaaattcttacaacgcccaccccacaccccacaat

SEQ ID NO: 5761 - DNA, 454 bp, Diabrotica virgifera
gctcgttttaaaatgttatgaaaagtaaaaaatatacaactttcaagatttccaataaatacagagtctaatatattaaaaaaatgaagtgcatgaaaccagtttgaaattattaggtctcatacagttctaaatctcataaaatggttaaaaagttatatgaatagataaaaattacaacgggtctacagaatatgatacaaatgttgtgtaatccaccatatttataccactcacccaagcagggcaggcaggcaaatatacaaacagtagaaaaagagtgtaaatgtttacaaatcatatcattacttatttgtaccatgttgtaaatggttatccaagctaagagaattaaggatgctgcagaaaacccagaggatgtgacaaaagctgctgcaggcaaagaaaacaaatcctttattatcttatataaaaattatacattaatttactt

SEQ ID NO: 5762 - DNA, 455 bp, Diabrotica virgifera
  SmartBlast Evalue=9E-28; Info=Odorant binding protein 19 n=1 Tax=Tribolium castaneum RepID=D2A1G4_TRICA
ggaaaaagttacaagatttggagaaaagtgtatggaagagacgaaagcaacgagtgaggatgtttcccaaatcatggcccacaaaattccagagagtcatgagggaaaatgcatgatctcgtgtgtctacaaagccttcaaaatccaaaatgaagatggaaccatgaattctgacgaaactttgaagctcatggagaggatcaaggaaagtgacgcagaattatacgagaacttgattaaagtgttcaaaatttgccatggaaaaccagaacttattgtcgcagatccctgtttgacagctgtcaatgtggggacatgtgcagtgactgaaggaaaagcgcttggcatcaaatccgaattgtttggaatgtgatttttctattaaattttcaaaaatgttatacctgtattttggacctgtttgtttgaataaaacaattataaatttgtatagc

SEQ ID NO: 5763 - DNA, 445 bp, Diabrotica virgifera
  misc_feature (217)..(219): n is a, c, g, or t
  SmartBlast Evalue=1E-18; Info=Odorant binding protein 19 n=1 Tax=Tribolium castaneum RepID=D2A1G4_TRICA
ggaaaaagttacaagatttggagaaaagtgtatggaagagacgaaagcaacgagtgaggatgtttcccaaatcatggcccacaaaattccagtcagtcacgaaggaaagtgcatgatctcgtgtgtctacaaagcattcaaaatccaaaatgaagacggaaccatgaactctgaagaaacattgaagctgatggagaggatcaaagaaagcgacgcnnnttattcgaaaaaatgatgaaaataatgaaaacttgccatggaaggccagaacttattgtctcatccatgtgtgacagcagtcaatgtgggggtatgtgcagtgattgaaggaaaagcgctcggcatcaaatccgaaatgtttggaatgtgatatttctattggatttttaaatatatgtttttaaaccagattatctgttatttgttcaaataaagcaattatacg

SEQ ID NO: 5764 - DNA, 548 bp, Diabrotica virgifera
  SmartBlast Evalue=9E-11; Info=Polygalacturonase n=1 Tax=Phaedon cochleariae RepID=PGLR_PHACE
gaaataactaactttgatcaagtaagtgataccgtccaccgatgtagcgatataattattaggaatcttgatgtgcctgcaggacagactctagaactcgatttaaaacaaggagcgagtctcacttttgaaggaattacacttttgattatacgaattggtctggaccacttattaggataaatggaagtggatttacgattaaaggagctccaggtttaataaattatgggataaatgttcagcaagattatgtcaatggaagtgccaccggagttgccaataataatattcctatctataacttaaatttgatcaatattagaggtaccgttagagattctgattcggaaaaatcgatgccagtttatataaattgtggcaaaagcgcatgccatgagtggagctggtctaataaacattgcaggaggttccaactcaagtatctgtaactacactccagatggatatcaatgttgaggaatataacaaacgatttttagttctaataattgtgtaaattaaataataaaatactttctaatagt

SEQ ID NO: 5765 - DNA, 353 bp, Diabrotica virgifera
  SmartBlast Evalue=9E-27; Info=Polygalacturonase n=1 Tax=Phaedon cochleariae RepID=PGLR_PHACE
gaaataactaactttgatcaagtaagtgataccgtccaccgatgtagcgatataattattaggaatcttgatgtgcctgcaggacagactctagaactcgatttaaaacaaggagcgagtctcacttttgaaggaattacacttttgattatacgaattggtctggaccacttattaggataaatggaagtggatttacgattaaaggagctccaggatcactattaaatggccaaggggatctatattgggatcatctgggagacaaaggtcctaaaaaaccacaatttattaaaattgaagctttcgatggatccataatagagaatattaatttgctcaattgtcctcat

SEQ ID NO: 5766 - DNA, 473 bp, Diabrotica virgifera
aaggtcagaacttacacttaaaattcctagtttaattttatgatctctctgcgtacctattcagagtacacacctgattgaaaaaaattgtgctctgccatgggcaattttggaatgaattagtttccttgccatatattcaagatctttcttgtcctgtgcaattacaatttggtcatctgcatagtgcagcgtatagagtatcgcatctcctatcggtagtcccattccattgcacttcttcttccattgtctaagggcttatctccatacctaacatccaatatcgatggctaaaaggacaaatattgtttgtccaaaattgatgttttcaataaaatcaatttaaaagtttgcgttatccgtgacaaaccgtacataaaataaataaaataaaatatttgtcctcttagccatcgatatggtctagtggcccaggtggattcacccaggaggctcgggcgcactgattt

SEQ ID NO: 5767 - DNA, 430 bp, Diabrotica virgifera
aaggtcagaacttacacttaaaattcctagtttaattttatgatctctctgcgtacctattcagagtacacacctgattgaaaaaaattgtgctctgccatgggcaattttggaatgaattagtttccttgccatatattcaagatctttcttgtcctgtgcaattacaatttggtcatctgcatagtgcagcgtatagagtatcgcatctcctatcggtagtcccattccattgcacttcttcttccattgtctaagggcttcatcaatatgtatattgaatgatactgccgatatacagcatccttgccttagacctttagtgctaggaaaccttttgatattttatttccgtataatagatacatttatgctggtcttttctagtacttcccatagtctattaatggggaccgtgttatatgccttc

SEQ ID NO: 5768 - DNA, 635 bp, Diabrotica virgifera
  SmartBlast Evalue=6E-12; Info=Endonuclease-reverse transcriptase n=1 Tax=Bombyx mori RepID=D7F178_BOMMO
tcttgcttgttctcatgtccttttgtatcattgccttgtccatttttcgttctgttgtcgtcataatgtgtttccgttccaattctagttttttaatgtttgagtttcgtttactttctttattttttctcttggacctagttctgtgtctccgtgtggtgatctttcactcgttgttcttgttccagttttattctttgtagtttctgccatattatcctttctaaaatcttcggaatcgctgttccatcttttgacctggtctatatcatactcgtctccgttaattattaacttgttatatttaatctttgcgttgtaccctttcatccttgcctctttcatgtgttttataagtattttgcgttgttcgattacggtttttggatagtcttcgttaacaaaccatttcgagccttttaatttccttgtagctttaagaatttccgttcttgtattcccacttcttaactctaccaggactggtctttcaggatttctagttttgtctcctattcttcttatttctgtgacctcttggttggctttgcaaggtatttccattttgttgatgatgtcttgtactttgtttaccagtatttgtgtgtcctcatcgcttgtttcttcaatgccgt

SEQ ID NO: 5769 - DNA, 256 bp, Diabrotica virgifera
gacaatatagtagccaaatattttttggcctgagggaatgggagaactgtgtctgtttaattttgaaattaatttagaaatattttaaaaattaaagtaaaattattaactcatgaatttctagttttgtctcctattcttcttatttctgtgacctcttggttggctttgcaaggtatttccattttgttgatgatgtcttgtactttgtttaccagtatttgtgtgtcctcatcgcttgtttcttcaatgccgt

SEQ ID NO: 5770 - DNA, 783 bp, Diabrotica virgifera
  SmartBlast Evalue=1E-118; Info=60S ribosomal protein L10 n=13 Tax=Schizophora RepID=RL10_DROME
atttattttaaaagttggcgaaactgttcttcattatcctttctaggtcgtgtaaaatacgtgaaggccaaaatgggtagacgacctgcgaggtgctaccgttattgtaaaaacaaaccctaccccaaaagtcgtttctgcagaggtgtcccagatccaaaaatccgtattttcgatttgggtaagaagaaggcttccgtagaagactttcctctatgtgtacatttagtttctgacgaatatgaacagctaagttctgaagcattagaagcaggacgtatctgttgtaacaaatatttggtaaagaactgtggtaaagatcaattccacattcgtatgagactccatcctttccatgttatcagaatcaacaagatgttgtcatgtgctggagctgatagactccagactggaatgagaggagctttcggcaagccccaaggtacagttgctcgtgtccgcattggtcaacctattatgagtgtacgctctagtgatcgtttcaaggctgcagttattgaggctctccgtcgtgccaagttcaagttcccaggtcgtcaaaagatctatgtatcaaagaaatggggattcaccaagtatgaacgtgaacaatatgaaaacttaaaacaacaaggtagattagctcctgatggttgcaatgttcaatacaggccagagcacggacctttggcagcatggaagaaggttcaggatgatatctatgcttaagtttattttttcacataaatttatttgaaataaatttatcaatttatcttttaa

SEQ ID NO: 5771 - DNA, 489 bp, Diabrotica virgifera
tccgtaagatccgttatagtaacagatagcaataaaagttaataacaaaaattgtagccaacttggattacagattgatgatcagtaatcgtaaattgtcagttttagacaattcagtcatggcttacgtaaaatttggaaagatttagacccgtaattaataatttgctctgaaaaatgaaaatatctctaaaactaataaatttagacatagggaatgttatataaaaattaaagtacggtaatagtacttttcgatagtgatataataaaatagagggtgtttaatttaaaattactgagaaaataatgtacttgcgttttgactcaccctgaattcaatataaagaaaatcaggaatatcaatcattctttaccaaacaccctgtatatttcatacttgtgatgtcatccatctgggcttgatgacgtaatcgatgatttttctaaatgggaataaaggtcagttctctattcagtaatataaac

SEQ ID NO: 5772 - DNA, 411 bp, Diabrotica virgifera
tccgtaagatccgttatagtaacagatagcaataaaagttaataacaaaaattgtagccaacttggattacagattgatgatcagtaatcgtaaattgtcagttttagacaattcagtcatggcttacgtaaaatttggaaagatttagacccgtaattaataatttgctctgaaaaatgaaaatatctctaaaactaataaatttagacatagggaatgttatataaaaattaaagtacggtaatagtacttttcgatagtgatataaaatacagggtgttcatttaaaattactgagaaaataatgtacttgcgttttgactcaccctgtattcaatataaagaaaattagcaatatcaatcatttatgaaaattttgacaaataaaaaaatatggcatcaataaacca

SEQ ID NO: 5773 - DNA, 560 bp, Diabrotica virgifera
gtttcaatatttacaacatgtagttcataataaagacaacttataaattaaattatctttataaagtttttagccaaccctcttcatgcatacactttaatgcatacttctggaaattatttcttaaaactactaactccatcatgataaccggtcgttacaaagctaactaataaatacgagagaattctagaaaacagttgaagaatccagaagtagatcacatacgtaggttcccccaattcggtttacagcctcacatatggcgttcttaaatgttcaagtaaattggagatgtatcgctcttgtttgatgttatgagtcacgtcgaaattaaaggtcattgactacaggatgttttcggattaaagcaaccaacacacggtaatttgtacgacagtcttccgaaaaatgactaaccgtacttctggcaattttcctttgtaggtttttctagatattgccattatttggtaaaaccaattttcttatgttataatggaacagagtttgtcctaaaggatctacaacaggagacaacaatgcagttcataataacg

SEQ ID NO: 5774 - DNA, 348 bp, Diabrotica virgifera
gtttcaatatttacaacatgtagttcataataaagacaacttataaattaaattatctttataaagtttttagccaaccctcttcatgcatacactttaatgcatacttctggaaattatttcttaaaactactaactccatcatgataaccggtcgttacaaagctttttttttggaggtgggaattttcttaagaccgtctgggaaggtgtcccaggtgtgtcggattcagcccgtcctatctctatcttgccgggccgcctaccgactaaacccacctcctctttctccagccggcgggtccggaaccgctcttatcgagcatatctgacccgtcgaccttactc

SEQ ID NO: 5775 - DNA, 454 bp, Diabrotica virgifera
gtgtcttttcaagttgcgtgaacgctgagaacaagctgtttgttttcaatctaagtttcccgtcaacacacatttgaacggttgctcgggatcaacacatgccagaaataaacagctctgtatctacattgaaatccatcgcgcggccaacgtgtactcactgattgtccagcacatactgccaaaacgcatgacttgttttcaagccgcgtgcacgtggcggcgtagcagaaactgacgtgctctcagtccatgcggcttgcaagtcacttgcacgccacgactcagctcgagtgtgcagtgaattagtgatgttgatcatagttactttctagtattcattacaaatcgttactttttataaagtaatcatttatagtattcgttactttgattactgtgattacttttgttacttatgtatttgagtagcggtaatcatatcgagaatcgt

SEQ ID NO: 5776 - DNA, 440 bp, Diabrotica virgifera
gtgtcttttcaagttgcgtgaacgctgagaacaagctgtttgttttcaatctaagtttcccgtcaacacacatttgaacggttgctcgggatcaacacatgccagaaataaacagctctgtatctacattgaaatccatcgcgcggccaacgtgtactcactgattgtccagcacatactgccaaaacgcatgacttgttttcaagccgcgtgcacgtggcggcgtagcagaaactgacgtgctctcagtccatgcggcttgcaagtcacttgcacgccacgactcagctcgagtgtgcagtgaataaattcaactcatgtactgctgaaccgccagagatcgcacgaagcttgatcgcagcttgaaaaagcgcaaatgtgcatcgggccttaaaggcataactcagagtttatcaaatatcttcgaaatcaactgcaat

SEQ ID NO: 5777 - DNA, 531 bp, Diabrotica virgifera
agccctcagatttatcactatctctatttttactgctagactttttactactttcactcgattcatcattcttctgtggcttttgtttttctgaagctttggcactagcatctgatttgcctaatttttctctttctttttcttccttttgtcttgctttcgctaatttactatacataatctcttgacgacgtctttcttcccttctcatctgagattctttttcacgttccatctctttcctttgctttttagttaaaggcttttcttcttcttttttcttttttctctattattactggttcatgctgtttttgcgctgctattttaagaatatctgcaaagttcattggtggcggagctggttttggtttgggcttaggaggtggtggcatcttctctctgtcagatttatcggaagaactttttggttcatcaacagatctatctggagcatcgtaactaattccttcttcatcagcatcatcctttttctccttatgctttctttttcttttgtgtggcaataag

SEQ ID NO: 5778 - DNA, 362 bp, Diabrotica virgifera
caattcgaaatatacattttaaacgttattttttcgtattaagatttagtgcaattccgttatctgtgatggcaacaacgacgtgattcacgaacaataattgtcagtctgaacacaggtttacattgggaaaaaaagtgtaccagttgtatatgacgcgaagtgtacctgcaaagttcattggtggcggagctggttttggtttgggcttaggaggtggtggcatcttctctctgtcagatttatcggaagaactttttggttcatcaacagatctatctggagcatcgtaactaattccttcttcatcagcatcatcctttttctccttatgctttctttttcttttgtgtggcaataag

SEQ ID NO: 5779 - DNA, 673 bp, Diabrotica virgifera
  SmartBlast Evalue=1E-43; Info=Ubiquitin/ribosomal protein S30e fusion protein n=2 Tax=Polyphaga RepID=Q4LAX5_9COLE
ttttaactgaaaaagatttttattttttaatgcaatacatgttgctcaatatataaagattaaaggaatttatgaggctggggctgagttggagtttggtcccctcctgcgtccgaaagatgcaactacattaacaaatcttctgttatattgaatacgcctcttagctctaccagtcttcttctttttcttttcttgcttttctacttttggagtttgtccctttactttacctgcacgagctaaagatccgtgaactttaccaccaggcaagccaacagtcaattcaatgtctgtgttctcaaaatcggctaccaacctttcctcagaaactggaactccagcagcataaagactgatttcggatgctttaagcgattccaaagatgcaatacggtccttaatttctccaacagtctcagatccttggcattcaaggaaatgagttgcggttcctcttaaacacaactgcatgttgaatagatagtgaagttctcgcacaacaagaaactacaaaaaagaagactggtagagctaagaggcgtattcaatataacagaagatttgttaatgtagttgcatctttcggacgcaggaggggaccaaactccaactcagccccagcctcataaattcctttaatctttatatattgagcaacatgtattgcatt

SEQ ID NO: 5780 - DNA, 217 bp, Diabrotica virgifera
ttttttaatccaaattcccaggaaagatggattccgcgaccaaattatcaatgagattattttagaataaaggtatcggaggtgtttttaattcaaaaatttgtcctatttaacgaaattatcgcgaaataaaatttttcacttaaccaaactccaactcagccccagcctcataaattcctttaatctttatatattgagcaacatgtattgcatt

SEQ ID NO: 5781 - DNA, 478 bp, Diabrotica virgifera
gttaaaagatagttttccgctggtaccagaggtgtgctgtaggaatatatacttcttttcccccctcacaatgtactccgctggcgtaataatcatttcagcatgctttttttgattcttctttactttttacataaatatcatctttttgtctcaattcgagagagtaaatagttttcaagttatttacgtttaaaggtaattgattcaataagattatgtattttaaacacattaggtttgttctagcatcagtttcaaacggtttgaaactatggtacaataaatttcccaggtatggcacgtaatgttccaaaatcggtcgctttcgcgcatgacgtagtaaagatccttcttcacgcaatacttgaatgtagttttatatgaaaagacttgttaatttaaattttgaatataatttggctaatttaattatagtaaatataaagaaatagataaagttactaagtgataagtg

SEQ ID NO: 5782 - DNA, 398 bp, Diabrotica virgifera
aattttcacctaattcttctcaaatattgtcacatctcatctggttgtggtagatctgattctaaacttcatacactttacacttctctataaattcagagaagtttccgcatgacttccgtagacctccgccttccgctcattagtgcaatacgaagcgcgccgaacagaatttcttcgcctaggattctaccatggtacaataaatttcccaggtatggcacgtaatgttccaaaatcggtcgctttcgcgcatgacgtagtaaagatccttcttcacgcaatacttgaatgtagttttatatgaaaagacttgttaatttaaattttgaatataatttggctaatttaattatagtaaatataaagaaatagataaagttactaagtgataagtg

SEQ ID NO: 5783 - DNA, 492 bp, Diabrotica virgifera
  SmartBlast Evalue=1E-25; Info=Small nuclear ribonucleoprotein G n=5 Tax=Apocrita RepID=Q56FI6_LYSTE
tcagtcactgctcagagcaaaagcacacatcagcacaatatcactttttttctttaacatgttatgtgtatgaaaagttttttatcaattgaaggggttcttggttctttaaaacgtacagcataaacagtgagtaaatagactataaatattaattaccaacaatgcaaaaaagttgtacaaaatataaaccaaaaaccacacaaaaaaaattatgttgatcaagctaatatggtgaaaatatattttaccaccatcccaatattattcttggatccatctttgcactcttcgatcgattcatcgactactaaattcatgaaaggatcaaaccctcgcaaaattcctgtaacttggcggccaccattcaatttcagtgacatttttttatccatgtatttttttaattctggagggtgagcttttgacatttttgtagttttctagtttaacaaagaataaatcgaaaaataacgtttgtcgctttaaaat

SEQ ID NO: 5784 - DNA, 386 bp, Diabrotica virgifera
  SmartBlast Evalue=2E-33; Info=Small nuclear ribonucleoprotein G n=5 Tax=Apocrita RepID=Q56FI6_LYSTE
aaaactaaaaattatccatctatttactcaaaatcacataagttttataaaaaaaaatgtaagtagtataacttaaattaaattgttggttctattatattcgatccagagcttctagcataacaatactgttaccccgaacaaccaccatcccaatattattcttggatccatctttgcactcttcgatcgattcatcgactactaaattcatgaaaggatcaaaccctcgcaaaattcctgtaacttggcggccaccattcaatttcagtgacatttttttatccatgtatttttttaattctggagggtgagcttttgacatttttgtagttttctagtttaacaaagaataaatcgaaaaataacgtttgtcgctttaaaat

SEQ ID NO: 5785 - DNA, 497 bp, Diabrotica virgifera
  SmartBlast Evalue=3E-12; Info=Endonuclease-reverse transcriptase n=1 Tax=Bombyx mori RepID=D5LB38_BOMMO
ttcagagcaacattggtcaaaggaattaacattgagatgacccaagatagaatggtgtggagaaatgcaattagagaaaccgacaccgcatagggataaggcaaagagaaggatgatttagaatatataaaaattatactcatgaaatacattgattttgtatacatactgtaacggtgtaatgtcttccgcccagcattcaacagctcgccagcagaggaccgaacgcgcatcgataccaacgcaaccccactaagttccacttccactccaaagggatccaaggagggcggtcgagagtgtatttattgcccctcagcggtaattatacgaatacttattatgatctgccgaccaggagactctatacatggaaatcaccagcagacaaccaacataacgtcatcagaaaccaaattgactaccttctcatctgcaaacgataccgaaattccataaaatcagtaaaatcataccctggagctgatgtgagatca

SEQ ID NO: 5786 - DNA, 381 bp, Diabrotica virgifera
  SmartBlast Evalue=3E-29; Info=Endonuclease-reverse transcriptase n=1 Tax=Bombyx mori RepID=D5LB38_BOMMO
aaatcggatgaagagctcgaacagttttgtaacgaattacaacaagctttagaagtaaccaagtctagagacgttacaatagtaatgggagatctaaatgcaaaaatcggtagaggaagtcaaggtgattttattggaaactttggacttggcactcgtaacgagagaggagaaagattggctcaattctgccaagagaccgattttattgtcacgaatacttattatgatctgccgaccaggagactctatacatggaaatcaccagcagacaaccaacataacgtcatcagaaaccaaattgactaccttctcatctgcaaacgataccgaaattccataaaatcagtaaaatcataccctggagctgatgtgagatca

SEQ ID NO: 5787 - DNA, 599 bp, Diabrotica virgifera
cttgatttaactgttgtcgaaaattggatctaccagcaaaataaggcattgaatctgaatgttgactttttgaggggatgggtcattcagcaacaacagttgaatcctagctttttatacaattggatagtcaggaaacaggttcctaatattttcagcggtggcatcagcccaccaatattcgacccaaacacaaatatagatacaggtttcatccctgctccattgagagaactattaaagcttaagaaagtatcacctctacaatggcaagaatggctgcttgaccaaaaacaaaggaacaaatacattgatataacgcttattgaaaactgggttaaccagcaacatcaactattgaaggtagatattggaattatagaggcatggatcattcagcaacaaaacctgaaccccagctttttgtataactggataattctaaaactggttcctaatattttgggcaatacaagtgacccagcttgggatggacaaataagaccaccagcaaaagatcaaatttggcaacaatggctaatccagcaaaggcaaaagacaatcttgatttaactcctatcgaatactggatcaacgag

SEQ ID NO: 5788 - DNA, 275 bp, Diabrotica virgifera
atcaatcagcaacatcaattattgaaggtagatactgcagttatggagggatggatcattcagcaacaaaacttaaaccctaacttcttgtataactggatcattaatcaccaggttcctaatattttaggcaacctaaggcctccaattgatcaaggttggaatggacaattgagaccgccaatagcatctccagaagtttggcaacaatggctaatccagcaaaggcaaaagacaatcttgatttaactcctatcgaatactggatcaacgag

SEQ ID NO: 5789 - DNA, 460 bp, Diabrotica virgifera
  SmartBlast Evalue=1E-31; Info=NFX1-type zinc finger-containing protein 1 n=1 Tax=Culex quinquefasciatus RepID=B0WXL3_CULQU
gtccacctacacgaatgatcttatctgttgttgacagcaatccttccaagaattgatccaacgcatgattagtaaaacaaattaccaatatgggagagtctttataccatgcttcgttattttgtaacattgtgctaacaatttttaaacctagaaaggttttgccggttcctggaggcccttgtataattgcgaattccctggttagcgcagagtgaaacgcattattttgggcttcattcaatccataaaattctcgatcaccccaatccaaaggaaaaaatattgtaccctctatagtatagaatacaggatctattttcaaaaggtactggggaggtcttgtgtctgtacgtacgtctataatatatttttccatcggaaagtgttcgattgtcatattttttaaaacagtaagaacttgataataaggttcaaaataaactttgctctctactaa

SEQ ID NO: 5790 - DNA, 402 bp, Diabrotica virgifera
  SmartBlast Evalue=4E-11; Info=Similar to helicase required for RNAi-mediated heterochromatin assembly 1 n=1 Tax=Leptosphaeria maculans RepID=E5ACG2_LEPMC
gtccacctacacgaatgatcttatctgttgttgacagcaatccttccaagaattgatccaacgcatgattagtaaaacaaattaccaatatgggagagtctttataccatgcttcgttattttgtaacattgtgctaacaatttttaaacctagaaaaagtcttgccggttcctggaggcccttgtataattgcgaattccctggttagcgcagagtgaaacgcattattttgggcttcattcaatccataaaattctcgatcaccccaatccaaaggcgaaaatttggtaagttctattgtatagaaaacgggatctacattcagcagatactgtggaggtcttgcatctgtacgcacttgtatgatatatctttccattggaaaattttcaattggcata

SEQ ID NO: 5791 - DNA, 507 bp, Diabrotica virgifera
ttaaaaagtgtctcattagacattatgatttaatggtctatgtaacattttatttatggatattttgaacagacaataaaatggatcagaataggctatattttttgatatgccttttaggtaccattgaacattaacctctagattttcttatttacgtagcttgcttgtttcctcatgcatatcctcgactgctggttatttagtacttttgatcgtttgatactgtgtataaacaagttggctgtataagtcaagtatcatgacgatctcatattagttatattttttggttttgaaacgtcttacctccttttatttaggtacaattttcttgtagagataaatgtggactattaatcgcataatatgattacttacttcttgttcaataaaataaaattagatgcgataatttttaacatatatgatgaatacttaaaaataggagaatctaaacgacatccttatcctgtaattaactttaacaagcgcatattaacgcag

SEQ ID NO: 5792 - DNA, 349 bp, Diabrotica virgifera
ttaaaaagtgtctcattagacattatgatttaatggtctatgtaacattttatttatggatattttgaacagacaataaaatggatcagaataggctatattttttgatatgccttttaggtaccggttgaacattaacctctagattttcttatttacgtagcttgcttgtttcctcatgcatatcctcgactgctggttatttagtacttttgatcgtttgatactgtgtataactcaggttttcaaatttcttgagcattagtccctttagtgttgttagttttgtttattgctatttataaacaagttggctgtataagtcaagtatcatgacgatctcatatta

SEQ ID NO: 5793 - DNA, 546 bp, Diabrotica virgifera
  SmartBlast Evalue=8E-27; Info=Chymotrypsin n=1 Tax=Phaedon cochleariae RepID=CTR_PHACE
tcttaatatgcagttcgaatgttagataataccattattttgatgtatacgtcaagatgtataactattatggtgtttatgttattctagtgagttgtatatatctgtccaatgcaggaaaacccgcagcagaaaactctgagaaatccagtgaccttgaaattattgatggacaggaagtcgtacctcattcgatgccatatatggctgctattcgtactgtaataaattccacctcaattttgtgtggaggatctttaattagtgattccttagtcctgacagcagctcggtgtgttgatggagctagtgaagtggatgttactttaggggctcacaatttagaagacaatgaagacagtcaaattactctgatttcatcatcatttattatacataaagattatagacattcgggattagctgacgatattgcagttattgaattacccgtatcagttcctttaagtagatatattgccactataaagttaccagaacttacagatattggcaatacctatgaaggacaagaagctttagttg

SEQ ID NO: 5794 - DNA, 311 bp, Diabrotica virgifera
tcttaatatgcagttcgaatgttagataataccattattttgatgtatacgtcaagatgtataactattatggtgtttatgttattctagtgagttgtatatatctggatgtttctgccataagaatgccattctccattttcaataaaatatctccatttccaataaaaagcatctaatattgttcgagatatgggaaaaaatcaattttcgtttgtaactgcaaagggctgtaacttttttaatgtgcacatttgtactaagtccaatgcaggaaaacccgcagcagaaaactctgagaaatccagtga

SEQ ID NO: 5795 - DNA, 438 bp, Diabrotica virgifera
tcgaaatttgtttcgcttcacaacaaaaatgattatttattattgttttattattagatatttcatgcaaatacctttctaaatacctatcttaacataaaattttcacccattttggtttatttttataaatatctatttattaataataaaatcgttttctattacttccatttagcgcgactatgatattgtcaaaatattaatcttagataatgtcaaagattaccactgttgccaaagtttatgatactatctcccgaagttatattttgttgctacctgttgatcgctactgtttactcttaaactaacgctattgttgttcagaagacactgccaaagtgtagtaagcttatacatatattatgtttaaagtaattctaggcttactacactttggcagtaccttccaaacaacaatagtgttagtttaat

SEQ ID NO: 5796 - DNA, 417 bp, Diabrotica virgifera
tcgaaatttgtttcgcttcacaacaaaaatgattatttattattgttttattattagatatttcatgcaaatacctttctaaatacctatcttaacataaaattttcacccattttggtttatttttataaatatctatttattaataataaaatcgttttctattacttccatttagcgcgactatgatattgtcaaaatattaatcttagataatgtcaaagattaccactgttgccaaagtttatgatactatctcccgaagttatattttgttgctacctgttgatcgctactgtttatactcttaagtgtattttatattttatctttgacagttaccctgacaggaatctcgacactaaatttttttcgaatacattgaagttcaatgtttctttgccaattgaacaattt

SEQ ID NO: 5797 - DNA, 452 bp, Diabrotica virgifera
taattgtgtgtgaatcaaaaaggtcagtcaataacctatgtgatagattttttttataatcagaagttaatttttttacgtaaaagcatatgaatttaagattccaacatttcaaaaatttaataggaagtataagtaattttgcgaataccaaatttgtttgtttagctgggttttattaatggtatcaagaacaaagcgataaatatttgtttgaattagattaatttatatggtaaaagtttctttggacagttatgcccacagaatttaattgataaatttacagaacattgcttttgataataaaggtaattgtatgtttttatttatgattttctatttatttccttttcctatttttatcccgataaggatcaactaagagatactgaaaccacgagagaagataagtataacataagataatttagtacactttttattattat

SEQ ID NO: 5798 - DNA, 399 bp, Diabrotica virgifera
taattgtgtgtgaatcaaaaaggtcagtcaataacctatgtgatagattttttttataatcagaagttaatttttttacgtaaaagcatatgaatttaagattccaacatttcaaaaatttaataggaagtataagtaattttgcgaataccaaatttgtttgtttagctgggttttattaatggtatcaagaacaaagcgataaatatttgtttgaattagattaatttatatggtaaaagtttctttggacagttatgcccacagaatttaattgataaattttcagagcattgcttttgataataaaggtatttgtatgtgcttatttatggtatttctatttatttccttttcctattttatcccgataaggatcaactaagagatactgaagcc

SEQ ID NO: 5799 - DNA, 431 bp, Diabrotica virgifera
  SmartBlast Evalue=2E-19; Info=Stunted n=2 Tax=Tribolium castaneum RepID=D6WE43_TRICA
gtccatcttttacataactcggctcgtttctaggattcgaaatctgtaaaattaatttttacaaaaatgagtgcctggagagctgctggattaaactacattaactattccaacattgctgccaaacttctgaggcaggcacttaaacctgaacttagaacagaagcaatgagaagaaatgaaacccatattaaagtaaccaaatggcaagatggaaagccaataagtgctagagaataaatactagggagtccacattttaaatccataatttaagtccaagtctatgtagtgttaataattgtttagtcaactacaatttatgttacaattttgtaaatatcagttccagatttatattatgtgggtattattcctatttttgatgtaaaaatggaatagtgaaaaagaataaaacaatattataatat

SEQ ID NO: 5800 - DNA, 411 bp, Diabrotica virgifera
  SmartBlast Evalue=1E-17; Info=Stunted n=2 Tax=Tribolium castaneum RepID=D6WE43_TRICA
gtccatcttttacataactcggctcgtttctaggattcgaaatctgtaaaattaatttttacaaaaatgagtgcctggagagctgctggattaaactacattaactattccaacattgctgccaaacttctgaggcaggcacttaaacctgaacttagaacagaagcaatgagaagaaatgaaacccatattaaagtaaccaaatggcaagatggaaagccaataagggagtccacattttaaatccataatttaagtccaagtctatgtagtgttaataattgtttagtcaactacaatttatgttacaattttgtaaatatcagttccagatttatattatgtgggtattattcctatttttgatgtaaaaatggaatagtgaaaaagaataaaacaatattataatat

SEQ ID NO: 5801 - DNA, 505 bp, Diabrotica virgifera
gaaatatgaaaattaacttgaaaaaagatcgattttaaataatatggttccacaagctatgcgcaaatcgcttaccttaaaattggtgttctttaggatttggtaaactatgcagacccaagggtgactactcaattcatcactgcttcttttaatggactccgacgaaaagttcggaatttgggagttctttcaccgttgaagtcttgaagcgaagtcgtatcttccgtccttaaggtactcaatggagcatgtccgtttgtttatgatgcgcaaagcgatttttgtgcttgtggatgagtaaaaaattgatattgagcatttatttaaatgtttatttaaattagaagacacacaaggttattctgcatcatttttaaagagggcagagaaaagccactacatataatgtctaaaacttattctacccgaaataaataaatattagaatgatagtcaatataaaataaagaaataaggattcccgaacagtttcaaatgatcc

SEQ ID NO: 5802 - DNA, 325 bp, Diabrotica virgifera
ctatgtccttaaatatggacatagcacctttatctaataaaaagggtacttagtcataggacatagtacctttatcaattaaaataatccttattattaacaatttaagaatcttgagttattcaggggttgtattacgactttaggtaaccaaatatacaaataagtcatttttttgaaaaaaaatggacatggcacctttatcaactcatgtcttcaattattaaattatctaaaacttattctacccgaaataaataaatattagaatgatagtcaatataaaataaagaaataaggattcccgaacagtttcaaatgatcc

SEQ ID NO: 5803 - DNA, 418 bp, Diabrotica virgifera
tacaatattcgttttaaatgtatcacataggtactgtaatacttagagtattatccataatatcaaaaaaatagaaataaatactctaattgcaaaacattttacaatatacaataactatacaattttacaatatacaataaagatagataactatacaatttttatagtttccacatgtaaaattaggtattttaattatacgttagcggccaccgccacctccaccgccacagccgccgccgccaccgccaccaccactgccaccgccgccaccgccaccacagcctccgccaccgccacccccaggaatgggcgcaggtgccgcggatatagtttgaattatcaaaaggacgacgcagaggaatgccacaattgcagacacaaccctcatcttgaaatagacttcaaaataaac

SEQ ID NO: 5804 - DNA, 416 bp, Diabrotica virgifera
caatttatcatagaggtatactattcttattctactgtaatacgtactatgtatctactgtaatacgtagagtattatccataatataatagcaaataaatagaaatatacactctaattgccaaatattttacagtatacaataagatagataaaatatacaaatttatggagtccacatctaaaattagctattttaattatcggcggccacctccacctccaccgccacagccgccgccgccaccgccaccaccactgccaccgccgccaccgccaccacagcctccgccaccgccacccccaggaatgggcgcaggtgccgcggatatagtttgaattatcaaaaggacgacgcagaggaatgccacaattgcagacacaaccctcatcttgaaatagacttcaaaataaac

SEQ ID NO: 5805 - DNA, 457 bp, Diabrotica virgifera
tcgctccagtaaaatcaaacatggtaaaatggggaaaatagaccaagatgatatgaactatgattgtagagaaatacagaatatggaacatcttcttacacgcagaaactatcctcatcggtgtaccctcgaagattggtggctcgccatcaaagatggaaccgacgtagcccgatgctgtcccgaagtaatatgaatatcatgtccggacacgataaagtaaagtaagtctaaactctactagtaagataattgctgtatgtatccgactcacgtctttactaaaaggttaacacttaaatatatggaaactgttatttagaacattttttattctttactcatatgtataatactttatatattttttgaagctaataatcaagaggtttatattcgcttgaataatgcagtgaaatttttggaacagtggaaatacaatatgtcgtaaggtaga

SEQ ID NO: 5806 - DNA, 370 bp, Diabrotica virgifera
tcgctccagtaaaatcaaacatggtaaaatggggaaaatagaccaagatgatatgaactatgattgtagagaaatacagaatatggaacatcttcttacacgcagaaactatcctcatcggtgtaccctcgaagaattgtggctcgtgactcgccaacaaagatggaaccgacatagcccgatactgagccgaaattctatgaatgacatgtccagacacgataaagtaaagtaagcatccgacaatgtccagccccacgattcaaaaggacaaaatagatatttagatatttttagtacttaatattttctaatttgaaccttggcgattaaaatacagatataccctactcacaacgaaatgtaaagc

SEQ ID NO: 5807 - DNA, 464 bp, Diabrotica virgifera
actgataatttaattgtaaagaataacaaattttctgattcagttttttttgtggattcctgttcaaaaaatgtccccttaaacaaatcagaaggggcccgggatgccgggcaaaacaatcttgttatacaaattcaaaattaccttttagccccgaaaattgtattaaaaaaaaaaggtctctgtcattttttttcaaaagttgatgtttttcgagttataagcgatttaaaatcttaaaaatgtgaaaatacctacgcatattcgaggtttgaaaactcatatgtaaattattagttttcaggttgccaagtgcctaaattgaagttttaaattcaatttcaacattctaacgagtaatcggggcacacttcaatatactgttgttctataattgttaagtatgcgagtccactcgcttttaagtcgtcgcacattgcaatttatggtgcgtctctgtcgca

SEQ ID NO: 5808 - DNA, 349 bp, Diabrotica virgifera
tggtcagcaatttttaaacactattttttgccccgaaaaacattttttagattttctgggtcatttgaaacaaattgtcattcctctaaaattggtagttttcgagatataagagattgaaaacctgaaaaatgcgaaaatacgcattttcgcgagttgaaaactcatatgtaaattattagttttcaggttgccaagtgcctaaattgaagttttaaattcaatttcaacattctaacgagtaatcggggcacacttcaatatactgttgttctataattgttaagtatgcgagtccactcgcttttaagtcgtcgcacattgcaatttatggtgcgtctctgtcgca

SEQ ID NO: 5809 - DNA, 550 bp, Diabrotica virgifera
attgtgttgggccattgtgttgggagctaagtcaccaaacgtttatttcgtacaaaacaaagtttaaattttaaaaccagttattgatcaattattgatagttatcatgaactctgttgattatatcagttaattgggtaattaattagacacacacaagaaattaaacttatattgatcttatgcaaaatagaacacaagtcttaattggtcaaaccactaaacattattggcctaaagggactaagtccaaaaaaaccagttaaaatgacaagtagacaaaagttattaatacgaaataaatctaattcttgggcaggttaaaaaaagttgttttgcttcgtcgccacagaatccttttaaaccttaaagacatttcaatattttagcagaggttggtatcaaacctaatggtaggggagcccaagcggggatttttgtagttactcgagcgcgtcagaaaatcacatggagtgaaaccttgtaccctgtaaatgtacccctaccatatattggctcttaataaggggagttcgttaaggggggtccg

SEQ ID NO: 5810 - DNA, 274 bp, Diabrotica virgifera
tgtatgattgtgaccataaacaatcaactcattttgaatttctgttcgtttcaattattgttccaattgttctaatgcattaataagattttgttgagttttatactgtttatattttactaattatctactattatggcaggggagcccatgcggggatttttcaattactcgagcacgtcagattatcacatagggagaaaccttgtaccctgtaaatgtacctctacctatattggctcttaattcaggggagttcgttaaggggcgtccg

SEQ ID NO: 5811 - DNA, 562 bp, Diabrotica virgifera
tgtatgcagaagtaaattagtatccacatctttttcatttgtattttttccgtgaatcgcgatcgacttcaaaaactttggcgatcgaccggtcgatcgcgatcgactctttgagcaccgctgctctaacgcattaaattgtatgtgacagaaaaaaaggcacgtcgctgattacagacatttataacatttattctagttattctagttgtcgatagatggcgccataatcaaaaaagaattatttattaaataaaataataatattatcaatataatctgtacaatttataagactatacaaatcaaagaaaataccattttataaatgcaatacacaatattattgatttgtttttattccaaattgaaaataaaatgtgacaactgtcagatttaactaaaatgtcatgttagaataaatgtcattaatgtgtattatcacggacttacttttttttctataatttgtgacgcactgaaaaatggtcatgaaaaggagaatacctattgtctgtcccaccttgacttacagtacacgaacatacggcaatacaatcct

SEQ ID NO: 5812 - DNA, 252 bp, Diabrotica virgifera
tgtatgcagaagtaaattagtatccacatctttttcatttgtattttttccgtgaatcgcgatcgacttcaaaaactttggcgatcgaccggtcgatcgcgatcgacttgctctaacgcattaaattgtcggaatgggacgttttggcgtcgccgcttcggcgtggccacttcggcgtggccgtttgggcgtagagccgtttcggcgtaggccgtttcggcgtaggccgtttcggcgtcggccatttcggcg

SEQ ID NO: 5813 - DNA, 427 bp, Diabrotica virgifera
gtgagaggaatagaaatcagttacctttaagatgttctacagtataatgttgtacgacttcttttaaagaggttatctttttcaagattttatacttttagcgagtttttatattttttgcgattatttttttaaatttcccattgtaacttttttttctacatttaggtagtatattatataataaaaagaaagcttattctgtttactttaaaatggtgtattataaaaaattctaggattatttttgaataagatatgctttttcaaaatgtaataagcactcgcaacgatccccgattctaggactattttctaaatctctcattataacttttttatgtgattgtgtgttatgattgaatcttattttttataggcaatactttcgatccacttgactcggccgggcaaacttcaaaatatg

SEQ ID NO: 5814 - DNA, 389 bp, Diabrotica virgifera
gtgagaggaatagaaatcagttacctttaagatgttctacagtataatgttgtacgacttcttttaaagaggttatctttttcaagattttatacttttagcgagtttttatattttttgcgattatttttttaaatttcccattgtaacttttttttctacatttaggtagtatattatataataaaaagaaagcttattctgtttactttaaaatggtgtattataaaaaattctaggattatttttgaataagatatgctttttcaaaatgtaataagtacttgcaacgatttttgattttaggattatttttttaaatttctcattataactattttatgtgattgtgtgttatgattgaatcttattttttataggtaatactt

SEQ ID NO: 5815 - DNA, 428 bp, Diabrotica virgifera
aaatatttctctttcctcttttcctcttcaagaatattctggaattccattctaatagttcttgataaaaacctaacaaagggaggaagtgaaccagatttataaaggtatctattgtatataatgttacctgttttaaaataaaacagtactccatgatctgatatctgataattaattatttttcatttagagtagacaaaattacaaaataaagtttggttaagttcttgacaggaaaataaaatatttgacatttgacaaacaaattggagcagatatgtaccggaatataaagagcagttcattcgatgtatcagtagcgtaaattgatcacccaccgctgaacgcacccattggcacacagactcggtgctgacgccaaaaaaccagcgtgcaccctgggcgctatctgaccgttcgcaaac

SEQ ID NO: 5816 - DNA, 368 bp, Diabrotica virgifera
aacaggtacttttgacacaaattttggtcgctatttgggttttgaggttatgctattattatatgtattatttttcaagaagtgttgttcccgtcgttcatacgtgtttattttataaatcaaacagctttaaaatggcaagtcgaagtaattacagtttggttaagttcttgacaggaaaataaaatatttgacatttgacaaacaaattggagcagatatgtaccggaatataaagagcagttcattcgatgtatcagtagcgtaaattgatcacccaccgctgaacgcacccattggcacacagactcggtgctgacgccaaaaaaccagcgtgcaccctgggcgctatctgaccgttcgcaaac

SEQ ID NO: 5817 - DNA, 407 bp, Diabrotica virgifera
  SmartBlast Evalue=5E-15; Info=Tenecin-1 n=1 Tax=Tenebrio molitor RepID=DEFI_TENMO
agacaagcatctaatacaactaaaattaaaaaaaaatattaagagagacacaatgaagtgtgcaatttttgctattttcgtgttagcaattgttgctggtattaattcttctccaattgaccaggaagagccaaaagttattccaccggatgtatttattccagaagattataatccacaacagaaagaggaacactccagagtaaagagatttacctgcgacgtactcagcgtggaagcgaaaggtgtcaagttaaatgatgctgcatgcgccattcattgcctcactcttggcaaagcaggaggatggtgcgacaaccataaagtgtgtaactgcagaagataaaatataaatgttttataaaaatatgtaattttcttataaatatacagaatatttatggatc

SEQ ID NO: 5818 - DNA, 401 bp, Diabrotica virgifera
  SmartBlast Evalue=4E-16; Info=Defensin 1 n=1 Tax=Acalolepta luxuriosa RepID=Q9BK52_ACALU
gacaagtgtctaatacataactaaaatcattattaataaaaacacgatgaagtgtgtacttttttcttttttcttattcgccattgttgctagcattaattcttctccaattggccaagaacagccaaaagttgatgaaccagatgtattgattcctgaagattataatccagaacaaaaagaggaacactccagagtaaagagatttacctgcgacgtactcagcgtggaagcgaaaggtgtcaagttaaatgatgctgcatgcgccattcattgcctcactcttggcaaagcaggaggatggtgcgacaaccataaagtgtgtaactgcagaagataaaatataaatgttttataaaaatatgtaattttcttataaatatacagaatatttatggatc

SEQ ID NO: 5819 - DNA, 433 bp, Diabrotica virgifera
agaatttgagtgcatcgttttccttctacaatgcattttgctatagtgttatttttgtgttcaaaaggttgagcgggtttggaatggatggtttttgaaaaagataagatcaaattatggagcgcatgtttaaattttcttaaaaatcttcctttttctccatgtaacttgaaaatgataagagatactgttataaaaaataaataaaatgtttatctaaaagaaacctacatttttgtatggcatcttttttggcatctcttatcattttcgagttacatggagaaataggaaaagtttttgagaggatttagagatgcgctctataatttgatcttgttttttcaaaaaccatttcattttaaacccgtccaacttttggaacacaaaaataacactataataaaaggtattgttagaaggaaaacgatgc

SEQ ID NO: 5820 - DNA, 374 bp, Diabrotica virgifera
atgttcaaaaagctgaacgggtccaaaatgcatgattttgggaaaaaattaaattatagagcgcatctttaaactttcccaaaaatcctccttcttctccatgtaactcgaaaatgataaagagatacagtaatgaaagaaaaacagaattgttatctggaaaacccctacatttttgtactgtatctatttttcgtatatcttatcattttcgggttacaaaggagaacaatgaagatttttaagaaaacttaaaaacgcgctctataatttgatcttatttttttcaaaaaccatttcattttaaacccgtccaacttttgaacacaaaaataacactataataaaaggtattgttagaaggaaaacgatgc

SEQ ID NO: 5821 - DNA, 445 bp, Diabrotica virgifera
gggcctattagaaatatctcaagaactaaaggcaacagaatcatcaaaatttgaattaagaggttttgaagagtcatctgtttaatgaaaatattttcatctatttgctacttccggttataccagaagttgcttataacttcgtttttttttaaatgggacaccctggttatatactacattcgctctcgcgagactcaaccacacttttcaatttataactgtcaaaatttcaccctttttgaattttattgagtgggattacttgtttttaggttcactgatgatggactgataagtctgaaatcgttctaaataatgaatgtgatccttttggattttttagaattttaattcttaattaaattttataccaactaaaccagggagatttttacttcaagttaagttatttgtctaattttcgtttcttcttatattatgc

SEQ ID NO: 5822 - DNA, 356 bp, Diabrotica virgifera
ccaatctaggccaaattcttttgcaaattttaatatgtagttggaacatacatcttaaccagtgtttggcattgtggctatttagcaaggacagggagtaagtaatcttaaccacacttttcaatttttgaacattcaaaatttcaccctttttgaattttattgagtgggattacttgtttttaggttcactgatgatggactgataagtctgaaatcgttctaaataatgaatgtgatccttttggattttttagaattttaattcttaattaaattttataccaactaaaccagggagatttttacttcaagttaagttatttgtctaattttcgtttcttcttatattatgc

SEQ ID NO: 5823 - DNA, 406 bp, Diabrotica virgifera
gttagagttgactattcccagttcgagtcaactccaactaaaacgagcagtaagagttgatttgaaaaatttaattcaacttttactagttgaagtactcttcctaacccttgttagtaaaagtagatcgcgggaaaaatagaatcaactcttactagtttgagttgactattcgtggatcgattcagtaaatgtagattatacaagtatgtataatctcatgtgcttttttgatgagtgtgcgtctctttattttgaccgtttcaactacttatcacgatttgaacatatcagtaacatttgatttctagaatcggttgtttgtgtgaatcaactcttactaaatggcattgggaagagaagagtatactttttctagttggagtctacttttactagtaaatgt

SEQ ID NO: 5824 - DNA, 398 bp, Diabrotica virgifera
tgcggctatattttaattactgctttacctacaatcaatgaatgattttacatgtatttttgatgtctcgatttgattcccatcaagaaaattgattacaataaactgattgattataatcaacttcttattagcgttcgaacaaccggccctgagttgactattcgtggatcgattcagtaaatgtagattatacaagtatgtataatctcatgtgcttttttgatgagtgtgcgtctctttattttgaccgtttcaactacttatcacgatttgaacatatcagtaacatttgatttctagaatcggttgtttgtgtgaatcaactcttactaaatggcattgggaagagaagagtatactttttctagttggagtctacttttactagtaaatgt

SEQ ID NO: 5825 - DNA, 411 bp, Diabrotica virgifera
atgttgatttgtgtagatcgtaattgttgtttttagcgcgaaatggatgccaatgctgctaaggacagtgataagaaaagagcaactgaaaatcctgatttcgtcactgctacttttgaccttcaaagtatgctgcaaataccaagtagtgatgtatcacccgtatactagagtagaaaattatctgcctttaatttattcatttatgaaggagctcacccaaataatgcacactgttttacctggggtgaacttaatggtgccagagggatcttagaaattgcgatcatgtttgtatcgctatttaaaaaacctccctgcgagagtcacagaagtatcattgttttccgatactgtggggacaaaacaggaatcaatttgtcatcgcaatgctgcattatttgttcatgt

SEQ ID NO: 5826 - DNA, 372 bp, Diabrotica virgifera
cgcgaaaaggatgtgataagaaacagcaactgaaaatcctggttttgtcaggttttgtcactgctacttttgaccttcaaagtgtgctgcaaataccaagtagtgatatatcatatatcacccgtatactagagtagaaaattatctgcctttaatttattcatttatgaaggagctcacccaaataatgcacactgttttacctggggtgaacttaatggtgccagagggagcttagaaattgcgatcatgtttgtatcgctatttaaaaaacctccctgcgagagtcacagaagtatcattgttttccgatactgtggggacaaaacaggaatcaatttgtcatcgcaatgctgcattatttgttcatgt

SEQ ID NO: 5827 - DNA, 418 bp, Diabrotica virgifera
gcagctctctactcagttcaaaagctgtctccctgtcttagaccattattaatatcaaagaacgtagagttttctccttgaattctaacgcacgagttacatttgttatactcgagagaggtacgatcgaaaacatctaccagaacacaataaaagtaaaagtggatgatgaattaactgacccaattgaagccggcaatgggataagacaggggattccttgagtcctttattgttcaacctgatcatgacgaaataataaaaaagtaagaactaaaaaaggataccaaatgtgaagaaaacaacttaaaataatctgctatgcggacgatgcaatactaatctctcaaagtgaagatgatttacaacgtatgctgcaccaattcaacataatcgccagaaaatttaacatgttaat

SEQ ID NO: 5828 - DNA, 380 bp, Diabrotica virgifera
tgactgatcctatattgtaggaaatttaattacgcggcttttatgttggtgtaacatttctcggaaatgaatactttttgagttaaaatcaaaaaacgaagaaaaagactttttgagtgggaggataactgaaaatattattatatgatataataatacaatgggataagacaggggattccttgagtcctttattgttcaacctgatcatgacgaaataataaaaaagtaagaactaaaaaaggataccaaatgtgaagaaaacaacttaaaataatctgctatgcggacgatgcaatactaatctctcaaagtgaagatgatttacaacgtatgctgcaccaattcaacataatcgccagaaaatttaacatgttaat

SEQ ID NO: 5829 - DNA, 456 bp, Diabrotica virgifera
atggtatgttctgtccgattccatatttgttttgattatggccgcgtatattctatatatttagttttactttcattgattatgagccccatcttctctgcttccttctcgaacaagacgaaagtcttcctcatccttaagctggtgtttcatatttggtcgatatcgtctgcaaatgccaacagtaagtttggtctcggtagaatactatagtcggttttttcgattctttaacttctgatcgtttgcttggtcatgtactgaggacaaaatatcagcagctacaagatctcattcacagaaagtttttggataaacgtagaaaaaaacaagcaacgtttttataatagtagttaacgaaatgcaaatgatcataattactataaagtatatatcgctatgttaggtatattcatctaggtacatttttcatcagtttttttctcgctgataaat

SEQ ID NO: 5830 - DNA, 338 bp, Diabrotica virgifera
atggtatgttctgtccgattccatatttgttttgattatggccgcgtatattctatatatttagttttactttcattgattatgagccccatcttctctgcttccttctcgaacaagacgaaagtcttcctcatccttaagctggtgttttctatctaccttgttacctactgcagaaaaatgtttcttagatttttaaggaaatgaagataatgacgatgaataatagctacaattttatcatctaaatcgcatactctggtttcgaccctactattaagaaatgctcgcgtttacaaaattgtagctccataactagaattaaacagatcccctgc

SEQ ID NO: 5831 - DNA, 420 bp, Diabrotica virgifera
  SmartBlast Evalue=2E-18; Info=Histone-lysine N- methyltransferase SETMAR (Fragment) n=2 Tax=Camponotus floridanus RepID=E2A795_9HYME
ctcatacactgctctgaagtggtctcatggttgcgcttgttggcctgggtgagaaaacgcagcactcatcgcgccgacagctttctcatgcccaaaatttcatgcagaatatcatcacgcgatcttttgagatacctactgtctcagctatctcacgaaccttgaggcgacggtctgccaatacgagatcgtgaatttctttcaggttatccgccgtggtagccgttctcggggcacctgggtgtgacttatcaaataccgatgtgtcatcacgttgaaactcgttaaatcaatttttgtcggacgccatcgaagcagaagaattaccatacacagcaatcaagcgttctttgatttcactacgcgatttcccttccaaaaacaagaattgaaacatcgaccaatattgctcttttttca

SEQ ID NO: 5832 - DNA, 373 bp, Diabrotica virgifera
gatgtcatggcaaaatagctactttttccccaattggggctgttttttctgaaattaagggtcgaatcggcccaataattcgacatagtaaagccccgtgaccgtttgggaacttttcccagaccttttcctcccggacctttctgggaagtttatatttacctttttaatcccagaaaacggtgaccgtcacccctccggacgataggacagactttgccttcttcggagcacgctcgccttcttcttttgtcggacgccatcgaagcagaagaattaccatacacagcaatcaagcgttctttgatttcactacgcgatttcccttccaaaaacaagaattgaaacatcgaccaatattgctcttttttca

SEQ ID NO: 5833 - DNA, 500 bp, Diabrotica virgifera
cgttcgcttaactcagacacgttttgacagatcctgagtaggaaacataacacaaaaagtcctaccttaccctgttaacagctcaaataaacttattatttcactaaaaaaaataattattgtaaatagttggatttgacgcgttgtcttaacatttttctgattgacatgtcaaattttgtggaatttaattattcctcaaaatatttgtattttgtataataaataattttttcatttgttatcaataccacaaatacattaattatggtgtaaacagtggcagatccagaaatttttttgcggtgggggtcatggatctggagggtgcgagggcctaaaatatttttgtttgacggctctcgatgttttttttttgattattgaattaatatttttctacgaaagtgcaaaaaatgtctactttcgcgcacgcattttagtttagaaagttttacttttccgcacgcgttttacttttccgcacgcgtgtagatatt

SEQ ID NO: 5834 - DNA, 290 bp, Diabrotica virgifera
ttcctgaaaacttctgtaatgtttattttattaagttacaggggtgaaaaaaaaagagaaaatttaatgtgatttttaatttcaaatatcttattcaaaagaaactttttggttattctaagggaatttcgcccctcgataataatgtaatcttttattctgcgtttgaatttttcaaaaatactttttctacgagcgtgcaaaaaatgtctactttcgcgcacgcattttagtttagaaagttttacttttccgcacgcgttttacttttccgcacgcgtgtagatatt

SEQ ID NO: 5835 - DNA, 407 bp, Diabrotica virgifera
ccacctggatatcccttctagatgactacataatggaaagataaatccgcccaaataacatttactacaagaagaagcagaaacagatcacctcaagttaccataaataacaacccaatccccataaaaactgtggtaaaatatctaagactccacttggattagaaactgacatggaagatacacataaaagtaaaaagaagccaacttaatctaaactgtatctgtccaaactatcacttgaaaacaaactgaccatctacaaatatatactaaagccaatttggacacatgggattgagctctaggaatgtaccaaaccatcaataaaaaaaaattaaggtcatttcagtccaagccacttcggatgatatctggagcaatttcgtatgtaacaaatctaacct

SEQ ID NO: 5836 - DNA, 371 bp, Diabrotica virgifera
ccacctggatatcccttctagatgactacataatggaaagataaatccgcccaaataacatttactacaagaagaagcagaaacagatcacctcaagttaccataaataacaacccaatccccataaaaactgtggtaaaatatctaagactccacttggattagaaactgacatggaagatacacataaaagtaaaaagaagccaacttaatctaaaattaaaaatatgtactggcgggtgggttgtgattgcgcgcagcggtcaaatacctcctggggtactgaaatttacctttaagagggttgctgtgattgcgcgcaacggaaggattaagacaggtaaacaaaacggtatattgtgattgcgcgc

SEQ ID NO: 5837 - DNA, 410 bp, Diabrotica virgifera
cgataaacccaaaaagtcaataaattcgatattttatttttaaaatcatcagataacatcgatgtttttgaaaaggaaattaaaaactacttgcaatctccaagacctggaccagacacagatattttattatagtggaaatcatacatgtagtagtgttttccacgttttatctcggttggctaggaatattttgtgtgtccaagcgacgtccgtaccagtcgagcggcttttttctggagcagcgctagtactaacgaataaaagatgctctttaaaagatataagtatcaaagaactcatttgtgtgaacagatggatgaagagctctttaaaggatattttttgtgaggttacaatataataatgtatcctatttcttgtatattttaagagattttttaactctt

SEQ ID NO: 5838 - DNA, 373 bp, Diabrotica virgifera
cgataaacccaaaaagtcaataaattcgatattttatttttaaaatcatcagataacatcgatgtttttgaaaaggaaattaaaaactacttgcaatctccaagacctggaccagacacagatattttattatagtggaaatcatacatgtagtagtgttttccacgttttatctccgtaccagtcgagcggcttttttctggagcagcgctagtactaacgaataaaagatgctctttaaaagatataagtatcaaagaactcatttgtgtgaacagatggatgaagagctctttaaaggatattttttgtgaggttacaatataataatgtatcctatttcttgtatattttaagagattttttaactctt

SEQ ID NO: 5839 - DNA, 426 bp, Diabrotica virgifera
agtttcttaacctaaaatttaaccggttgtaagcgttattcggcgtatctgattttctagtattaatcttattgttatagtgtttttaagtgtgtttacattaaagtttattaactgaaccagtaacaatggacagaaatagcagagcatttaaaatgctgcatattttaaataaccaacaaagagagaaatacatagtttacgacgacgtgtcgtgaagaagcctaaacttcagcatgataatgaccccgattttattttgtcagattcagacacggaagaaattgaggaaccgaaacttcagcatgataatgaccccgattttattttgtcagattcagagacggaagaaagtgatcaaccgaaaattcagcatgataatgacccgatttattttgtcagattcagagacggaagaaagtgatc

SEQ ID NO: 5840 - DNA, 357 bp, Diabrotica virgifera
agtttcttaacctaaaatttaaccggttgtaagcgttattcggcgtatctgattttctagtattaatcttattgttatagtgtttttaagtgtgtttacattaaagtttattaactgaaccagtaacaatggacagaaatagcagagcatttaaaatgctgcatattttaaataaccaacaaagagagaaatacatagtttacgacgacgtgtcgtgaagaagcctaaacttcagcatgataatgaccccgattttattttgtcagattcagacacggaagaaattgaggaaccgaaaattcagcatgataatgacccgatttattttgtcagattcagagacggaagaaagtgatc

SEQ ID NO: 5841 - DNA, 551 bp, Diabrotica virgifera
taagtacaaatttgtacctactgtcattgtaaataggaaatggctattatcggtggacgtattttataaagttataatgtacatttatatttagctatatacctataatataataataataacaactataatgtgctatactatcagccggtttccgaaacgttattcaaatctccgatcatctaatcggctgtcagatttgatcaactgttaacctgtgatgggtttctcaaacgccaattattgtaaaattgcatgatcatagatcatgtaatcgatgatctgacatacgatttggtagcgatactgtcacaattggctgttatccttcaaaatttcaattatattaacctctaaatccaaacttgtatctttagattctaaaggtgcattctctcttacgtactgtcacttttgtttggagcaagaattgaacgagagcattttaaaaatgaggctaggtatgtgacgagagttggagatataaaacagtttatttatgatctataatattttataatcgtatttttatttttggatctatatattta

SEQ ID NO: 5842 - DNA, 228 bp, Diabrotica virgifera
taaatccaaacttgtatctttagattctaaaggtgcattctctcttctgtactgtcacttttgtttggagcaagaattgaacgagagcattttaaaaatgaggctatataatttcaaaaagaataaaacgcatgaaatttatgtgatgagagttggagatataaaacagtttatttatgatctataatattttataatcgtatttttatttttggatctatatattta

SEQ ID NO: 5843 - DNA, 383 bp, Diabrotica virgifera
ggatcattcgaaataaacagggtcttttgtaattttcctcgtaagttgatcgttttcaagttataaacaatctaaaactaaggaaaaacagagatacggacgattttcaaggctcaaaaacacaagtaaaaaatatcatttttgtaatcatcaagtacctaaatttaatatcaagccttcttctatcaggtcatgataataatttttgccacgttttattagtgcggcagattcgtgcaatatattataagaattgcacatttaatgatacaagcgtataacttggtccacatatactgcacaaataaaggctcaaatttagatatgaggccatcccagaccctgccccttacaaaaatggcggtcattcaaaatgggcgact

SEQ ID NO: 5844 - DNA, 384 bp, Diabrotica virgifera
ggatcattcgaaataaacagggtcttttgtaattttcctcgtaagttgatcgttttcaagttataaacaatctaaaactaaggaaaaacagagatacggacgattttcaaggctcaaaaacacaagtaaaaaatatcatttttgtaatcatcaagtacctaaatttaatatcaagccttcttctatcaggtcatgataataatttttgccacgttttattctaaagtatatttttttaattattaatgaggaagacgtgcgatcgagctgcattagcaaatgaaaaataatgttttataatgaaataagtccaaaatactacttatcaagaactaataaaataaggtttgatcttgaatttaggtacttcgtaatttcaaaaat

SEQ ID NO: 5845 - DNA, 415 bp, Diabrotica virgifera
attttactatatagatgaataatttgaagacattataatttcgtataggtaattatgtagatacttttttgtttattttaataattcatttgtgtcacatataattgttaatattttgtttaatgtgtaattaagactttaattttactctagtttataagaaattatagagattgattttatactgtatgttagcatatatttgtttctgtaatgggggtaatcccttatataactaaataaatcaataataaagctcataacattaacacagctaaacaggcgattgcagggaccagatggaaaaatggcacgaagaagtattgtttggtagccacattggatatcaaaaatgcttttaactccgccaactgggattgcattatgcgaggtcttatcgaaatgaatgtaccgg

SEQ ID NO: 5846 - DNA, 366 bp, Diabrotica virgifera
attttactatatagatgaataatttgaagacattataatttcgtataggtaattatgtagatacttttttgtttattttaataattcatttgtgtcacatataattgttaatattttgtttaatgtgtaattaagactttaattttactctagtttataagaaattatagagattgattttatactgtatgttagcatatattttttgtatattttgtatatttgtctctttcactatttcctactaacaaggcatcatcagcatacattaagcaccatggaatgttaccctgtagtttcgctgttatctggtccaaaactatgagaaaattacggactaagcaccgagcgttggtgcaatcatac

SEQ ID NO: 5847 - DNA, 393 bp, Diabrotica virgifera
ttatctcacaacttaatgttttccatcttttgcgttattttgccagttattgggacgctcatcactgtatagaatagtagaaggtgacattcataaaactgttaagttataatattagcttatgtgtacatcaacaaacctttttttctacatttattgattcatgttatattaggtacaaaaaagtacaatatcttacaacttctgattttgatattagatacagttgcaaatctaacatccaataaaaagtttccagttacgcaatgttttcacatcgctgacgatataatatatgatacaatgttattatggaactaataggttttattgaaattgtgttatctgtatgcctgtaaatctagccataaaggatataccaataggaactat

SEQ ID NO: 5848 - DNA, 386 bp, Diabrotica virgifera
ttatctcacaacttaatgttttccatcttttgcgttattttgccagttattgggacgctcatcactgtatagaatagtagaaggtgacattcataaaactgttaagttataatattagcttatgtgtacatcaacaaacctttttttctacatttattgattcatgttatattaggtacaaaaaagtacaatatcttacaacttctgattttgatattagatacagttgcaaatctaacatccaataaaaagtttccagttacgcaatgttttcacatatcgtcagtggtgtgacaataccttctgtctgctgtagcatgagttttgtggtagagacgaaaaaccttttttttggggtcacctcctgttttcatatgatatttttt

SEQ ID NO: 5849 - DNA, 401 bp, Diabrotica virgifera
atcatcaatcagttagaagaccttcaacatgtaacccagattctgataatttggtgaagttgttggcatcaaaggttgtatttaaaaaaaataagcaattggctgtttccaattctgaaacagccctcttgccataataatggcaacgttttttgcaactaaagacttatttttttcttccctatatcttgaaatccaacaatttcatcacgacccaaatgaaaataaagatttgacttaagcatcatcaatgcatataatacaatttgtatccaattctgacatagtcttaacttttaactggaccgcattaaatatagaggtctgagacaatccaggtttacaaacaatttttccagtcatttcttccaaacaacgtttagttggtaaataaagatttt

SEQ ID NO: 5850 - DNA, 360 bp, Diabrotica virgifera
atcatcaatcagttagaagaccttcaacatgtaacccagattctgataatttggtgaagttgttggcatcaaaggttgtatttaaaaaaaataagcaattggctgtttccaattctgaaacagccctcttgccataataatggcaacgttttttgcaactaaagacttatttttttctgaatcaaatttgttctgttctgttttgtaatctgttctgtaatcaaatctgaatcatctttactttcattcatttatttttttctttccctatgtcttggaatcattttcacacagtttttacagtttcatcatgaccctaatgaaaataaagatttgacttaagcgcagctttatcaatgc

SEQ ID NO: 5851 - DNA, 440 bp, Diabrotica virgifera
ttgggtgaaacatgttctggatctagtcaaagagcagagttagtaagatgcgtcctctaagtcgacaccagaaatgtacttacattatagctgaatgcagagatcaccactgattgctaaatactcaagcttagtatttttgttgtcactaaatactgggaaatacaaattccctcccctctctttaaacattgccactgacagttcaccaattgcttaatgctcgccctgctcacgtttattttggtactaaatttgaaaaattctggtaaaaatgtcaaaaaattctgcagcaaaaagtgactgaataaaagaaatataacgtttatacttttaccagcattcgacaaaataaaatttaatttatgtctctttgattattgttaacgtactaaaacgtttatttaatgttgaattcatttttttaattgtaaagaagt

SEQ ID NO: 5852 - DNA, 316 bp, Diabrotica virgifera
tggttataactcataccactagatggcgctattttgtttgctgccacaaaattaatgggaaatgtcaagagttgtacgtatggattatagtctatagtatttgctgacagtctaccaattgcttaatgctcgctctgctcacatttattttggtaacaaatacatacagcaaaaagtgactgaataaaagaaatataacattcatacttttaccagcatttgacaaaataaaatttaatttatgtctctttgattattgttaacgtactaaaacgtttatttaatgttgaattcatttttttaattgtaaagaagt

SEQ ID NO: 5853 - DNA, 442 bp, Diabrotica virgifera
cttaaggcggggatatgtgaatttgttattaaatatgtggcccttcataaatgttggatattttagtccagaacgtcaacggttgtcgtaaaggtacgtgaaaagtgttattatcacatagtttacaacaggaactatttttaaaagacgccaactctttgctttgatgtccttgctttgtggcagatatattatgaaacgataacaagaaataaagtagattcgttatggaaaatggtccaaaggacccttttttagaagcatgggtgtcagagcacacaaaaaatggagtagtggcccctgtaacaacaaaattccctggcgggaatgatgctactaatcaactagagaagttagattgtgaagttccaaaaattaatggggatagcaccagaattaataatatagaagagaattcttatagctcagaaagtgacgcctt

SEQ ID NO: 5854 - DNA, 334 bp, Diabrotica virgifera
cttaaggcggggatatgtgaatttgttattaaatatgtggcccttcataaatgttggatattttagtccagaacgtcaacggttgtcgtaaagataacaagaaataaagtagattcgttatggaaaatggtccaaaggacccttttttagaagcatgggtgtcagagcacacaaaaaatggagtagtggcccctgtaacaacaaaattccctggcgggaatgatgctactaatcaactagagaagttagattgtgaagttccaaaaattaatggggatagcaccagaattaataatatagaagagaattcttatagctcagaaagtgacgcctt

SEQ ID NO: 5855 - DNA, 391 bp, Diabrotica virgifera
ttcacctgctgtaaaatgaagacgataattttatttgtctttttaattttcgcgattgcacaaatccagtgccaaaaaggtctttgtggtccaaatgagcaatttatagaatgcaaatcttgttgtaaagaaccaacgtgccagcagagaatccctcctagatgtgatatttgccctgcaatatgccgtacaggctgtgtttgtctaccaggatacatcagaaagtccgaaaatgggccgtgtgtacaaagatgtcacattagaagggataagtagttgtactatggggagtaaataacaatatcgtatatgaaatgaaacgtatgttaattttgttttatatgtgacagttaaagaacttattgttaaaaataaattttaaattaaattt

SEQ ID NO: 5856 - DNA, 381 bp, Diabrotica virgifera
ttcacctgctgtaaaatgaagacgataattttatttgtctttttaattttcgcgattgcacaaatccagtgccaaaaaggtctttgtggtccaaatgagcaatttatagaatgcaaatcttgttgtaaagaaccaacgtgccagcagagaatccctcctagatgtgatatttgccctgcaatatgccgtacaggctgtgtttgtctaccaggatacatcagaaagtccgaaaatgggccgtgtgtacaaagatgtcacattagaagggataagtagttgtaataataatatagggaataaataacaatatcgtatttgaaacaaaatgtatgttaatttggtttatataaattgtgacaattaaagagcttctggttaaaa

SEQ ID NO: 5857 - DNA, 406 bp, Diabrotica virgifera
ctttcaaatttttatataatttgaacaacagtaggtacagaaaacccacaattaaacttttgtgtagaaatttgaaaaaaaaatgagatttgatcatcaagactagatatagagaggatttgtttgaagaaattatatagcttcagcctttgttaaaagaattaaataatgatgtttgtaaaattttaaaatttatatttttaaacgaattaactgcagttgcccaaatttaacaatagttcttcacattctgtttactctgcctatatctgttgcactgctgaacgatctttttctaaactgaaacttagaaaaattatttaagatcgaccaccagttcagagtggttgacaaaatctatcatttctgtagagtgtattagatgaaattgatattcaccatagta

SEQ ID NO: 5858 - DNA, 350 bp, Diabrotica virgifera
atttcttggatattcggttaatgtcgtccatccagcgtgttggtggtcgtcctctgctgcgtttgagatacaagatacagcttcagcctttgttaaaagaattaaatacctaatgatgtttgtaaaattttaaaatttatatttttaaacgaattaactgcagttgcccaaatttaacaatagttcttcacattctgtttactctgcctatatctgttgcactgctgaacgatctttttctaaactgaaacttagaaaaattatttaagatcgaccaccagttcagagtggttgacaaaatctatcatttctgtagagtgtattagatgaaattgatattcaccatagta

SEQ ID NO: 5859 - DNA, 373 bp, Diabrotica virgifera
  SmartBlast Evalue=0.000000009; Info=Endonuclease-reverse transcriptase n=1 Tax=Bombyx mori RepID=D5LB38_BOMMO
taataagaactacgggaaataaacacctaaccaaatctacaaagaaacataaggtgtggatgacaccagacatactagaactaatggatgaaagacgcaaaattgaagaataattcagaaaaatacagagaggttgataagacataaaggaataataaggaaggccaaagaatcatggattaaagaacaatgtgtagaaatgcaaatctatgaaagaaagtatgacacattcaatatacataaaaaagtaaaagaaattacaggaacccaaagaagacatcaaataagtttgcttaagagcaaagacggaaatattattatagatttaacagagaaaattaatagatatagtgaatatataagagaattgttt

SEQ ID NO: 5860 - DNA, 361 bp, Diabrotica virgifera
acaaagcatattttttggttttaccgtaatacttatattatgtaaagtgaagtagaaaaatttgttacgtttatacattacctaccacctagatattatacattgcccattgatttccccatttttaattaaccttaccttcattaggttaggttagaaatggaataggtttctactatgtgtagaaatgcaaatctatgaaagaaagtatgacacattcaatatacataaaaaagtaaaagaaattacaggaacccaaagaagacatcaaataagtttgcttaagagcaaagacggaaatattattatagatttaacagagaaaattaatagatatagtgaatatataagagaattgttt

SEQ ID NO: 5861 - DNA, 389 bp, Diabrotica virgifera
  SmartBlast Evalue=1E-13; Info=Contactin associated protein like 5-3 n=1 Tax=Camponotus floridanus RepID=E2A9Q0_9HYME
tggatgtggatgtgagtagttgatagacggacatttactttaacattcctttatttgaaaacgtgacatgatctcgagatgatgctaataaatgtttgtttatttttattatcttccacaaaattagctttagcagagtactatgaatactatgaatgcaacacacctttattcacaaaagcagcagttagtgctacttcggctatgaatgaaaggggccccaagaatgcagtcctatatggtggcaatgcttggagtgcccacgacagcgatttcgaccaatacctgatattcgatctgggccaagtgatgaacgtgacgaggatatggacgcagggtaggccccacagtaacgagtacgtcatggagtaccgtatcagttacggtag

SEQ ID NO: 5862 - DNA, 378 bp, Diabrotica virgifera
tggatgtggatgtgagtagttgatagacggacatttactttaacattcctttatttgaaaacgtgacatgatctcgagatgatgctaataaatgtttgtttatttttattatcttccacaaaattagctttagcagagtactatgaatactatgaatgcaacacacctttattcacaaaagcagcagttagtgctacttcggctatgaatgaaaggggccccaagaatgcagtcctatatggtgaagaacgttagtcaataagacagaaagtttttaaaaacaagttattaaagtcatttgcaaaatgaataaacaaagtgtccgttgggcttttaacttttctaagtggaaccccactgtctctgacattcttctcg

SEQ ID NO: 5863 - DNA, 399 bp, Diabrotica virgifera
cttcactcttcctgtcgtcagtataaagtataatttacatagacaagtttccgctttttagttacaaattttcgaattgttttttgtgatcactttatatttcattattgtaggatattattatggcgtttatacttccagataatatactagagactttactttgcagtttttgtcataaatatttatctgtgaaacccacaaaagtttatccaaacaggcttatacaatgtggaagatgtgttgataataaggaacaatcatccataatttcgaagcagtagaatcacagtatggaaaaattgctgaaaacattttgtttaaatgtgtcaacagatttgatggttgtcgagaattgttgacatactctcaggttaaggatcatgaacaggtatgctt

SEQ ID NO: 5864 - DNA, 355 bp, Diabrotica virgifera
gatttactaaaagcaataacagtttttcataagtacctaaatattttcttattatgtatattattagacgatattaaaatggcatttatacttccagataatatactagacactttactctgcagtttttgtcataaatatttatctgtgaaacccacaaaagtttatccaaacaggcttatacaatgtggaagatgtgttgataataaggaacaatcatccataatttcgaagcagtagaatcacagtatggaaaaattgctgaaaacattttgtttaaatgtgtcaacagatttgatggttgtcgagaattgttgacatactctcaggttaaggatcatgaacaggtatgctt

SEQ ID NO: 5865 - DNA, 477 bp, Diabrotica virgifera
gatcagacctgttctattaatgtttgattcctgtataaccttttctagtaatatgctaaagattataggcgataatggatcaccctgtcgcagtccttgtttgacctcaaagctttctgttatagtattgtttatcttgactttatcatactgatatatcatactgatattgtttaaaaacactaataatattgatataaaatgttaatcaattttatttattgttataagaatcaaaggtaaatatgattaggcgaatgaagccttaggtttcgcagtcaatatcccaaccacacacacatgttgcaatctatttcaatacggtttatagtacaaactatacatttaatatcaaaatagtgggatatatttttttagttgaggacacttggtcacattgcattgtttcaggataaggtgaaatatcttcaataaatggaaaaaagcatgtatattttggataacatcgatgttaac

SEQ ID NO: 5866 - DNA, 256 bp, Diabrotica virgifera
gatcagacctgttctattaatgtttgattcctgtataaccttttctagtaatatgctaaagattataggcgataatggatcaccctgtcgcagtccttgtttgacctcaaagctttctgttatagtattgtttatcttgactttattcattgttctttaggagttaacttttataattctaataagctttggacaaagtccatgtcttgcaatgctgtgaataattcgcttcttttgactcgatcgaaagcctgtt

SEQ ID NO: 5867 - DNA, 484 bp, Diabrotica virgifera
  SmartBlast Evalue=7E-13; Info=Putative DNA-mediated transposase n=1 Tax=Helicoverpa zea RepID=A4KAD9_HELZE
aaacagtggcttaccgaggagggtcaataataatttggtgaagtatctcttacgaagctcgtactgatcttgtgttcgatagaggcagtgtgaaagctcaaatatacgtggaagaagttctccaagaccatgtcatggcttgacaggttaatgcatgacaatgcacgttgtcataccgcaagattcattcgtgagaatctcaatgaggtcggcattcaagttttaccatggccggcatgcagtcccgatctgaacccaattgaacacatttgacaacatcaaaaaatgggtaagagcaagagtaccggcccttacatccttcggagagctcaagacggatgcagtagaagagtggcacaatatcccccccatcggatatccaggatatcatgaatggatgcccgaaccggctccaagaagtcctgagagccagaggaggtggcaacacccatcattaacactagtatttgttattagtctatga

SEQ ID NO: 5868 - DNA, 256 bp, Diabrotica virgifera
tggccggcactcagtcacgatcttaacctaattgaacgtatttgggacaacctcaaaaaacgggtaagtgcaagagtaccagccctacatccttcggagagctcaagatggctgcggtagaggaatggcacaatattccccaatcggatatccaggatatcatgaatggatgcccgaaccggctccaagaagtcctgagagccagaggaggtggcaacacccatcattaacactagtatttgttattagtctatga

SEQ ID NO: 5869 - DNA, 375 bp, Diabrotica virgifera
aaaattgaaatgaaggggttttgaagagtgatctctttagtgaaaattttcatcgatttgctacttccggttataccggaagtggcttataacttcgtttttttaaatggaacatcctgtatatttttgcatttttggattctcctcgttgtcttctttcttgaaatatgaggttttgtagtgttgtacagggtgtgaaagttgctacgaaattaataaaaagaacgtaattagcttgtaactgccctgtgtaacattgcagagccgcatattttgagaagggggacatcaggtagaatctagaaatgtgaaaatatacagggtgtcccatttgaagggacgaggttataagcaacttccggtataacaggaagt

SEQ ID NO: 5870 - DNA, 363 bp, Diabrotica virgifera
aaatatagggtgttccatttgagagggttcagagggtcctcattccgagtttcgaccaaccctgtatactaaaatttagcatttagctatactaataatttttgatagtggtgggctatgttggaagtcattttaatgtaaatggagttttttgatgtccaactgctacaattctacagggtgtgaaagttgctacgaaattaataaaaagaacgtaattagcttgtaactgccctgtgtaacattgcagagccgcatattttgagaagggggacatcaggtagaatctagaaatgtgaaaatatacagggtgtcccatttgaagggacgaggttataagcaacttccggtataacaggaagt

SEQ ID NO: 5871 - DNA, 423 bp, Diabrotica virgifera
atcttgttttaagtccattttgaagggactaccagttgtactatcaagttgtattaactactaaatgattgtgtgaatcactgtgattgcatggcgagcagaagactgacaggaagagagcattttgtctttgaaacttcattttgaacggatttgggtgtagtcatccatttttttgatatacgtatcatgttattcgattttaacgacttctcgaaatctgtggttctgagtaaacgaacggtggctttgagattaagaatccgggtttttctagcgcatttcatgtcttaacattaaaacggtacctgttcttgaaattaaagcagactttacttcgtttactgaactacactatccaagaatttaacgcaccaccttaaaatgggtaattttttatgtctcgaattttctaaacctgcc

SEQ ID NO: 5872 - DNA, 316 bp, Diabrotica virgifera
gtttgaaacttcctgatcattcagaagtcttcattttgtatggatttggatgaaatcaaccgttttattgatatgctatcatgttcttcgattttaatgacttctcgaaaatactgtggttttgaatacaggaacagaagctttgagattaagaatccgggtttttctagcgcatttcatgtcttaacattaaaacggtacctgttcttgaaattaaagcagactttacttcgtttactgaactacactatccaagaatttaacgcaccaccttaaaatgggtaattttttatgtctcgaattttctaaacctgcc

SEQ ID NO: 5873 - DNA, 420 bp, Diabrotica virgifera
ccggcgaaacataggcgtcaacgagggttttattagaaaggttttgatttttttaatattagtttaaggtttataggcgaagtaacgaagcactaaaaagccaaaaacctaggaatattgtgcaatacgatgaattgtcatgcaactttttgcattctattcaggagagtgtcacgagagaggaaatttgtgaactaaattaatctaaggtagatgaaaattgcatttttggacataagaaaaatgcattttcaaagtgcatctcgaagagatggaaaatgaaaaatttagaactcgggaaatattgacggaaatgacttcaatttttatatttgggggttttggaggtcagtgaacacaaatttcatgacagcgatggtctccgaggatgcaccaactttaattgttccaatgctaata

SEQ ID NO: 5874 - DNA, 311 bp, Diabrotica virgifera
caacgaagcactaaaaagcccaaaacctgcagtaagatgaatcgtcatgcaactttttgcattcaattcgagagagtgtcaggcaattttgtgaactaaattgatcaccggcaaaaaaatttgtgcatgagaaaatgcattttcaaagtgcatctcgaagagatggaaaatgaaaaatttagaactcgggaaatattgacggaaatgacttcaatttttatatttgggggttttggaggtcagtgaacacaaatttcatgacagcgatggtctccgaggatgcaccaactttaattgttccaatgctaata

SEQ ID NO: 5875 - DNA, 415 bp, Diabrotica virgifera
agccatagcaagtaataatatggctctatgttctacttggggtgtcatacaagattgtggaaatagcaaccatttccccacctttgtcataataaacaactgtgagtttaacaaaaatgatagcatctatacacaaacatacaaaatgagaaatattaaaagagcagactggtatacattccacactgggatgataacaggaatgcttgatttaccggtaaactctaattacaatgagtttttggaggtagttaatcaagtagcagataactcaattccgtataaaaattgtagaacacagggtaaaccttcaaatccgtggtgggatgaagaatgttcactttggattaaaagccgcaaacaggcaattcaaaactttaaacaatctgtttccttagagaactatataaacgct

SEQ ID NO: 5876 - DNA, 309 bp, Diabrotica virgifera
agccatagcaagtaataatatggctctatgttctacttggggtgtcatacaagattgtggaaatagcaaccatttccccacctttgtcataataaacaactgtgagtttaacaaaaatgatagcatctatacacaaacatacaaaatgagaaatattaaaagagcagactggtatacattccacactgggacacacacaattccagtctaggtagtgaaatagcctttaacagagcaacacgtgatttagcgcaaagtaaattgctgagtatacgaccgtgtatatcaatagatcgtatatatatgcaa

SEQ ID NO: 5877 - DNA, 465 bp, Diabrotica virgifera
aagtagtgtgtgtgtatgtgtagcattttttcgagaagcatcgtcaaaaaggtcactgatgtatctctcccattctttaagtacgtgagcatttttctgttttctaattccggaggtatatttaaagtttcttgtggaggttgaactgtcatgctttttttggaggtcttctatttctttacatgaattctcgagccaggattctttggcctgtttaatttttctttttatgagtttgttaatttcacggtatttgataatatttctatttttgtagttttcgtcgaacttccatcaagtctagaatttcttggttcatccattcattttttgccaacattgtaggtgtttttaaagattcccttacgtcctctaaaatcgagttttgaatatcgtaaaaagagtttggaaacggtcaaagatggtgtccttaaaataggatacccaaggagtaaatgacgagaa

SEQ ID NO: 5878 - DNA, 261 bp, Diabrotica virgifera
aagtagtgtgtgtgtatgtgtagcattttttcgagaagcatcgtcaaaaaggtcactgatgtatctctcccattctttaagtacgtgagcatttttctgttttctaattccggaggtatatttaaagtttcttgtggaggttgaactgtcatgcttttttatcttctagttgtttgcacgagttgtcgtgtcaaaatctttggcttgcttaacttttctttttacaagtgtgttgatttcgcggtattgacatacgccaca

SEQ ID NO: 5879 - DNA, 415 bp, Diabrotica virgifera
atcatagagtaataaaatttataccctcacagctgatttttgcaggattgtttataaaaatacttacaataacaggtaatatggtctgacaaatttttaagggaatccagttgtcggacggaccaaaattaagaaacctctatataactctaataatgattaaaaagtctcatgagagaggcaacatttttttagatggtggtacccacacccacgaactaaatgtatactcgataagttacggctctgcccactaccgctatagaggtgattaggaaccgggtgaagagtaaaactattctaaaactatatgtgtagaagtgtagaatattaaattatagataaattgccgttctgaagttattttcttgtggcatttttatgattaataattatatgggaacaagccacaacc

SEQ ID NO: 5880 - DNA, 300 bp, Diabrotica virgifera
atcatagagtaataaaatttataccctcacagctgatttttgcaggattgtttataaaaatacttacaattgactggtaatattgcccgacaaaattttaagggtaccgcccccccaagtacccaggtaccgtgtgggcccaagatctaatagtgtcattcatttttttaacttaagtctttccataatccctttaagttagtgttataaaagggttatttaaactacttatctaaaatgattttgttgaatagacacaacttagctgtcaacttcaaatcagtaccatttattgcaatc

SEQ ID NO: 5881 - DNA, 374 bp, Diabrotica virgifera
cgccgtttactttcgaagggcgacttcctactgatatgtagccctgtactttaccttctaatatgatttgaagtagttcatatctttctcctctcaaaacatggcccaagtattgtatttttctttctttgattattagtgatttcaaatggtgatcagataactaatgaaattctttgaattttataattattgaatttaggttatggtgacatttgaagttatttttaaattttaattggattagatagacagtgattatttaaatattcattctatgtccaattaatgtttactaataaaatcataattagaaatatatcagcatgcaccaatatgttttaaaccctcaaagagataaccactgttgttcc

SEQ ID NO: 5882 - DNA, 341 bp, Diabrotica virgifera
gcgccgtttactttcgaagggcgtcttcctactgatatgtagccctgtatttttctttctttgatttattagtgatttaaaatagtgatcagataactaataaaattctttgaattttataattattgaatttatgttattgtgacattttaagttatttttaaattttaattggattaaataattaaaacatttaacgaatacatcattttaggtctacaatgattatttaaatattcattatatgtccaattaatgtttactaataaaatcataattagaaatatatcagcatgcaccaatatgttttaaaccctcaaagagataaccactgttgttcc

SEQ ID NO: 5883 - DNA, 415 bp, Diabrotica virgifera
tgatttagtaaagaattaaaaaaactgctatatctaataaaacaaaaattcgttaccattcaacaatttaaacataaattaaaaatatttgaactataacagttgctcaagaatatccgccattttgttcgatgcatttccttgctcgttttaaaatatttcgaatcgattttccaagtgcattgggattgctcatcatttttctggtagcttcttttgaccttgacagaattaatcaattgatttcaaaattgccgtaattaaattatctgcgcaaaaatttgacatgcaccttttaacgcagtttttatgctcttttaaaatacacaaacaaattttcaaaatttcaatatacagggtgttgtttcaaggccacaaccactttataatttttttgttaatccggacctggatt

SEQ ID NO: 5884 - DNA, 299 bp, Diabrotica virgifera
ccgccattttgttcgatgcatttccttgctcgttttaaaagatttcgaatcgattttctaattacattgggattgttcttcatttttctggcagcttcttgtgaccttgacagaattaatcaattgatttcaaaattgccgtaattaaattatctgcgcaaaaatttgacatgcaccttttaacgcagtttttatgctcttttaaaatacacaaacaaattttcaaaatttcaatatacagggtgttgtttcaaggccacaaccactttataatttttttgttaatccggacctggatt

SEQ ID NO: 5885 - DNA, 403 bp, Diabrotica virgifera
ctgccgtgcttagcgaaaacgccgtatctgaaagaatgaaatttttacttctttctaacccaaatgtgcatatctatcttatttgcttactaaaaagacgtaagttaagccaaaacacattaaacacaccgcgtcttatgccgtatcctgtgtaaatgtatacgaattcttaaactaaaatcgattttactcgaatgtaatgtctctgcagatacggcgttttggctaagcacgtcagcgtactagttttgttatttagacataaacctccaataaaacagtgcgcatcttatgttattatgagtaacaaactatgtactcttttgtacaaactatgtacaagacggttcaaatgtggtttagcgagtttcgatatataggacttatttccacgtcatttagg

SEQ ID NO: 5886 - DNA, 301 bp, Diabrotica virgifera
ctgccgtgcttagcgaaaacgccgtatctgaaagaatgaaatttttacttctttctaacccaaatgtgcatatctatcttatttgcttactaaaaagacgtaagttaagccaaaacacattaaacacaccgcgtcttatgccgtatcttgtgtaaatgtatacgaatactttaacaaaaatcgatttttactcatatgtgagtctgcagatacggtgttttcgctaagcacggcagtatatcacactatcagctaaatgaattaataaagatattctattctataaacagtgttacatttg

SEQ ID NO: 5887 - DNA, 382 bp, Diabrotica virgifera
aattttttgaccactcggatcgaaatccaccctcgaaattcgtggtcagcagccggaaatccgtaagaaaccgttgagtttgtccatcagaattggaaaggacacggtgacccctctggcgcctagactatttagccgtacgatgtttttaaatgggtatattctgttattgtatgagtcttatcagtcttagtaccgtctccgtccaaaagatctggttaaaaatcagttctatattatgaacttattaaattttatattccaatgatatgatttatagtttttaagacgacttggtattctggttatattgtaaatatacatttcattgcctttatattgatttttaaagatttgtaaattttataaaataaaaattgtt

SEQ ID NO: 5888 - DNA, 329 bp, Diabrotica virgifera
aattttttgaccactcggatcgaaatccaccctcgaaattcgtggtcagcagccggaaatccgtaagaaaccgttgagtttgtccatcagaattggaaaggacacggtgacccctctggcgcctagactatatgttcgatcaaccgttcaaaaatcgtccagttgatctaaaatcatgtatttttgaagtcctcaattcaaaatatgaagtcaaaatctaaacatgcaagtggcggatcaaatatggcccactatgcttttaaaaatcacctaatcgggccaaaacatttattcatgtagtggtaaagtcgtcaattattattatagag

SEQ ID NO: 5889 - DNA, 486 bp, Diabrotica virgifera
ttgtgggacaaacaatacaaaatcgtggcaaatcgtggtcttctgtaaagtaccgaggctagaaaaatagtgaccattacacatagtttttaaagattgtcgcgattgtagtatataaactactttgtttaccaaaaatttaatttagaaaagataaaataatgcccatgcagtttacaccactagcctttggggtgatgctgctagtagcagtaggaactgtagcctataccatttggaataattctagtactagacaaaattcttatgaaaataatcataatcctagaaatacctttaattttgattgtggctatgataccaaaagggatgagaatactactgaagatggtcaaagaaaaagaaaacgaaatactccagatgaaactaaggctccttcaagctaatattttatgaaatgtcctttatatttgataattggtttgtaacgttagaatatgataaataaatacacacatatattgc

SEQ ID NO: 5890 - DNA, 211 bp, Diabrotica virgifera
gatcttaaggaaggagacccatgtgtacccgagagtcaacctcctgcagagcaatgcggaccaggattaagatgttgtaaaatgcaaaaaaagtgtgttaaaccagatgaaactaaggctccttcaagctaatattttatgaaatgtcctttatatttgataattggtttgtaacgttagaatatgataaataaatacacacatatattgc

SEQ ID NO: 5891 - DNA, 449 bp, Diabrotica virgifera
gtgccgtttcatatttaacttcaaatatctcgaaaactaatgactttatcgttaccaatgaagagcatattatttacgtagaaagtattggagaatccaaaaaatggcactaaaatagtaattcctccagtagcgtagaatttgagaagggtcaacaattcactatcccctgtcgtacgatctggtagtagctagaaacgcctgtctatcataatttagtaggttgtatagtagtcgcaccttctgccaagtatgaaaaggatacgtcaaacagtttcaaaatggtgagcaaaaatagtttttaaatttttagataacacaccctgcaactcagtaatcaaccacattttatttaagtgttccaggtcaaatcttcgtaccttgtgccaaggtttctccagttactacatggacaattaccaatgaaacaccctgtatagtataataca

SEQ ID NO: 5892 - DNA, 239 bp, Diabrotica virgifera
gtgccgtttcatatttaacttcaaatatctcgaaaactaatgactttatcgttaccaatgaagagcatattatttacgtagaaagtattggagaatccaaaaattacactaaaatagcaatttcgtcagtggcgcagaatctgagaagggtcaaccatccactatcccctgtcgtacgcccctggtagtagccagaaacgtttgtttatcataatttagtaaggtgtacagtagtcgca

SEQ ID NO: 5893 - DNA, 370 bp, Diabrotica virgifera
taaatcattcagcatatcttctcaaccaactcttgaattttcctctttagtttataagttgatgtagtagttgattgggagtttttagtcttctatgagacgagaaatcaaaatcaaaacaatatttttagatcaatttgttgcctacaaagcatgagtgctcaattcaataggtctttagcccacatttcgagtttttaattttgttgggttcagagtggctgtaggtgattggcacactttataatcgtccacgatctactaatacttaaaactaggttgaataaatcaatttgttgcgtaaatacagcatgtgctcctacttgcataccgttttctgcagtgagtagttctaataaatcattcagca

SEQ ID NO: 5894 - DNA, 317 bp, Diabrotica virgifera
taaatcattcagcatatcttctcaaccaactcttgaattttcctctttagtttataagttgatgtagtagttgattgggagtttttagtcttctatgagacgagaaatcaaaatcaaaacaatatttttagatcaatttgttgcctacgacgcatatatgctgatatttgtataaccttatctgcagtgagtagttttaatgaatgattcagtagatcttttggcctacatttcgagttatttatttcttgactttctgagtgggtgtaggtgattggtacacttctaaattagtctacgatcttgtagtactcaaa

SEQ ID NO: 5895 - DNA, 455 bp, Diabrotica virgifera
  SmartBlast Evalue=3E-31; Info=Oxysterol-binding protein n=1 Tax= Glossina morsitans morsitans RepID=D3TQG8_GLOMM
attgttttattgtttgatcgggttgctgaaatgtatgtatttttaaagtagataagtcgtatttgtaaataaattaaatgttagaaagtgtaaaataaattagatattgttgttaaataagtgttaatttcagttatggatctgcataccaagcagagacaattttctggacaactgtacaagtacacaaatgtgatgaaaggctggcagtacagatacttcttagtagacgccaatgcaggacttctacattacttcctctgtgaaggtgaaaaaccggatggaacagtgccaagagggtcggtacatttagctggagctgtgatatgtcctagtgatgaagattcaaagacttttacagttaactgtgcgtcaggtgatatgttgaagttgagggctacagatgctagagcaaggcaggaatgggttaatgggttgagggctgtggcagagtc

SEQ ID NO: 5896 - DNA, 236 bp, Diabrotica virgifera
attgttttattgtttgatcgggttgctgaaatgtatgtatttttaaagtagataagtcgtatttgtaaataaattaaatgttagaaagtgtaaaataaattagatattgttgttaaataagtgttaattgtaagtgttataaataaacaatttcaagtaagtcttttatttatttaataataattaaaagtcaattcgcgtaatagttcacaaataaataaatcagtacagtaata

SEQ ID NO: 5897 - DNA, 351 bp, Diabrotica virgifera
ccgcttatctattatcaatttgttggatttgatttggacacgttttgtttggtttaaatacccagacgtcattttttacaatatgacgcgatactcattgcgtaaaatcatctgtgctaagccatatacatactggtattgttttttctgaacgaaaaataataaactaaatattgaaattgtgctccaaattggcaaaaatcaaaggtaagcgtaacacacaaacaaataaaacgtcatcgatattacgatattcgaagtggattattgtttgattggaacgcggtgttgccaagtcgacagggaagtcctgtaagtagggaggagcgaaatagtatatactgctcaata

SEQ ID NO: 5898 - DNA, 336 bp, Diabrotica virgifera
tggcaacgttgcgctgagtgtgtgaatattaattgtattttgctcctgcattaaacccgtttttcgcgaaatgcagagtaaaccaattacagcaaacgcataaagtgtgaagttaagtgagtaatcttcgcgctgaacgaaaaataataaactaaatattgaaattgtgctccaaattggcaaaaatcaaaggtaagcgtaacacacaaacaaataaaacgtcatcgatattacgatattcgaagtggattcttgtttgattggaacgcggtgttgccaagtcgacagggaagtcctgtaagtagggaggagcgaaatagtatatactgctcaata

SEQ ID NO: 5899 - DNA, 363 bp, Diabrotica virgifera
ccgggatcccgaaaaccggaatcccggacgatttttgtccggtattaaaaaccggtatttattaaaaataccggtattttggtattacattagttgataaaaattgaatttaagcacaatataaatctaatttaaaataatattaatcaattacaataattttttttgaagataaacaatttcgttgtattaaatctttatcaggcatatttgagaccatgagagccacagtgtctaactgatttcaacattacttcacacaatcaacagtggcggttatccctttaggtcaattggtcaatgacctccctgtaataattgtacaatcaaacgattataatgtaattacttccttaaaaaaag

SEQ ID NO: 5900 - DNA, 306 bp, Diabrotica virgifera
ccgggatcccgaaaaccggaatcccggacgatttttgtccggtattaaaaaccggtatttattaaaaataccggtatttcggtattaggttacaaaaagtgaattgatgcacaataaactttcttctatatattttttgctattacaagaaattatttttgaagataaacaaacattgtaaaaaatatttattaaacacgtttattacacatacaagtcaagtatagtgctttctaaaagcgtgaatgtcgttaatttaaggcgaagggttatatcggcttctacaaccaaattattaaatctcgt

SEQ ID NO: 5901 - DNA, 416 bp, Diabrotica virgifera
tgtcagtaggattacacaattaataataacttcacttgtatttttgtttagtttgcacacctaacccctaagttagtagggttgttaacttattatatatttatatagtttggataggtgaactcatacaagtactcttgtttaatatggatattatgatggaactatgttacactaccatatctcaggttatgtgttatattattttgaatatttgattacttactaatttttattatttttgatatcttgttattgaatttgccatattggaaagatgtggtttttaatttgttattgggttactctattaacatttgtctccaatatcttaaacactttataataatttatatccttatatcctacacactatgattctggaattagtttggaagttgatgtgagtatgtatg

SEQ ID NO: 5902 - DNA, 252 bp, Diabrotica virgifera
ataatgtacactactatatctcagtttatgtgttatattttgaatatttgattacttactattttttttatattatttctatatcttgttattgaatttgccatagtggaaagatgtggtttttaatttgttattgggttactctattaacatttgtctccaatatcttaaacactttataataatttatatccttatatcctacacactatgattctggaattagtttggaagttgatgtgagtatgtatg

SEQ ID NO: 5903 - DNA, 325 bp, Diabrotica virgifera
aatttaaatgaaatattttgaaaacagtcactctcaatacaaagagttatattacacttttcacaactccatctggctctttgatgacactgagcacaccttaattattgttttataagttcttttggaaagtgtcctccttcatgtttcctaacggtaagcagaatattttcggaaggtccagatttcataaacattgatttggcattacaacctaaataaacttcatttaagtcttataattcatgtttaacgatttcaaaccccctcattccaccatgatgtttcaccaatttgtacacgtttttgtccattgcgggcctaa

SEQ ID NO: 5904 - DNA, 330 bp, Diabrotica virgifera
aatttaaatgaaatattttgaaaacagtcactctcaatacaaagagttatattacacttttcacaactccatctggctctttgatgacaatgagcataccttaactgtttctttttcgaaagtgtccttcttgtttcctaatggcagaatatttccagaaggtctagatttcatataggtacattgatttggcattaaacctaaataatgccatacaagtactctttgaaaatcaagaagactactttgttgatctttagtcagctgatacaatctccaactatttacaacagtcatgtttatatgattagtaaaaatcacccaccacca

SEQ ID NO: 5905 - DNA, 339 bp, Diabrotica virgifera
gccatcaggtgaagtttagttttgagttccaggagagttcaagttgagttagcctggaagggtccgttgcttgcagcggtacctgaagggttaagttaaaagtgacggtaaaatgtaattaccaagtcttcggccgattgagaacaacagcgcggcgatgcagtgtgatggataagtgggactccggcaattttcgttgtggtcaagcgaattgtcgttaatttgtagataccattttggtattttgtttttttgtgcagtcagaaccaggaatgatgtcgtataagttttctatttttgttactagtttcaacccctagttgaatactaagctggcta

SEQ ID NO: 5906 - DNA, 340 bp, Diabrotica virgifera
gccatcaggtgaagtttagttttgagttccaggagagttcaagttgagttagcctggaagggtccgttgcttgcagcggtacctgaagggttaagttaaaagtgacggtaaaatgtaattaccaagtcttcggccagctaagaaattagcgtggcaatgcagtgtggtggatgaacggaactccgacaattttcgttgatatcaggcgaattgtcgttaatttgtagataccgtttttggtattttgttttttcgtgcagtcagaaccaggaatgatgtataagttttcttattttttttgttactagttcaacctcccagttgaatactaagcttagaa

SEQ ID NO: 5907 - DNA, 397 bp, Diabrotica virgifera
gggaaggagttggacaaaaccgggtaggttgataaaaccgggtaccccttaattcttctaactgtctgctgctatctattagacaatgttaaaattagtgtccctttgccattaacagtcgtgtgtattcatttctacctcatttgagtaatctgtgtcggagcagtaagacctcacctgttttttgatgcaggaaactcgatttttaaggtaagttgatagctgttttctcctctaatgaataactaatggcaatttcaaaatttaatacatgtaacctagtatattacctttaatttggccaaaaattttgaatattatttcataatctaaacatttaaataatttaatgtcttgcgggtacccaggtacccgattttatcagacctgttgatac

SEQ ID NO: 5908 - DNA, 254 bp, Diabrotica virgifera
tttttttcctctaccaaataacgaatgcctaattcaaaatttaatactatgtaacctttaatttggccttacctttataatcaaaatttaatacatgtaacctttaatttggccttacctttataatcaaaatttaatacatattacctttaatttggccaaaaattttgaatattatttcataatctaaacatttaaataatttaatgtcttgcgggtacccaggtacccgattttatcagacctgttgatac

SEQ ID NO: 5909 - DNA, 425 bp, Diabrotica virgifera
ggccagggtctatcacagctttcatttcgatttaaacctaactcggattttaaattctgccacctctgcctcctttcttgttgtttctgacgtagttccgattcagctgacgtaagtgctttgtttaaaacagcttcgatgaagagattttttcgtctttggcatttaaaattcaacttctttactttgataagagctatccaatcggataagtctttgttcttgaacatgttatactcgtgaatatgggcttttgttaccacacccattttgacaaaatctcttcaaaaaattaaattgattgcaattttatataaaaacacacctgaatataataaatcgtggacgaaatatggtcttcccagttccaacgacgaacaaaattactttttcaaaatggcgtctcacagcacttttcacacacc

SEQ ID NO: 5910 - DNA, 249 bp, Diabrotica virgifera
ggaatccaaatttcttttaaattatggtttttattactaatatcacgttatatacaagttatataagtcaaataaaaaattgatacaatttttacaaaccaatcagaagactttcttggctcggtgatggggttgtcgcccagaggtgactgaatataataaatcgtggacgaaatatggtcttcccagttccaacgacgaacaaaattactttttcaaaatggcgtctcacagcacttttcacacacc

SEQ ID NO: 5911 - DNA, 363 bp, Diabrotica virgifera
acacatgcaataggaaaataaaaaaagttaaaataattaaataaaaaataaaatctttggcgtaacaacataaaaaagtaaagatataggtaaacatgaaatattatgaaaataaaaggcaggtttcgagcactgaattatttattaaatcttgctcaagtatgccttcgttcctacagcatcaccagggacgtttcatcaaattggaaggtatccttgaatgtcgtaatatttgtttaaattaaataatggcagaaattaacatatagctcacactggacaaaggacaaacagattaaaagtcaaatgccggtaccacattaggtacatatcgaaggtacaaagataccttcctaatctgac

SEQ ID NO: 5912 - DNA, 292 bp, Diabrotica virgifera
acacatgcaataggaaaataaaaaaagttaaaataattaaataaaaaataaaatctttggcgtaacaacataaaaaagtaaagatataggtaaacatgagtattatgaaaataaaaggcatatatcgagtactaaatttattaaatcttgtttaagtaaactttcgctcctacagcatcatcaggggtgtttcgtcaaattggaaggtacctatccttgaatgtcgtaatatttctttagacttaataaattcagtactcgatatctgcctctttgttttcataaaattcat

SEQ ID NO: 5913 - DNA, 330 bp, Diabrotica virgifera
aaagactggtcacaaattacaccacagaccctggggccaaaaataggttgattgaacctcactaacctaaatacaatagtgcacacaaaaaaagttatagccccttgaagttacaaaatgagaaccgaccttttttcatatatcgaaaactcttgaagatcttttatttaaaatggacatgtggcattcctatggcagcaaaatcttaaaaaaaattaaagtgaaacctgtgcagccctcaaaattttaatgggggttttggtttcccttaaactccccaacttttgtgtacgttccaatttaattattactgtggcaccattactcaaa

SEQ ID NO: 5914 - DNA, 287 bp, Diabrotica virgifera
ttaagttgattgaacctcacttactatatacagtagtgcacaaaaaaaagttacagccctttgaacccacaaaacgaaaaccgaccttttttcccatatatcgaaaactcttagggattttccactgaaaatggacatgtggcattcctatggcagcaaaatctaaaaaaaattaaagtgaaatttgtgcagccctcaaaattttaatgggggttttggtttcccttaaactccccaacttttgtgtacgttccaatttaattattactgtggcaccattactcaaa

SEQ ID NO: 5915 - DNA, 317 bp, Diabrotica virgifera
atgagcaagatgatgaagagttccaatgtatagaacatatagagcctaaaccatttaagcagatcgagcttaacaacttgttagggatcttgggtttacaaaagaaaaaggtgaatttcttggtactatattaaaagaaaacacttattggcagctggaaccagcatatatgtgtataggaagagagaacacctagtaattaacatttttgttactactgagacattccaggtttgatgaactcgttcatcagacagctatattttctgcattggtaaattttcaatgttttttacaattgaataaagtagttttat

SEQ ID NO: 5916 - DNA, 317 bp, Diabrotica virgifera
atgagcaagatgatgaagagttccaatgtatagaacatatagagcctaaaccatttaagcagatcgagcttaacaacttgttagggatcttgggtttacaaaagaaaaaggtgaatttcttggtactatattaaaagaaaacacttattggcagctggaaccagcatatatgtgtataggaagagagaacacctagttcaatgtttttacaattgaataacgtaattttattatttttttattttacgattgttgtacaatcatcgatttacaaagtttatttatttattttaacgcttttatgtacataagatgta

SEQ ID NO: 5917 - DNA, 352 bp, Diabrotica virgifera
ttttagcattctgtctatataatttttaaaatgattaacattatcatcattttaaaagcatcaattagtcatttttttcgctgtctctcgtttcttctcttttctagtaacatttgccgttttattaattttgctattacttatttcatttaatgagagacataatacactggggtgcaaaattaaccggacaccttaaaaattggtcatttttgatgactcgaatttcctaaacctgtaaattttctttaaaaaatatcgctgtaataatattgttgctaaacaggtaaattttcattgtataccgggtgtaccaatgaaactctgtttttttctcaaacttcgcatcacc

SEQ ID NO: 5918 - DNA, 276 bp, Diabrotica virgifera
ttttagcattctgtctatataatttttaaaatgattaacattatcatcattttaaaagcatcaattagtcatttttttcgctgtctctcgtttcttctcttttctagtaacatttgccgttttattaattttgctattacttatttcattttcaagaatttctatatatcttaaccaatctacttcttgcctctttataaaaattgttctgtttacatagatattattaaatcaaattaaaatccaactacagtcccacgccctctcaacattctg

SEQ ID NO: 5919 - DNA, 347 bp, Diabrotica virgifera
ttgaattttatgtggcggaacattgttaaaatcgcaattttaatccaaaaatgaaaaaagtcacgaatttttacgtttaactcgctacaactctgttccattttaatatttttttctaaaatgtctacggaatatatttcttatctttgtgaagactatgaaagtaaccgtagtttttcaggcttttttttttataaaagttatgaatttaaaaaaataaaaggtgcagattcgtgaatcgtgagttaaatcgcaaaaattgacaaagttaaaaaattaagtgacaaaatttaaaatttatctatttgattacgtttatgttaaaccatagggttcaaagaagtttt

SEQ ID NO: 5920 - DNA, 267 bp, Diabrotica virgifera
aaatcacgtttttacgtttaactcgctacaactctgttccattttactatttttctaaaatttctacagcatatatttctcacctttgtgaaaactatgaaaacaactgtagtctttcagtcttttcttcataaagttgtgaatttttaaaaatcaaaggtgcagattcgtgaattgcaaagttaaatcgcaaaaattaagtgacaaaatttaaaatttatctatttgattacgtttatgttaaaccatagggttcaaagaagtttt

SEQ ID NO: 5921 - DNA, 445 bp, Diabrotica virgifera
atcagatagacacaatgtatcgtatgtatgtattgtatgttaataaaattgtagatatattcgctgatagtagtgcacaaagaaagttgttcatctcatagaataatactatgtaggtaaaaatgtagtggtttattaattttctttctattttattctacatcaataaagatgaaaaatataagttgtcctaaacagtgcacgaatacactaatagcccagtaaatgaccgttttagagtgcaattatcagcgtcacgacatatttgcttagtaatttggatttagattctacttattctccacttcaaagttggagttgtgccgttggttgcttttacttaggaggtgggttacttctcggggggtgaaaaatatacgtttcaaataagtcctgaaatggatacattgactaattataagcaacttttgttctatagagcttc

SEQ ID NO: 5922 - DNA, 182 bp, Diabrotica virgifera
atcagatagacacaatgtatcgtatgtatgtattgtatgttaataaaattgtagatatattcgctgatagtagtgccacgtagtgcacgaagaaaattgttcatctcatagaataatactacttaataatgtagtcgtttattaatgttctttctattttattctataccaataaagatgaa

SEQ ID NO: 5923 - DNA, 328 bp, Diabrotica virgifera
ggtgatttgagcttcaatttgagggaatttcagttctaagtgggggatttataaaatcacatctggcaactctggtggtagttgtagcaaattttacctgaaaaattctctgtctctctaggacctctctcgtgtatgtttcaggcaatctcgctttactgtttgaatgggacagggccattccatcagtgttgacacttcgttggttcaacctcaaaaaatggctccacatgctagcaaagaactaaaagcaagaattgtaacgaaattagaagatggttggtcactatctacgtagcgaatcattttaacgtaagcagaacaacag

SEQ ID NO: 5924 - DNA, 284 bp, Diabrotica virgifera
aatgatttaagtgatatacagctggttccaaaaaaaaaactgatacgactcttaatgcgtattttgtaaaaaattgagcagtgtattttgaatgacaaataggtacttatatttacatactgtcactgccaaatcttaaaatttgtcacataacttattctgttcaacctcaaaaaatggctccacatgctagcaaagaactaaaagcaagaattgtaacgaaattagaagatggttggtcactatctacgtagcgaatcattttaacgtaagcagaacaacag

SEQ ID NO: 5925 - DNA, 319 bp, Diabrotica virgifera
gcatggtgctgaatcttattattttgtgctcttgtatcgtcctatatacgtcacctggtggttcatgtgacccatccattttggacatgggcctgtagtctaataggtatgtacttggaggtattaaaattaaaactagatgaagaactaaaattagaaggaagaaaggatttcattttataagcaaatatgttgttgtaacaaggtacgagataagttgcaacttgtatgcaaaaattattaaatgtcaaatttgtaccaaattaaaagattaccaaatttaaaaatttttattacatattataactacttgcattta

SEQ ID NO: 5926 - DNA, 307 bp, Diabrotica virgifera
gcatggtgctgaatcttattattttgtgctcttgtatcgtcctatatacgtcacctggtggttcatgtgacccatccattttggacatgggcctgtagtctaataggtatcgtcaaataagtcattttcgtccaatttttgttggaattatactgataaaatattatatatacatatcccgaaatatataaatttgtagaccgaaatcaaattcacatatagctactcaacattataaaccgctataatgtgttattttcacagtataatttagtataattaattatcttactagatatccaattag

SEQ ID NO: 5927 - DNA, 347 bp, Diabrotica virgifera
taataattccattattcgctcgtgcgtaccatggtggggatacacgaaactatgccagcgcccgtagcggcgaaatatgacaactttggcgaataatgattgaataataatttttttcaatagatatttcgcttaccttattattgcagttttgtttttattatttatattttcatactgactttctttccttcccctatctgatggtatattcctatcgtcatctctttccattttgtgttacacacacaccataaaattaatcgttcaatagactcagctaatgttaaaatctgataggtactaataatccacactgcctaatttctttctatgtacacttaatt

SEQ ID NO: 5928 - DNA, 275 bp, Diabrotica virgifera
taataattccattattcgctcgtgcgtaccatggtggggatacacgaaactatgccagcgcccgtagcggcgaaatatgacaactttggcgaataatgattgaataataatttttttcaatagatatttcgcttaccttattattaatgccggtttaatttttattatttatatttacacacactcactcgcacaatcaaattgtggtcgccaaaaatgtcagcgactacgctagatgtcgcgtcagtcatgcacggagcgaataacctttgatt

SEQ ID NO: 5929 - DNA, 326 bp, Diabrotica virgifera
tttattgtaccatgggattctacggttgcgatccgtgtcgcttctcttcgtacccctgcgcgttgcatcgcacagatacgcgcggttttatttaaatacacgaagaaaaagtcgaattgccttaaattccaaacataacaacgtgctgtacctccccgtacttaagcgaaaatccatgcacatattagtgcacatttcagaagttcgccgtaccgcgcttcgcttcgctctgcttttccgcgcttaagttagcgacaagcttactagcattattattttaaattgcccgcattgttattttaaatgagaacgaaataataataaga

SEQ ID NO: 5930 - DNA, 301 bp, Diabrotica virgifera
tttattgtaccatgggattctacggttgcgatccgtgtcgcttctcttcgtacccctgcgcgttgcatcgcacagatacgcgcggttttatttaaatacacgaagaaaattcataacaacctttttctccgcgctttgcttcgcggtgcagcgcataagtgagcgaaaaccttaacgcgtgtcccgggacttgtattatttgatattttggacacattgttatcttttcgccacggaggttagtatttgcgttctcttgagtcttagagataaatgttgcaaatacttaatatattaattt

SEQ ID NO: 5931 - DNA, 321 bp, Diabrotica virgifera
aatctcgtatgtatgtggaatttcattttttgcatcaatttttaatgagccaagatttgggaggttattaacatatgatgtaaatggtatatattttgttttttctatatttaagatgaagatatgattaaacaactgaccttttccgaaactttagtaataagcgaactagatggctacaaaaattcgaaggaaactgtgcctaaagcagtcggatctctagttttaaatatactagctgaagatgccattttaccacataatattaagaaaaaggcaatagatgcggatatagaaagggaagtaacgctaacattgcaa

SEQ ID NO: 5932 - DNA, 300 bp, Diabrotica virgifera
aatctcgtatgtatgtggaatttcattttttgcatcaatttttaatgagccaagatttgggaggttattaacatatgatgtaaatggtatatattttgttttttctatatttaaggtattgaaaaagaagagaagaaataatgggaaatttattattttttcatctttaatcatttcaacggcaaccatgtttatttgttgcaaatatttacttcctaaataatgtttataataagttaataattaatactaataataatatggattacctgttcttaaaatcaattgtaataaatgatg

SEQ ID NO: 5933 - DNA, 319 bp, Diabrotica virgifera
gttccatgttttgatgttttcttgtgctcgaagaggaagaagaggtggaagtctttggttgaggtggtgtaatggcagcagtggtggctgttgcagcagattttctcttactactaccagttcgtacttcatcctgcttggtcctttcgattttcgtgcgggcagctagttcttctgttacctcccgcgtgttttcataacctcatttggctcacgagaaaatttctgtaaatggtacattttggaagctacttcctttcaaaaaattatattatgaattacaattttgaatataaattatattgttgaagatgtttct

SEQ ID NO: 5934 - DNA, 297 bp, Diabrotica virgifera
  SmartBlast Evalue=5E-15; Info=Nucleosome-remodeling factor subunit NURF301 n=1 Tax=Harpegnathos saltator RepID=E2BIZ0_9HYME
gttccatgttttgatgttttcttgtgctcgaagaggaagaagaggtggaagtctttggttgaggtggtgtaatggcagcagtggtggctgttgcagcagattttctcttactactaccagttcgtacttcatcctgcttggtcctttcgattttcgtgcgggcagctagttcttctgttacctcccgctgaatttcatactgcaattctttttctaagagagctcttttcctgagtatatccttcttcagcatttctttgtgcctgaacagcatcaccatcagctttgtaacttttc

SEQ ID NO: 5935 - DNA, 326 bp, Diabrotica virgifera
gtgattggtatgtcagtcgtttggcttggatgagacacatatgtactagatataaaaaaatatacaggttggttctaaagttatggcttaggaaagaaatgggcaaaatcgataaaacaccctgtaactctggttataaaagtcggtagggcaaaaaatgtagtatactagaaccggctcggtgacctctattcaccattaaagtatttccgtttcccaatgaaacaccctgtataggttttcatcctccgtgcaaagtgaagttatagaatttcgctatgtatatttcggtaccctacttggtcctacctgatcttacactgcct

SEQ ID NO: 5936 - DNA, 287 bp, Diabrotica virgifera
gtgattggtatgtcagtcgtttggcttggatgagacacatatgtactagatataaaaaaatatacaggttggttctaaagttatggcttaggaaagaaatgggcaaaatcgataaaacaccctgtaactctggttataaaagtcggtagggcaaaaaatgtagtatactagaaccggctcggttatctctattcgcaattgaagtgtttccgtttccctatgaaacacgctgtataaatgacaaaagggcttgtttcattattttcagttaaattttattgaaaaaa

SEQ ID NO: 5937 - DNA, 334 bp, Diabrotica virgifera
aacaaaatggcctttggtaaactttgacccgatcgttggaaccgaagttataacaaatttcgtgacaaataattgcaaaatatgcattctatggggtttttttaagtttaacagcttttatacatgcaattaaccttcaaaaccccctcattttacagataattattgttcagctttaaaaaaactttgcaaaattacttttatcttcaataataaatgagttataacaattgaaacactcaaaatttcactgaaaagtttcaaattaatttgtttataagagatttaaacaaaatgaagctataactttgaaaatctggctaatggaagactt

SEQ ID NO: 5938 - DNA, 269 bp, Diabrotica virgifera
atttctttttggttaattcttaaataattaaaggaatagtaaacagaatattttaattctatcaatatacaagttaatgcaaaaataattaattttttaaatatttaaaatgtattaagtttgtgattgtatcaagacttgccagtcgtttggttgtgatactgtaaaaattttgaagaaaaaattgcaaaagtttcaaattaatttgtttataagagatttaaacaaaatgaagctataactttgaaaatctggctaatggaagactt

SEQ ID NO: 5939 - DNA, 315 bp, Diabrotica virgifera
gcggtgttgttgtaatagtggacatatcggaaacaattttattatctactggttacattcttcatcgctcaatgtacatattggcattaaaaacgaaaatcgataatttttgaccacagcaattcccctcattcctaggtccagcattttcgtccagaagcataaggccatcatcacgatggtctcttagaggaatatttgtcgacctaagaacactatagaccctactattggtcgtagtctttctttattttttgtttctgtttagacttctgagagtctatctggttaatgactgacttttgaaggttgcga

SEQ ID NO: 5940 - DNA, 270 bp, Diabrotica virgifera
  misc_feature (42)..(42): n is a, c, g, or t
catgttatcaattgattttgactggtgctactaatgtatgtnttggaagatgctgtggataggtgttgtttaagagtcttatctcctgatgcgattttaaaccttcacaattattcctctcactgctatatccagcatcttcgtccagaagcagaaggccattactcgatgtcctcttagaggaatattttgtcgactttctctatttcttgtatctgtttagacttctgagagtctatctggttaatgactgacttttgaaggttgcga

SEQ ID NO: 5941 - DNA, 333 bp, Diabrotica virgifera
cctcgcacactggatcatttttgtcacttgtgatttggacggaaatagtttcatatcattaaacaaagcctgtacagaatcttccggaatgtgtagagtatcgcctaaacgcacgcagatggcattatacacctctctttgttatacactcgaacactaagtttaccgttttcaaacaataaacaggttcaaatcgacatactttgcagtctctttggactttgtaggccaagaattatgataattctgctgcatcttctgctgcaccatgtttgcggaactatagcacttttaccaagtagcatttataaaaacatgaacacttctcagaaa

SEQ ID NO: 5942 - DNA, 267 bp, Diabrotica virgifera
cctcgcacactggatcatttttgtcacttgtgatttggacggaaatagtttcatatcattaaacaaagcctgtacagaatcttccggaatgtgtagagtatcgcctaaacgcacgcagatggcattatacacctcttttgcagtctctttggactttgtaggccaagaattatgataattctgctgcatcttctgctgcaccatgtttgcggaactatagcacttttaccaagtagcatttataaaaacatgaacacttctcagaaa

SEQ ID NO: 5943 - DNA, 321 bp, Diabrotica virgifera
ccgtgagtttttgaattacccgccacttaattgaaatggcaacactgctcctgtcaacaggcaagtctcacttcagtccggtctaaatttgaacacgctgcttagtttgtatttgacagccgttgatagcagactatcccgcgttttgagaagaaaatagaaaacgtgctttatgtgtcctcattaaacatttttttgcggaaaaaaccatcactcaaacccagactaaacttgataaatattatgggaactctgtaccatccatttcataatagtgttttactgaatttcaatgtggccgtacaagcacgaaagatgccg

SEQ ID NO: 5944 - DNA, 270 bp, Diabrotica virgifera
tgggaggttatgacccctgtgacacccaccttggatccgccactgatcaacagacaactctcacttgactccggtctaaagctgcatcctgcatcattttttgtgtgttgctcagaatttcgtgtgctcattaagcattgaaagcaacggaaaaaacaatcactcaaacccagactaaacttgataaatattatgggaactctgtaccatccatttcataatagtgttttactgaatttcaatgtggccgtacaagcacgaaagatgccg

SEQ ID NO: 5945 - DNA, 332 bp, Diabrotica virgifera
aaagacaacaccaaatggcagagatgggagtacaagagtacaaagaagaattacaggaaccacgctgaaagatagaaaggggaatgaagagaatatatatgtaacgtacagcgtataaacgattggacactaaatataaaataatggaatgaccacataagcagaatgggggggggagagacgtatagtcaaaataacaagagataaaactcggcaaactaaactaggtcgtatcggccgaccgcgcaaaagatggagtgacaaccttccatagaggtatcaatccgccaatgaacaagcagaattgcttataaagaggaagaagaagaaga

SEQ ID NO: 5946 - DNA, 251 bp, Diabrotica virgifera
aggagcgaagatattagaagacaatgtaactacagtgtataaacgaatggacactaaatagaaaaaaagaatggaacaaccacataagcagaatgggggagacacgtgtggtcaaaatagcagagataaatcaccaatcggtagaagaagtatcggccgaccgcgcaaaagatggagtgacaaccttccatagaggtatcaatccgccaatgaacaagcagaattgcttataaagaggaagaagaagaaga

SEQ ID NO: 5947 - DNA, 305 bp, Diabrotica virgifera
atcagcataatgatgttctgaagctgttttcttgggcatatttgacaattatattttggatgggattgagccacaattggttgtaatgataattacattttatactaacctaaatttatatttacatggaaatccaacattagttgattttctaatttttcttttttgagaacgatttccgattggaagtcgaaacatcaaaaactaacaaaaatgtaattatcattccaacccatcccatcaaaaaaatgtttgtcaacataaaaatgttaaataaatcaataaaatgatattaaagttgtata

SEQ ID NO: 5948 - DNA, 274 bp, Diabrotica virgifera
gccggtgagtgtatatatacatttagccatatcttcatttttttaaataagattttttgcatctggttttggtaacacttcagaaaaagtcacgcgtcgccactgcatcagttaaattttctaatttttcttttttgagaacgatttccgattggaagtcgaaacatcaaaaactaacaaaaatgtaattatcattccaacccatcccatcaaaaaaatgtttgtcaacataaaaatgttaaataaatcaataaaatgatattaaagttgtata

SEQ ID NO: 5949 - DNA, 309 bp, Diabrotica virgifera
aatctaaatctaataataatctaaatctttctacttaacggtgcaaggtgtttaaaaaatacatttcatgtatgtatatcatatacaaatcgtctccactcttgtttattcctagcccttcgcttcgcttcagtcccagttgtagttcttctcttacagtgctgtttcttattctatcgcgtcttgtaattccttttacttttcttaggtacttcatgtccattgagtttattctagcttttcgatgattgtgttagcacccagctgtcattaccataggtaaggattggcctgaagatcgtttatata

SEQ ID NO: 5950 - DNA, 271 bp, Diabrotica virgifera
gcctcccatatgcgttttacctgtctatcatcgttcattctacacaaatgtccaaaccatttaagcttgttcctatctaatatttgtgttattggttcgacttgtagttcttctcttacagtgctgtttcttattctatcgcgtcttgtaattccttttacttttcttaggtacttcatgtccattgagtttattctagcttttcgatgattgtgttagcacccagctgtcattaccataggtaaggattggcctgaagatcgtttatata

SEQ ID NO: 5951 - DNA, 318 bp, Diabrotica virgifera
gttaaatactttattgttttatttaattgttatgtatttgttattaaattgctttaaaataaatattgtttgacttcgtgtcttcgttttttttaaattcgcacggaatagtaagaaatatcagatgattccatataagtttggtgtgtgtatattatgcgattaataatacgatactggaaaaaagagaaatcagccaggaaacaaaaatacatgtatataatacaatcacagtaccaactcttctatatgcaagcgagacatgggtcacaaataaaagacatgaaagtgccataaatgcagcagaaatgaggatgg

SEQ ID NO: 5952 - DNA, 266 bp, Diabrotica virgifera
gttaaatactttattgttttatttaattgttatgtatttgttattaaattgctttaaaataaatattgtttgacttcgtgtcttcgttttttttaaattcgcacggaatagtaagaaatatcagatgattccatataagtttggtgtgtgtatatcactgggcgttagtgttagttgcaaatatgtatgaatgagttgttataaacggttatggagattaaaatttttgttttgcatttaataaaaatactcttatgttttatgat

SEQ ID NO: 5953 - DNA, 311 bp, Diabrotica virgifera
atatcattttcaattgcccttgaaagttttccaaactcttcaacttttcttattctttctttttcttgttcttccttgtaagtgggagattgagaacgacgtctgtgtttaggagatggcgatcttcttctgttcggggatctacgtttaggcagcggagaacgacgtcttggcgataacggagaacgacgtcttagcgataatggagaacgacgtctaggtgacggcgatctacgtttaaacggagatcttcgtctagggcttagtctgcggctggcaaaaggaaggtccttacgtggagatctacctct

SEQ ID NO: 5954 - DNA, 263 bp, Diabrotica virgifera
atatcattttcaattgcccttgaaagttttccaaactcttcaacttttcttattctttctttttcttgttcttccttgtaagtgggagattgagaacgacgtctgtgtttaggagatggcgatcttcttctgttcggggatctacataccttagtcagcgaagaacgacgtcttggcgataacggagaacgacgtcttagcgttaatggagaacgacggagtggagaacgacggagtggagaacgacggagtggagaacgacg

SEQ ID NO: 5955 - DNA, 300 bp, Diabrotica virgifera
tatttcattggctagaattagtgacgagtttatatgacgtcattattatatttggtgagattgtaaatggtaactgaccgtctgtcataatattagaggttaaatataatgtcaaattattgttttcaaattatattttatttatttagtttatattttaacgacagtgtattttttaaccaatttcactttcccttccgtatccttgattggtcgattaggttcgtaatagtttcgttgtatggtaggtttagttaagcgttaattttaacaaatgttgctggctaaattgtcacagct

SEQ ID NO: 5956 - DNA, 266 bp, Diabrotica virgifera
tatttcattggctagaattagtgacgagtttatatgacgtcattattatatttggtgagattgtaaatggtaactgaccgtctgtcataatattagaggttaaatataatgtcaaattattgttttcaaattatattttatttatttagtttatattttaacgacagtttatttttaaccaacttcattttcctttctctatccttgaatggtcgattaggttagtaatagtcttgtatggtaggtttagttaggtttagtttaag

SEQ ID NO: 5957 - DNA, 364 bp, Diabrotica virgifera
gcgctgggcagttgcgcgtagggttcatagcgtgtctattttttgcattaaggcatatcatgtcttcatgattcattaggttataaaatttttcgttattgcgcatactcgtaaccgttcaaaaacggttttgtatcgaattcgaacaaaccttatgagaatttactacttggagttgtatattttaaaccgttgaactttttgtactcccaattatgacgttaaaaattaaaaaatacggcttatacacattatgtttagacaaaatgtaagtaaaataataattttacgctttgtcagatagtttggtcgggacgtgtgtagaaccgacccctaccaagaatggtcggggaagttctgtcgt

SEQ ID NO: 5958 - DNA, 189 bp, Diabrotica virgifera
  misc_feature (92)..(92): n is a, c, g, or t
gcgctgggcagttgcgcgtagggttcatagcgtgtctattttttgcattaaggcatatcatgtcttcatgattcagatttgaaaaaaaattntttttcaaatcgtaagctacggcatttgatcatattaggatgaccccaagcaaagtttgttgtgcatcaacccctaaaggttgctgagttggtacga

SEQ ID NO: 5959 - DNA, 277 bp, Diabrotica virgifera
tgtgccctgatagttaggacaagttcagagaagatcaaataaccttagatttagttagtagttaagttagcattagaaaaagttgtaagatgagtggtaaataatagaaatttttccaaaattgcgcgttagggtagaagaacaagtttatgatgatgtagttttttagaatagtttttaaaaaatacatttaacaagaatactgtgctaacagctttaaaggtttccaaatattaaaaagacaattttacattaaaagaatctggaaatgtcaatt

SEQ ID NO: 5960 - DNA, 271 bp, Diabrotica virgifera
ataatactgcgaggtgtgccacatggatcataatgaatgaagtgcaaatatttgctgatagagtttactgtttgaatgttgaaaagtactaacacatgcagtttgctataacatatcttcagatttggtagaagaacaagtttatgatgatgtagttttttagaatagtttttaaaaaatacatttaacaagaatactgtgctaacagctttaaaggtttccaaatattaaaaagacaattttacattaaaagaatctggaaatgtcaatt

SEQ ID NO: 5961 - DNA, 341 bp, Diabrotica virgifera
gtcatggcttcttacaaaggctagtgtaaaaattacccaaaaaattagctcaaatgtaacagcatcgtttactacatgcattatcgaatactgtggaattaaaaattcgactgaaattgtaacatggctacagttattcagaaaaatggcatcaaaggactgtctaatggcaatggtattgtacatcaggtacaaaatataaatggttatgaacaagtagaagttatcaatgagactgaggaagaacaatctcaaattgaagaaactagtgaacagtgtgagcttaaaagcaatgaatacgaacaagaacaaactattgaagaaatgaaatagacattgta

SEQ ID NO: 5962 - DNA, 204 bp, Diabrotica virgifera
gtcatggcttcttacaaaggctagtgtaaaaattacccaaaaaattagctcaaatgtaacagcatcgtttactacatgcattatcgaatactgtggaattaaaagtatgcgtttaagcgtaaataatcgtgtaaatagtcatttgaaactagatatataggttctttttacttcctgtgtggtctaacattgatttaaaaccaa

SEQ ID NO: 5963 - DNA, 286 bp, Diabrotica virgifera
gtacttacggttgcaattttaaaaccggaagtccgatgtcaaatttctcatctttaataccatccttgggttataagctttcattcgatacctcatttgtcattctatctgtattaataacggaggagaaagacagacgggcagacagtcatgaaaccggaagtatatatttgttctcttgttgcgacgtcgcgccgaataatatatcacttgtactatccggtgactttaaaacagtacttctggtcgcatttctaaaaccggaagtcctaggttaagtttctca

SEQ ID NO: 5964 - DNA, 224 bp, Diabrotica virgifera
gtacttacggttgcaattttaaaaccggaagtccgatgtcaaatttctcatctttaataccatccttgggttataagctttcattcgatacctcatttgtcattctatctgtattaataacggaagagttatattcgcggacagacgagtcacgaaaccggaaaacatatatttgttctcgtcttgctaaggcacgtcgaataatatatcgcttgtactattcc

SEQ ID NO: 5965 - DNA, 265 bp, Diabrotica virgifera
atgttacttggacgcacaagtatttgaaagtttcagttgattgtaagttcacatttgaatttgttggctttctggtttttctcatgcctccacttgtatgtctgtttcgtattttattataacataatctataattgacttaaggggaacggaacaaaatgcaaaatccgacgcatgtcaaaattttcaatgtgttcacacgtaatcatttcttcgaattctgaaaaaaccaatacatacttttgaagaattcaaacgcagaatg

SEQ ID NO: 5966 - DNA, 247 bp, Diabrotica virgifera
atgttacttggacgcacaagtatttgaaagtttcagttgattgtaagttcacatttgaatttgttggctttctggtttttctcattttattataacataatctataattgacttaaggggaacggaacaaaatgcaaaatttcgacgcatgtcaaaactttcaatgtgtcaaatgtaatcatttcttcgaattctgaaaaaacttatttatttttgaagaatttaaacgcagaatgaaagactacac

SEQ ID NO: 5967 - DNA, 310 bp, Diabrotica virgifera
  SmartBlast Evalue=5E-28; Info=Histone-lysine N- methyltransferase SETMAR (Fragment) n=12 Tax=Harpegnathos saltator RepID=E2C6C7_9HYME
gtccccttttggcttgatacacttagtaaaacgatgttccaatttttttatcccatccgaataggacttttgttcgagcttttcaaaacaggccgaagtttctgcgacgacttcatcgtttatgacgaaacggcgttctccgagtcattttcttaggtttgaaaacaggaaaaagtcgctagcggcaagatctggagaatactttgtgtgttcaaccaattcatagcccaattcgtgtaattttaccatggcgacggccgatcggtgagccggtgcgttgtcttggtaaaagagcacttttttgcgtgcc

SEQ ID NO: 5968 - DNA, 199 bp, Diabrotica virgifera
  SmartBlast Evalue=0.000000005; Info=Transposase n=1 Tax=Agrilus planipennis RepID=D2WLV0_AGRPL
gtccccttttggcttgatacacttagtaaaacgatgttccaatttttttatcccatccgaataggacttttgttcgagcttttcaaagaagtttccgaagtgtcagcgacgcgcgacgacttcatcatttgttgcgaaacggcgtcctccgagccatttttaggtttggaaacaggagaaagccgttatcggcaagatc

SEQ ID NO: 5969 - DNA, 251 bp, Diabrotica virgifera
gtaacgatacatattcgtaacggtataattcgtaacgccaacagtttttttagcaaatttagtattactgaatttatacaaaaactcattttgcatacatttctatactataattaatggtactttctttaagaccacttctttttaaatatatttcacataatatattttggatatattcttttaatatgacaattaaagattttttaaattcttcttatcttgaattattactttaaagtagtaaaacc

SEQ ID NO: 5970 - DNA, 233 bp, Diabrotica virgifera
gtaacgatacatattcgtaacggtataattcgtaacgccaacagtttttttagcaaatttagtattactgaatttatacaaaaactcattttgcatacatttctatactaaaagtagtggtagtttttttaagaccattatttctttttaaatatatttcacacatattcttgttaatatgaagaatttttttttaatatgttatcttgaatgattactttaaagtagtaaaa

SEQ ID NO: 5971 - DNA, 265 bp, Diabrotica virgifera
  SmartBlast Evalue=8E-24; Info="Pre-mRNA-splicing factor ATP- dependent RNA helicase PRP22, putative n=1 Tax=Pediculus humanus corporis RepID=E0VM14_PEDHC"
attattgtacagtagctgtagcaaattataaataattaaaaaatacaacaaataaaaaatattacaataaaatggatgaattacagaaattggaatatctttccttggtttctaaggtttgtactgagttagaaaaccatctcggtatgaatgataaagatttggccgaatttattattcatctttccgagaagaatggtacatttgaatctttcaaaaaggcacttatagaaaatggagctgagttttcagattccttcatctc

SEQ ID NO: 5972 - DNA, 216 bp, Diabrotica virgifera
  SmartBlast Evalue=0.000000001; Info="Pre-mRNA-splicing factor ATP-dependent RNA helicase PRP22, putative n=1 Tax=Pediculus humanus corporis RepID=E0VM14_PEDHC"
attattgtacagtagctgtagcaaattataaataattaaaaaatacaacaaataaaaaatattacaataaaatggatgaattacagaaattggaatatctttccttggtttctaagccgaatttattattcatctttccgagaagaatggtacatttgaatctttcaaaaaggcacttatagaaaatggagctgagttttcagattccttcatctc

SEQ ID NO: 5973 - DNA, 247 bp, Diabrotica virgifera
taataataatttatatactatgtcaataaaaactaataatcgagaaaagatgaaaattgataaagtgattttaataaaatactaactgttactatcggagcgagtagataaattttgaacatctttaccaaattaaaatacaattattataaaataaaaatgtataccatttttattcagttgcaatgcgaaggcaaaacaatcttacttttcaattagaatacggagtgcagtccagtcccttgaa

SEQ ID NO: 5974 - DNA, 215 bp, Diabrotica virgifera
taataataatttatatactatgtcaataaaaactaataatcgagaaaagatgaaaattgataaagtgattttaataacatgttactatcggaactccgtcagtctccatacaattccgaaagagtaaactgtgactttctcgtgtatcaaaaactaaaaatgctgtttaaagtgtgacgacagagtaagctttgatgacataaagacgatttaaa

SEQ ID NO: 5975 - DNA, 223 bp, Diabrotica virgifera
gattgaaccccacgaactgtagactcatgtatctttttacaggtttcttgcttactccattcaaaaaccacgtccttcgtatcgtaaggggtacgtcaaggatactgtacactgtacggacacaaagtgacgaaagtcgaaacggaaacaaaagataaaaaaaggtgtaactttctggttacacaaaaccccgttagtagtggggttttgtgtaaccagaaag

SEQ ID NO: 5976 - DNA, 217 bp, Diabrotica virgifera
gattgaaccccacgaactgtagactcatgtatctttttacaggtttcttgcttactccattcaaaaaccacgtccttcgtatcgtaaggggtacgtcaaggatactgtacaaagttgtcagacaaagaagacgtaaaagtcaaatcagaagcaaagcgaaagctagaaaaggctgtaactttcaggttacacaaaaccccgttagtggtggggcaga

SEQ ID NO: 5977 - DNA, 205 bp, Diabrotica virgifera
ctctggctaaggataactgttctggacttgttgactggtacggtgctattacggacgcgatttcgggttttttcgttttaacgaccacatcaactttctgtacataattacttgggaaaattccaactaaatttcctaatttcctgtccaccagtcgccttccttcttgataactcctatgacttctccagcattaaaacgtcaa

SEQ ID NO: 5978 - DNA, 202 bp, Diabrotica virgifera
ctctggctaaggataactgttctggacttgttgactggtacggtgctattacggacgcgatttcgggttttttcgttttaacgacctgaccagcttgcgcataagcttcttcttttagctttatttaacgatatctgggacacctcgttatcggcctgcgactgcgcagaaacgttggccagggcggactctacggcttctg

SEQ ID NO: 5979 - DNA, 204 bp, Diabrotica virgifera
tgactttgaataggacacgaaatcatgtagtatgcagaggtttctcatcggaggaattcgaggtgaacacagggcttagacaaggagatccgttatccacagtactttttaacttagtactggaagcaataatcagaaataaccgagtgaaaacgaccggatccatcttcaacaatgagcatcaatgtctggccttcgctgatg

SEQ ID NO: 5980 - DNA, 163 bp, Diabrotica virgifera
tttgtttcttgacttttataagctttgtcgataaaattgtacaattttcatgacaataaagcatatttctattctattctattctattctattctaaataaccgagtgaaaacgaccggatccatcttcaacaatgagcatcaatgtctggccttcgctgatg

SEQ ID NO: 5981 - DNA, 2003 bp, Diabrotica virgifera
  SmartBlast Evalue=0; Info=Muscle M-line assembly protein unc-89 n=1 Tax=Harpegnathos saltator RepID=E2B5C2_9HYME
taagtatcctgcccgatggaacgattaaactaaatatcgcaaaatgcaagccatccgacagtggggcctacaaattagtcgtgaagaatccaaatggcgaatcagcatgtctctgtgctgtagccgttatacccaaacccaagaggccaacattcctcaaatgctttaaggacgcgcaagtacctcttggcgaaagtctccgccttgaagccaaagtagaagcctatccacctccagagatcaagtggctgaaagacggagtccctgtccgtgcttcttctaacgtgaggttcgagaattatcccgatggtagggtagcgctcgttgtggacgtcatgaaaccagaaaccgccggcaactacaaactgttagtgaccaacaaattgggagaggcaattggtgaggctaaggtcgaggtggagaagaaaccaatcaagccagagttcattcaaagacttttccctcagacggtcgttgaaggatttcccgttaagttggaggttaaagctgaaggttttccagcgcccaaaatttcttggttccgaaatggtgcagaggttatctctgacaacaaacacatcaaaattatcgaacaacctgacggttccagcgctcttttcctagactgcgcagacattgcgcgtgacgctcttacatacaaagctgtagcctcgaacgaagccggagaatctgacacttcagctgctctgactgtgaaagaagctgctaaaccaggagaaccagaagagagacctctgttcctacattccattaaaaatgttatcaccgatgaaggtcaacctctggtgattgaagctccgtttacaggaaatcccatacctagcgccgaatggaccaaagacggagaaccacttttgccttctgaaagggttctgatgacttgtgatggtagacgggttggtttaaaaatcgataaagctgtaccatcagatgctggtgtatatggagtcaaaatcattaatccattgggtgaggataaaacacaaggaaaagctacagtaagaaaagtattcatggcaccatcatttacccagagattcactgatcttcaacaattaccaaacagagatgccaaactaccgtgtagagttacaggcgtaccgcaaccagaggtcatgtggaccaaagatggtcaacctatcaaagaatctgacaaataccacatcaagcgggacggtgatctgtgctgcctgtatattttggattgccaacctactgacgctggcatctatagagctactgctgttaaccaagagggtcacgacgattgcacggcatctgttgaagttgtgaaagaaattaaagctgcgaagaggatcgaggcaccggtcttccttaaacgtatcggcgatacagagctctacaaagcaatgacagccaaattcaccgcgtgcgcgtctggaataccagaaccgacagtggagtggttccacaatgataagaaaatattcccatctacgcgaattaaaatggataaagacaccgctggtttgctcagactgacaatatcaggagttgatgtagacgatctcgggaaatattcatgtaaaatatacaatgagcatggaagtgatatttgccacgcttcattgaaattcgaagagggactagaacctaaacccaaacgccccatcacggaccaatacacagatttcgacaagtacaagaagagcggagctccaatgcccatctcagatcctcctattatttcccaaatgacagacaggcactgtactttgtcttggaagccatcaattccttcaggtccacgagtgcctgttacttaccaattggagatgtgcgaactaccttctggtgattggttcacagtcagatccggtatcagaagttgtacctgtggagtaaggaatttggaaccattcagagactacaagttcagagttagggtggaaaataaatatggaatcagcgatccatcgccgtatgcaatcacccacagggaaaagttagagccagacctg

SEQ ID NO: 5982 - DNA, 1706 bp, Diabrotica virgifera
  SmartBlast Evalue=1E-180; Info=Aspartate aminotransferase n=1 Tax=Aedes aegypti RepID=Q5K6H3_AEDAE
tgacaactcgatgaccttttcttaaccttcgaaaccaccgggttctgcggtcctgcggcgcctttttaaaaattagagaaataaaagtcgctatttcgtcacttattttttagttgcttattggcaaccacttcgagtgacgagcaacggtgttatctcttctagtttttatcaaagaagttatttttatcagaataccgaacaaacaaccagaagaaggcagtgaacatgtctctgaaacaaacagtgtcacttttacatagcaaaaatggaattaacgccgttgcacaaagagccagttcttggtggtctggtgttcaaatgggaccccctgatgtaatcctaggagtaactgaagccttcaaaaaagataacaacccaaacaaaatcaacttgggtgtaggagcttacagagatgataacggaaaaccatatgttttaccatccgtccgtgcagctgaagaaaagataaaagctaaaggtttggacaaggaatatgccccaatttctggtgtagctgaattctgtaaaagaagcatagagctcgctcttggtgaaaactcatcagttttgaaagatggtatgaacgccactgtacaaggtatctctggaaccggttccctcaggataggaggtgcttatttgaacagctttttccctggaaacaaaataatctacctgccagccccctcatggggaaaccacaaccccatcttcaaacactcaggattagaagttaagacttacagatattatgatgctaaaacctgtggattggacttccaaggcaccatagaggatatttctaaaatccccgaaaaatctatcatccttctccacgcctgtgcacacaacccaaccggagttgaccccaacaaagaacaatggaaagaactgtctgacgtaatcaggaagaggaatctttttgtatacttcgacatggcataccaaggttttgctaccggaagcgttgacaatgacgcttttgcagttagatatttcgtcgaacaaggccacaggatagcactcgctcaaagctttgccaagaacatgggtctgtatggtgaaagagccggagctttcagcatcatcgccaattccaaagaggaagctgatagagttatgtctcaaattaaaatccttatcagacccatgtactccaaccctcctcttcatggtgccagaattgtagccgaaattttaagcgactctactttgagaagccagtggttgccggaagtaaaaggaatggctgacagaatcatctcagtccgtagcaaactcagggaaaacttaaagaaggaaggttcaagcaggaactgggagcacattacaaaccaaataggaatgttctgtttcaccggaatgggacctgaacaggttgacaaattggtgaaagaacacagcgtatacctaaccagagacggacgtatctccatggctggagttacctcaaagaacgtcgactaccttgctagggccatgcatttagccacaaaataagttcataagatacgaaacgaagttatatttcgatattaagtattaaaatcgtattgattctgtattttaattttacacgcactctactcagttcacgcatttagattttttgttattatttttttagaattgttgttctaaattgtgtacctatcgaaaaatgttatattttaaaaaatagatgtgtttatttacttaaaaaa

SEQ ID NO: 5983 - DNA, 1477 bp, Diabrotica virgifera
catgaagtgggttgttcgcgctacctcgctttgccggcgtatatcttctaacccgttttaaatgtataataaatacatgtctctttgtcgctcttattaaaggcgcaaaccagccatgagaaatttctcaatcggtagatggttctttatattatatatcatatatgtaattcataattgttctcatttatagggcctagtaacttcctttcaaatatgtccacacagtttacagatttttgagtcaataccaaagtttcatatgcatagctcactatcggtctgattgtggtcttgtagattcgtatcttagtcctttgatgtactctcgtgatttaaatatgtggtacatagcaaagtatgccgatattgactcctaaataggtaaagctatctactttttctaagttgtcaactgtcaggtagggtcgtgttgctctgttcgatcggctttgtaccaggattttagtctttttgtgtttattgacagacctacttgtctaacacgtgatttaagttccatatacgtattctcgccgttgctttggttctgctcatgatatttatgtcatctgcgtatgctgccagttcgactgatttgttgatgtgtgatgttttctaattatgtattccagtgctaaattaaacagtattggtgccagccaccctgttttaacccttgtgttatttgaaacgggtctgtcatctcatgttggtataatgttcatgttctgtgtggtccacatcatcattgtgagagtttttagtcagcgcgttgtcaaaatatgttttccaagttacgtttctttctttcgtttggtgatgtcgtactgtaccaaaagatttcttggcatctgtaaagaaaaattgactataatttcttgtttttgacgaattttttctttattccacattttttcccaaatactgtacgtagacatcgtgtttttaaagaaaattggactaatttgtggtgttgcactctaccaaaggctttatagaaatcaacaaatcgttaacatatacagtttgtacagtttaacaacgtttttatccttgtacataacattttgtaacatatattccttttcctgcttctgtgacctagtcagaaagtaaatgcggtgtttttgttgtatagaaagtaccaaatactatttaatcatcatattgtgaagcctgaaacggaaagccacaacgaacaggcaacattgagtatgtttaccaacgcaaacatgtaaatatttaggtactgaaaaaaaaaattgaaaaagttctttatatatttttattaattttaatattgaagttttgtatatacataatgtgtaacttttgaagttgtcgcagataacgaacatgaaatggtgttcgttctttcgttgtggcttggacattttaagtttcgaagtgtcttatcgcgtttatttattaattgataaaaagtatgactgttaatacgaaaaacacaaaattg

SEQ ID NO: 5984 - DNA, 1458 bp, Diabrotica virgifera
tgattcttatccagattccatttgtgttttacacttctctcctttctccaaaacaacaattggtaataactacttttcactcaaactggagatgttaaatataaataatttagttgaaattattaacccaccatttcgtcgagacagccaacagccaagtggcgaacgagatgcgtttctctgccaaggtcaacgtcaaattctctcagaacacgaaataattctcaataggtggcgtatatagaacgttccatcaccgaggtatgacgtcacgtaagtagtcctttacgagaaagttacagaaattaattaagtgatcaaaagaaaataattaataaaaataattaaagctctaaaatgatattataacgggtggaccttgcttttattttgatttatttgtagacccagcttatacgattcatttactaatttttctgttattcctttcaggatcttttcactcgtcgctacaattgccacatcatctgcatatcccactaattgatgactcttgtacaatatgtgcccatttctatttcagttgctattcctaatgagtttttctaaaggcgccatctcatggttagacccaggtcttattgactgacgtattaaaaacgtccacattgtactaaattgctctctatagagcgtttcacgttcattagggatagtctcatgtatttcttatggacgatagaagcgcatcgatgccacgccgtactgactagaatgaatcgtatatcggcagtcgagtatccacccgtgtgcgaaagctttggcaacgctggtctccgtaagcgtaacgttatattcttaacgtaaaacaaagtatagaatcgcagttactgcaagtattgcatataattcgatgctgagtactttgatatataaccagtgtttgatattcatcaactgcatgcaattttcaattaaaatccccaaatttaagatgcggaatatcgtcacatttgacgtagaaagtacaataataaataatcagctttaagaaaatattgcaatcactgtctattgtatattgtcgatatccactgtatattttataaaacactaacatttcgaataaagacagaatgttgctgaaatcttaagtggtgtaaaatgacagcggatatgtcccaagtgtccatatttttgtagccaacacaaaatgatgtgtctagacacaaactatgttatctcattcaagttttaatgaattttgttgtagatgagttgacggacaatatttcaggaaaaggggaatttattaaaaggataaaatatagtaggtgtaacaaatttattgcttatgattggcataaggtgattgaggtacctacgaatgataattttggatacagtgcaaatattccttgtacagagtgaatcaacgatgcgataagggaacttaatgtatacagatcaaatttcctttcaatgacatattattat

SEQ ID NO: 5985 - DNA, 1127 bp, Diabrotica virgifera
  SmartBlast Evalue=5E-43; Info=CREB-binding protein n=1 Tax= Camponotus floridanus RepID=E2AQY6_9HYME
actcatcgctctatgttgctatcatgccaaacactgcccagaaaacaagtgtcctgtaccattctgttcaaacataaagcacaaactaaaacaacaacaattgcaacaaaggttgcaacaggcgcaactacttaggagaagaatggctgttatgactagaacagcaccagcagcgaatcctataccaggtggtgctaatgtcactatgggtggtgctggtgtgcaatcagtagtaccaggtgctgttagtcctgctaattcaatgagtacaggtttgccaaatcctcaaatgggaataccatctcctcaccaacctggaattggtctaaaaccacaaacaccgccagccaatgtacttcaagtagttaaacaagttcaggaggaagctgcaaggcaacaagcacctcacgttggttatggcaaagtcaatccaggtcaagttcctggtcagaatatgcctccaccacaaattaggaatatgggacatcttggagcaggacaaagtggaggtaatctcttaccaatggaacaatggcaacaaaggtatccaagtggtgtagcaccaggtattcgacagcaaggtccaccagtaatgcagccaaaccagatgggtcaaacacccatgcagacgaaccaagcgggtgtcaggccgggtactgcgcctataagtgctcctggaagtatgatgcagaaacaagccttacagcaacttatgcaaactttaagatcgccgcagtctgctgaacaacaacaacaaattttatcaatacttaaatccaatccacaacttatggctgcatttattaaacaaagacagcaggcacagcaaatccaacaggcaggcggtggtaatccttcccaacaacaacaactgcaacatatccttaaccaacagccaaatgccaatcaacagcatcaaaaccgaatgcagattcaaggaggtttaataaatcaagcgcaagctcaaggtctcagtcaaggccctggacctagccagccaatgacgcagcagcaacaatggtacaaacatcaacagatgctggcaatgcggcaacaacaggcggcagcacaacagcagcaacaacagcctagttttcagtaacccatatgtggctgcctaatacctg

SEQ ID NO: 5986 - DNA, 1060 bp, Diabrotica virgifera
tcaatagtaataccactagtgattcaattttcgcgataagtctgtcgatttacttctaaacgaaactgagttgcttgaaaacaccacgagtccgtaggacgagtggtgttttctttaagcaactcagttgagtttagaaataaaagacagacttataagataaattaaatcacgagtggtattttattagactatttcacgaacaaagtgataggtcaaaaattcagtagaatgagaggaaggaatttaataatatgtaatacatttgatctaggtaacccaaatctacccattttttgaataattcacaattagtcataatcatgaaatatttattataactataaataatttgttataattattttttacctataacaataaatagttgaaggcccagtcttttagaatgaatgctagtctttcgttgttattttctgcatctaatttgtagttgcgatccacacagaacatcataaattgtctccatatataagatttagattttcttgtgttactcggtatattttcttcaatgttttggtttataacttcgtttgaagtaccaccgaaacgactcattttgacgtatacagctacaataatttttttggcaaacgtcaaactttgctttgcgatcggtatccatggttacgtcgttgaaaacacgaagttgatagaccaatcagaattgaaagacagttggtgttttcgcgataacacaagctgtctttggtttgtgattggtcagattatgtgaaaattttaagatgagtgaaatagtcactataactttttatataattttgattatgattgttatttgagacttcattgtcacatcttattatgcatatttctaatatacaacagtagtagttacactactctcatttttttttgtgaagtttgatgcattttttgattctaaacgaaccgcttattatggtactactacattattgtgttttgttactttttgaagttatacttctttacgatcgacggtgaaaatttaatacttacctggcgcatgcgcagacatacagtatgtagttcg

SEQ ID NO: 5987 - DNA, 981 bp, Diabrotica virgifera
  SmartBlast Evalue=2E-30; Info=Ribonuclease n=1 Tax=Helicoverpa armigera RepID=B6A8I2_HELAM
gctgtgtgctgtcactgtcactactctagtgtcacgattttttagccctgaaattgtcagattatcacatgacattttgagaaaactaaattagtaagtgaacacgaatttagttcaaaatgcctttctgtggtcccaaattgtccctctgcggcctgattatcagtgcatggggtatcatccagttgggtttcatgggtgtattctattacattggggctgtggctttagcagaagatattccagaggttgagtttaagggcgatttagacaaattttatagcgacgtcaacacgggtttcacacagaatgcttacaactgctggattgctgctctcctatacctgataacattagcagtatcagctcaccaattctgggccaacaacagatcatcattgaacgtctaagaatcttttaatttgcttttgtatatatttatttacattccttctccagctgtagattttaaatgtatagaccctcaaatacttcagagtaccaatttttctgttaaacttagcggactcgtacaccaaagcaatatccaaacgcaacatgaaacactcaacatcccataaatatcagaggttatgtatcccttgaacgcgcttaaaactacctaggagtcctcgaactttgttcaccgacgcaatgcggataaggatcatccaccgaaaaccagatgcgacactcagtgcatattatctttccacagtgtatgttatatgcgatttcgatagggtattgctttggtgtacgagtccgcttaggtcagtcaatgtagcatgttgttgtttttaaagttttcattggtactaaaacttttgttcaccaacgtagtattataaaaatcatagtaatataaataacgctgcaatgttatgaatcttaccaaattattttatggttctgttgtattagtgatttgaatttaaaaattgtacacatttactatgaaataaagtgatttattgttaa

SEQ ID NO: 5988 - DNA, 757 bp, Diabrotica virgifera
tgtgttggggtagatgctatggcttcttttaattcctgttgttcctaggcattgtggggtattgctgtgctgcacctgcggtgaattgggatgaagtgagtagaaaaatcaatgaaatagggaacaaggttcaaactgcggcaagaggtgcatgtggatttattaactcaatacccggaggccaaccctctccatttaacccccaagggtttaatacaggatttagaggatttcaaccatcttactttccacagtccccaggatttgcagcaggtagaggttttccacaatttcctgcaggtagaggcttcccacaatcaccaggatttccatcctactatcctccatcatattatccgaatcggtttcctggtcgagctccaaactctcctccagcttctcctcaaactccaaacttcgttcctccttcaagctcgggtggaattagaccaaatggaatgccaccagtaccacaaataccagctaccttacctccatctcttcttccctcaacagtggctcctccagacactcaaacatcttttgaacaaaatgacttaaacgtcggtaatgtcggtaatgaagttccagcatttatacctccttctactgatgataatgatgttacagggaaccttatcactagcagacgcttaagaaatgccttcagtaataaatatgttaattggagaaaataaattttgtttaattatattgtatggttctatgtaatagttatgttcgttttggaacaaat

SEQ ID NO: 5989 - DNA, 658 bp, Diabrotica virgifera
  SmartBlast Evalue=2E-41; Info=Protein-S-isoprenylcysteine O- methyltransferase n=6 Tax=Xenopus RepID=ICMT_XENLA
gcttatttttggtgtaaagtgtactagtaccttaaacagttaaatagttttttgatacagagtgtcaaaaataaataaaaagaagaggaaaaagttcatgagacaagaaatttactcagggaaaaaattacgtagagtgaaaaatattggggttgttggcataaaatctacctttatggcactttgataagagtctgaatgaaaatgattgaaatatacccatatgttgacactaaagaacattcattttttttatataatcttgtaagagtagatatactccccttaacaagaaaagcccacgtcgatgtagaaaatagtcggctatatcctgtatccgtagatgaaggggattcccgtccagactttctcttgataatcacagtagttttggccaaagaagtttagcagagtgatttcttctatttctatcctagtcttgaagaacagccaactggccaaagcatatgcgggtacacatagagggtttaataataaaatctgagtgcctatagaccaataaaaccatcctacataactaggatgtcggaaccagccatacactccatacgtgaccagagtatgattactaaatttttcacattggaccaaatgattaaaatttgatccagcagtcaacattgcagtctttctcaat

SEQ ID NO: 5990 - DNA, 6635 bp, Diabrotica virgifera
  SmartBlast Evalue=0; Info=Filamin1 (Fragment) n=5 Tax= Drosophila RepID=Q7KKC2_DROME
ggtatgtacaaaataaaaatgacacgaaacagttaaaaatactatgcttaaagtcaaagtgttgtttattttgaataatctctattcgtgttacaatttttgtaacttattatatttggtatgactatatatgaagagtatccaaaaaacatacaccactttgcctttacgcacaaaaatatggctaaagtaaaaaaataacaaatcaacaataatatgtaaaaaaataaatttaatatctatacttccactttaaaaggagaaccaggaatatgatcgtctccccattttactattactaggtagtcacctctatctctaaccatataattgacagcatactgattatgtccttgatgtttaataaatacttcctcacaagggccttttggtccgtggattccaacgaaaagaatgttcacacctgcattctgtgctgaaaccgtaaattgattctgttttcctagatatgctttctttaatcccattccttttgacagcactttggatgcgtcacttttgaaggctggcaaaacaggtcctttgttgttattggcttttcctgttttggctactgtttctaccaccgttgaagatgattcctggccaccaatatccgctacctttttgtcacctttacttgttactttgaaaggtgaaccaacaatatggtgattgttatatttaatactaatgtagtagtctcctggggctagtggagtgtatctgactttgtatccttcctctacttctgtgcaatccatcgatactttacttggaccgtcaatgtttaccgctaaggtaccactaccagcattcacggtatcaacaataaaatcggtctttacaccagttttaacttcctttagtccatttccgctcgcgtggacagcagctgggtcagcagtgtccttaccaactttaacactgaatggagatccaggtatatgtactccattaaacttcgcgtgaattttgtgaataccgttttctcttggcatgaatcggatggagtattcttccatatcaatgatttgaacaaagcaatcgtcttcatgtcctgaggggccgataattttggcgtccaagtctcccttggctccatttcttctaacaataaattgagatggtttgtctgcttggatacaaccttctgggaattgagccacttcgagtaaatgagcgtctcctacagcaggtgaaatgtatactttgaatggtgagtctggaacatgctcgtcgttgaacttcaagccaatgcggtattcaccgggttctgatactttgtatgaaacatcgcacgaaccatctttgcggtcagagaagttgatctcagctttgctaggtccttcaactgaaatggccaattgaccactgccagcttctctagtccagacattaaattcgtttagttcaccttgttcacctctttctaagccagcacctcctgcttttaccaagtgagctccgtgatctctgtatggacctacagtaaattggaatggagagccaggtatatgaatgtccttgtatctgactgagacagtgtgaactcctaattctttgggtacgaagtggacagcatacaacccatctttgacttcattaatttctgcatcttctgttacaccaccaggtgacgttacagtagcgcttaaatcaaatgaagtgatgccaggcattttgaatgtcaatttacactggctaccgacttcagtgactggtacagcttccctctgcctttggatcttctcacgttgtctgtttgaaccttcaccagtgaccttaacagtgaatggtgatccatccaaatgatgatcggcgaatttaagatttacaatataatatccaggttcagtcggtttgtatgaaatgtttaatgtgccatctgtgttatcattacattgtatttcagctttactaggtccttcaattgatagtgataacccaccgaaaccagcgttcctggtgtcgacggtaaaggtgttatcttgatgagttttgccatcttttagggcactaccagttactttaacttttctggcgtctcctacctctctttcacaaacattaattttgaatggggaattcgtaatgtggttgcccattttctttacgcttactacgtgttctcctatttctctgggggtaaatgatatgccgatgtttcccgtgggaagtcgcttaaggaaacatggttcttctaaaccactaggtgcttgaatggaagcgttaagggatctgatatctgcgtcagagattttaccaccaggtaaggatacttcgctacatgaacccacagagatttggttcctttttctgccttctccggtgattttagcattgaatggagatcctttaatatgtttgtctccaaatctaactgaaatcttgtactctccaggagctgtgggaaggtacgataccgacacggtaccgtctttattgtcatgacaactgatttcagctttactgggaccttctacggccatcgacaagcccccagctccggctcctttggtggaaatagtgaagttgctgggttctccagtaacgccatgggtaagaccgggaccgtaagcagttacgtaaccagaactaattgagtctacgtggattttgtatggagaaccttgtacatgttctccattgaatttcacagcaagttcgtgaacaccttcttcacgaggatcgtatttaattgttacagtaccatcacgattgtcttcgataattggtttgtcaatgtttccgctgggcatctttatttcggctgttacgtttcctccggtactgagcaatgggattttactaagttcgactggcctaaatacttgctgtttagtggtctgtgtactggttactttttcgtgaacttcgctgtgagtgataacttcgctggtcttttcagcgtttccaatggcgtacgcttgaatagcgatgggagtcttcgaaacctctttgtctccatatttagcatcaagtttgtaccgtccgcagtcatcaggcacaaatgttgcactgtaagtaccatcgccattatctgtgagctttacaggccgctgcgaaccatcaggaccaataatcttgacatctaactccccataacctgcttcatttgtatcaaccataacggtagtaggaatggaggcaggaatgccttggtcaaaaatggccggtccactgaatttgactttctctggctccactgtaggtttgacatgaacggggaatggactgttgggaatatttttgtcattgtaaagaatctgtgtctgtaagttagcgccttcattgggagggacgtatgtcactgtaaaagtaccatcgttgttgtcaactacttccggtctctttgaaagaggtttggaatcagacgttatattgacggctacaggagccggcccagctttagaagcatcaattgtaaaacttgtaggtattccagatctacaattggatttctccaatccaggcccgaaggcttttactaagtgttcgtttgtctctggttctaccgagaccttgaaaggagagccaggaatgtgattttcagtaaacttgattgaaatatcgtattcaccaggttcggttggtatatattctacagagcaagatccatctctgttatctttgcaagtcattttagcttctgaaggtccttcgatagcaagagacagacctcctgttccagcttctttagtttctacagtaaacatattcgatttattaagaattcccttctgaagtccaggaccgtacgcatggcactttctagcgtcacatcctcttctgacattaacgataaacggagagcctggtacaggtacgttgtcgtagaaaatatctatggtatgctttccttcttcgaaaggagtataactcactttgtaggtgccatcgattaaaggtattattaatttctcgacttgcgcacctgatgggccggttattgtgcatgtcaatttgccatcgtcactagattttggaatgcttctagtgtccactataaaatcagttggagaatctacatgcacactttgctccaaaccgtccactttaattttggatacgtccacattgggttcaactttaaacttaattggggtactaggtaccttttgtcctccgtagtgaacagtgagtttgtgtgttcccgcgagaacagtttcataatccacagtataggttcgatcaccattgtctgtcagtttcagaggaacttcttctcgggtgctttcgttgactagatggacatccacatcaccatcgccagctcctcttgcatcgatgttaaaatgagtaggagtatttgctttgacgccatcttgaagaccaggtccgaaacattgaactctagcagcgtctaatggttcctcaacatatactctgaaaggagagtttttcacggctactccaccgtagtttacttgaaccgtatgtctatttgcgcttgttggagtatatataccttcaaatgagccgtcatccttttgaattaactttacttttacattattcaagtttgcatcacatacctttacatccaggggggcaggacccgcttcactagtatctataacaaatttagtcggagtattggtgtgaactccgcctgactgaacacctggtccactaaccaggactttttcaggatagtaatctgtatgaggcaaaatttgagcaatatacggactaccaggaatgtcttcattgtcacatagtatatgtacagcgtattcgccaggtgcagtaggataatatttaacatcagctgagccatcaccattatcgaggcattctattttagcttgtgaaggaccttgtatactaaagcctaaagctccagtttctccatttgtttcaactgtgaaaagtgctgcggagctgactaatcctcctttcaacccgggtccataggccctaataagtgtttctttatagggtcccacaccaatttcaaatggagatttgtaaatctcatttccaccaaatttgatcataataacgtattttccttctcttaggggatgataaacggcatgatatgtatgctcatctacctttttaatagtacaattttcgtgtataccatctggacctattatttggacttctgggactccttcaccagctccttcagtatgaatcttaaagtcggcttcatcctttactctaatgccctgcggttgaagcccacgtccacttgctttgactttgcgagcatctgacgctggggaaactcttaccccgaatggactatttggaatgggtttaccagcgaaaaatatattaacggaatgtagaccaagaagtggggagacgtagccgcagcgccatacatcaggagctgtctgttgaaccttgacaggaacggtactcttattttcggagggatctaagattattacctcaggcacaccatttccagcatttttggtgaaaatatcaaaataagtaggtctgtttagatgaacaccatcatgctgcagtccaggcccagatgctgtaactttggaggcgtctcctgcaaatccctccactttaacatggtaagggctctttggtgaatttctccctgagaaaaggacatatatcgtatgggtcccttccatctgtggttggtatgaaactgtgtacgttaagttcttatcattattgaatttaacatctgcaggttcccgttgtccccgtggattctcaacgattacttctacatcagcacgtcctgcggagaaggtttcaacagtgaaaatagctggagcacccactactacaccagtgggttcaatgcctgggccatagactcgtaccttatttacatttgttctaggtctcaacggtgcaccaggtttgagtttggcattaggatactgcgataaatatgtcatcatagactgttcgtcaatatttgggttgactatttcttcaggcttaataagttggggaacgttaagccaatcatcggcgagattcatagcctcagatgcatttttcactccttctcggttatcccagtcttgccaatctggacaaagtccaggagctacagcatcaaccaaagcaccgactgcttttccactgttccagtctgttgtgaagttttttataggtagatctggaagctttgtttgaatccagttcatcagcctttgttttggtgtgggttctgtgccattgtttaaatcgtcttctccttcccacatgggcagggatattgaataatgtaaaattaatgtccatattaatcctaatattaattttagtttgcagtctactatgtggcttgaatcaatattgacgattctaattccttcgtcatcctgcaagaacttaagagccacagacacattttcgagtttttgcgaccggaacgacggttttttgttatattttggcaaactttttcctgacaacacttcgatcaaagttattagcctcaacccgtcactgaggtccgtttctaaattgccaatatgtttcgatactgttttaagatgttcgtttgcccaccttgtaaacgtgttttgttgaatttttttccattgtgcgtcctcggctaactcacgctcggtcgtcaccatctcgtcctcgtcatctactaactgctgctggtcgcgctcgctgcagtactc

SEQ ID NO: 5991 - DNA, 6594 bp, Diabrotica virgifera
  SmartBlast Evalue=0; Info=Filamin1 (Fragment) n=5 Tax= Drosophila RepID=Q7KKC2_DROME
cgaggacgagatggtgacgaccgagcgtgagttagccgaggacgcacaatggaaaaaaattcaacaaaacacgtttacaaggtgggcaaacgaacatcttaaaacagtatcgaaacatattggcaatttagaaacggacctcagtgacgggttgaggctaataactttgatcgaagtgttgtcaggaaaaagtttgccaaaatataacaaaaaaccgtcgttccggtcgcaaaaactcgaaaatgtgtctgtggctcttaagttcttgcaggatgacgaaggaattagaatcgtcaatattgattcaagccacatagtagactgcaaactaaaattaatattaggattaatatggacattaattttacattattcaatatccctgcccatgtgggaaggagaagacgatttaaacaatggcacagaacccacaccaaaacaaaggctgatgaactggattcaaacaaagcttccagatctacctataaaaaacttcacaacagactggaacagtggaaaagcagtcggtgctttggttgatgctgtagctcctggactttgtccagattggcaagactgggataaccgagaaggagtgaaaaatgcatctgaggctatgaatctcgccgatgattggcttaacgttccccaacttattaagcctgaagaaatagtcaacccaaatattgacgaacagtctatgatgacatatttatcgcagtatcctaatgccaaactcaaacctggtgcaccgttgagacctagaacaaatgtaaataaggtacgagtctatggcccaggcattgaacccactggtgtagtagtgggtgctccagctattttcactgttgaaaccttctccgcaggacgtgctgatgtagaagtaatcgttgagaatccacggggacaacgggaacctgcagatgttaaattcaataatgataagaacttaacgtacacagtttcataccaaccacagatggaagggacccatacgatatatgtccttttctcagggagaaattcaccaaagagcccttaccatgttaaagtggagggatttgcaggagacgcctccaaagttacagcatctgggcctggactgcagcatgatggtgttcatctaaacagacctacttattttgatattttcaccaaaaatgctggaaatggtgtgcctgaggtaataatcttagatccctccgaaaataagagtaccgttcctgtcaaggttcaacagacagctcctgatgtatggcgctgcggctacgtctccccacttcttggtctacattccgttaatatatttttcgctggtaaacccattccaaatagtccattcggggtaagagtttccccagcgtcagatgctcgcaaagtcaaagcaagtggacgtgggcttcaaccgcagggcattagagtaaaggatgaagccgactttaagattcatactgaaggagctggtgaaggagtcccagaagtccaaataataggtccagatggtatacacgaaaattgtactattaaaaaggtagatgagcatacatatcatgccgtttatcatcccctaagagaaggaaaatacgttattatgatcaaatttggtggaaatgagatttacaaatctccatttgaaattggtgtgggaccctataaagaaacacttattagggcctatggacccgggttgaaaggaggattagtcagctccgcagcacttttcacagttgaaacaaatggagaaactggagctttaggctttagtatacaaggtccttcacaagctaaaatagaatgcctcgataatggtgatggctcagctgatgttaaatattatcctactgcacctggcgaatacgctgtacatatactatgtgacaatgaagacattcctggtagtccgtatattgctcaaattttgcctcatacagattactatcctgaaaaagtcctggttagtggaccaggtgttcagtcaggcggagttcacaccaatactccgactaaatttgttatagatactagtgaagcgggtcctgcccccctggatgtaaaggtatgtgatgcaaacttgaataatgtaaaagtaaagttaattcaaaaggatgacggctcatttgaaggtatatatactccaacaagcgcaaatagacatacggttcaagtaaactacggtggagtagccgtgaaaaactctcctttcagagtatatgttgaggaaccattagacgctgctagagttcaatgtttcggacctggtcttcaagatggcgtcaaagcaaatactcctactcattttaacatcgatgcaagaggagctggcgatggtgatgtggatgtccatctagtcaacgaaagcacccgagaagaagttcctctgaaactgacagacaatggtgatcgaacctatactgtggattatgaaactgttctcgcgggaacacacaaactcactgttcactacggaggacaaaaggtacctagtaccccaattaagtttaaagttgaacccaatgtggacgtatccaaaattaaagtggacggtttggagcaaagtgtgcatgtagattctccaactgattttatagtggacactagaagcattccaaaatctagtgacgatggcaaattgacatgcacaataaccggcccatcaggtgcgcaagtcgagaaattaataatacctttaatcgatggcacctacaaagtgagttatactcctttcgaagaaggaaagcataccatagatattttctacgacaacgtacctgtaccaggctctccgtttatcgttaatgtcagaagaggatgtgacgctagaaagtgccatgcgtacggtcctggacttcagaagggaattcttaataaatcgaatatgtttactgtagaaactaaagaagctggaacaggaggtctgtctcttgctatcgaaggaccttcagaagctaaaatgacttgcaaagataacagagatggatcttgctctgtagaatatataccaaccgaacctggtgaatacgatatttcaatcaagtttactgaaaatcacattcctggctctcctttcaaggtctcggtagaaccagagacaaacgaacacttagtaaaagccttcgggcctggattggagaaatccaattgtagatctggaatacctacaagttttacaattgatgcttctaaagctgggccggctcctgtagccgtcaatataacgtctgattccaaacctctttcaaagagaccggaagtagttgacaacaacgatggtacttttacagtgacatacgtccctcccaatgaaggcgctaacttacagacacagattctttacaatgacaaaaatattcccaacagtccattccccgttcatgtcaaacctacagtggagccagagaaagtcaaattcagtggaccggccatttttgaccaaggcattcctgcctccattcctactaccgttatggttgatacaaatgaagcaggttatggggagttagatgtcaagattattggtcctgatggttcgcagcggcctgtaaagctcacagataatggcgatggtacttacagtgcaacatttgtgcctgatgactgcggacggtacaaacttgatgctaaatatggagacaaagaggtttcgaagactcccatcgctattcaagcgtacgccattggaaacgctgaaaagaccagcgaagttatcactcacagcgaagttcacgaaaaagtaaccagtacacagaccactaaacagcaagtatttaggccagtcgaacttagtaaaatcccattgctcagtaccggaggaaacgtaacagccgaaataaagatgcccagcggaaacattgacaaaccaattatcgaagacaatcgtgatggtactgtaacaattaaatacgatcctcgtgaagaaggtgttcacgaacttgctgtgaaattcaatggagaacatgtacaaggttctccatacaaaatccacgtagactcaattagttctggttacgtaactgcttacggtcccggtcttacccatggcgttactggagaacccagcaacttcactatttccaccaaaggagccggagctgggggcttgtcgatggccgtagaaggtcccagtaaagctgaaatcagttgtcatgacaataaagatggtaccgtgtcggtatcgtaccttcccacagctcctggagagtacaagatttcagttagatttggagacaaacatattaaaggatctccattcaatgctaaaatcaccggagaaggcagaaaaaggaaccaaatctctgtgggttcatgtagcgaagtatccttacctggtggtaaaatctctgacgcagatatcagatcccttaacgcttccattcaagcacctagtggtttagaagaaccatgtttccttaagcgacttcccacgggaaacatcggcatatcatttacccccagagaaataggagaacacgtagtaagcgtaaagaaaatgggcaaccacattacgaattccccattcaaaattaatgtttgtgaaagagaggtaggagacgccagaaaagttaaagtaactggtagtgccctaaaagatggcaaaactcatcaagataacacctttaccgtcgacaccaggaacgctggtttcggtgggttatcactatcaattgaaggacctagtaaagctgaaatacaatgtaatgataacacagatggcacattaaacatttcatacaaaccgactgaacctggatattatattgtaaatcttaaattcgccgatcatcatttggatggatcaccattcactgttaaggtcactggtgaaggttcaaacagacaacgtgagaagatccaaaggcagagggaagctgtaccagtcactgaagtcggtagccagtgtaaattgacattcaaaatgcctggcatcacttcatttgatttaagcgctactgtaacgtcacctggtggtgtaacagaagatgcagaaattaatgaagtcaaagatgggttgtatgctgtccacttcgtacccaaagaattaggagttcacactgtctcagtcagatacaaggacattcatatacctggctctccattccaatttactgtaggtccatacagagatcacggagctcacttggtaaaagcaggaggtgctggcttagaaagaggtgaacaaggtgaactaaacgaatttaatgtctggactagagaagctggcagtggtcaattggccatttcagttgaaggacctagcaaagctgagatcaacttctctgaccgcaaagatggttcgtgcgatgtttcatacaaagtatcagaacccggtgaataccgcattggcttgaagttcaacgacgagcatgttccagactcaccattcaaagtatacatttcacctgctgtaggagacgctcatttactcgaagtggctcaattcccagaaggttgtatccaagcagacaaaccatctcaatttattgttagaagaaatggagccaagggagacttggacgccaaaattatcggcccctcaggacatgaagacgattgctttgttcaaatcattgatatggaagaatactccatccgattcatgccaagagaaaacggtattcacaaaattcacgcgaagtttaatggagtacatatacctggatctccattcagtgttaaagttggtaaggacactgctgacccagctgctgtccacgcgagcggaaatggactaaaggaagttaaaactggtgtaaagaccgattttattgttgataccgtgaatgctggtagtggtaccttagcggtaaacattgacggtccaagtaaagtatcgatggattgcacagaagtagaggaaggatacaaagtcagatacactccactagccccaggagactactacattagtattaaatataacaatcaccatattgttggttcacctttcaaagtaacaagtaaaggtgacaaaaaggtagcggatattggtggccaggaatcatcttcaacggtggtagaaacagtagccaaaacaggaaaagccaataacaacaaaggacctgttttgccagccttcaaaagtgacgcatccaaagtgctgtcaaaaggaatgggattaaagaaagcatatctaggaaaacagaatcaatttacggtttcagcacagaatgcaggtgtgaacattcttttcgttggaatccacggaccaaaaggcccttgtgaggaagtatttattaaacatcaaggacataatcagtatgctgtcaattatatggttagagatagaggtgactacctagtaatagtaaaatggggagacgatcatattcctggttctccttttaaagtggaagtatagatattaaatttatttttttacatattattgttgatttgttatttttttactttagccatatttttgtgcgtaaaggcaaagtggtgtatgttttttggatactcttcatatatagtcataccaaatataataagttacaaaaattgtaacacgaatagagattattcaaaataaacaacactttgactttaagcatagtatttttaactgtttcgtgtcatttttattttgtacatacc

SEQ ID NO: 5992 - DNA, 3631 bp, Diabrotica virgifera
  SmartBlast Evalue=0; Info=Heat shock 70 kDa protein cognate 3 n= 11 Tax=Schizophora RepID=HSP7C_DROME
ttttattttttcaagtaattttattgaaaaattacaggaaaattgagaatagtcaaatacaggtgtacaatatacaaaaacaatgcatttactacttaatacaaaaaatatatatcacaatcatacgcctgtacctaacacgcaaaataataaataaataagttcacccattcaatgagcaaaccggaaaatttacaaaaaagtctattacaaaaaaagggataacagtcacggaaattaaataacacacgatcgtccgcattctcacgcatccacacaagttttttcagtctttttggcctacaattcacctcacaattcatctttaagttcatcatcatcctcacttgagggtggaggtggggcgccacctgtgctctggtacaatttagcgatgatgggctgcacgacatcttccaattccttcttctgtttcttgtagtcttctgaatcagtatcttgattgtcttccaaccatttgatcttctcatcgattgcttcttccattttggtcttttcgtcatctgacaacttagctcccaacttgtctttgtcgttaatttggttcttgagcgagtatgcgtagctttccaattcgtttctggcttctactctttctttaagtttcttgtcttcatcagcgaatttctcggcatcgttgatcatacggtcaatgtcttcaggtgtcaatctgttctgatcgttggtgataacaatcttctccctgtttccagttcctttgtcttcagcagaaacttgcaagataccgttggcatcaatttcgaaagtaacttcaatctgtggtactcctctaggtgctggtgggataccggtcaagtcaaatttacccaacaagtgattgtccttggtcataggacgttctccttcgtatacttggatggtgacagtgtgttggttatcagatgcagtagagaagatctgagatttctttgtgggtatgacagtgtttcttgggatcaacttggtcatgacacctcctacagtttcaatacccatggtcaaaggattgacatccaatagtacaatggcatcagtatcttgttctccagagaggacaccagcttgaacggcagcaccataagcaacagcttcatcagggttgatacctcttgaaggttctttgcctccaaagaattctttgactaattgttgtactttgggaatacgagttgaaccacctacaagtacaatttcatctacatctttcttgttcatgtcagcatcttctaatactttctgtactggtttcatggtagaacggaaaagatccatgtttaattcttcaaatttggctctggtgagagtttcagagaaatcatcaccttcaaagaaggattcaatttcaatcctgttttggtgactggaagacaaagctctcttggccttttcaacttctcttctcaatttctggacggctctgttgtcttttctgatatccttgcccttcttcttcttgtacaacttgatgaaatgatccataactctttgatcgaaatcttcaccacccaagtgagtgtctccattggtagcaactacttcaaatactccattgtcaatagtcaaaagggacacatcaaaagtaccaccacccaaatcaaatactaatacattcttttctccttccttcttatcaagaccataggcaatagctgcggcagtaggttcattgatgattctcatgacattaagaccagcaatggtaccagcatctttggtggcttgacgttgggcatcattgaaataagcaggtactgttacaacagcatgggtaaccttcttgcctaaataagcttctgctgtttccttcatctttcccaaaaccatagcagaaatttcttcaggggcaaagaccttagttccctggctggtttctacttgaatatgtggcttctggttcttttcaatgactttgaaggggaagagcttcaagtcatgttgaactgtatggtctgtgaagtcacgaccaatgagacgcttggcatcaaaaacagtgttttcagggtttgttgtaagttgattcttggcagcatctccgatgagacgctcaccatcggcagtgaaggcaacatacgagggggtgatacggttaccttggtcattggcgatgatttctactctaccatttttgatatacacccacacatgaatacgttgttcccaaatcaattccgatgactgttccaacatcttctttatcctttttctcttctttagctcccaaaacggcagctaaaagaagcagcactccaaatcccaaatataacctcattttgggcgttagtctgacacacttatatttaatttaattcagcctaaaccacaataaatatcacttttcactcctaattccaattctcatgtgtttccttttaaccggtagtgtacaaaaaacatattcttgcaatatggtgaaaattggaattaacggttttggccgtattggtcgtcttgtactccgtgcagctcttgaaaaaggagttgaagtagtagctgtcaacgatcccttccttgatgtcgactacatggtatacttgttcaaatttgactctacccacggtcgctacaagggatgtgtcaacagtgatggcaaaaacttagttgttgatggcaaagtcatttccgtacaccaagaaagagacccagctgctattccatggggcaaagctggtgcagattatgtagtagaatctaccggagtgttcaccacaattgaaaaggccaagaaacatcttgacggtggtgctaagaaagtcatcatctcagctccatctgctgatgctccaatgtatgtatgtggtgttaacttggatgcctacaatccagctgatcccgtaatctctaacgcttcttgcactaccaactgccttgctccactcgccaaagtcatccacgacaacttcgaaatcgttgaaggtttgatgaccaccgtacatgccacaaccgccacacaaaaaactgtcgacggaccctctggaaaattgtggcgtgacggtcgtggtgccggacaaaacatcatcccagcttccactggtgccgccaaggctgttggcaaggttattccaagccttaatggcaaactcacaggtatggctttccgtgtacctgtaccaaatgtatccgttgttgacttgactgttcgtttgggcaaacccgccagctacgaccaaattaaggccaaggttaaggaagccgcagaaggtcctcttaagggaatcttgggatacaccgacgaagaagtagtctcaaacgacttcgttggagacacccactcctctgtctttgatgctaaagctggtatccaacttaacgacaaattcgtcaaacttatctcatggtacgataatgagtacggttattccaacagagtagtcgatcttatcacctacatcgacaccaagaaagcttaaggatgtcaggcacttctttaagagcgtttttccgtactgaggcattaggcgcctcggagaatgtttcatgatcagtgtttaaagcatctttattgtaagggactagatagtagtcctttgttcatgtcaaaattatattatcaagttttatttttatttaaaatttaggattatgtataatatacatgttgaaacaaattgtc

SEQ ID NO: 5993 - DNA, 3620 bp, Diabrotica virgifera
  SmartBlast Evalue=0; Info=Heat shock 70 kDa protein cognate 3 n= 11 Tax=Schizophora RepID=HSP7C_DROME
caagtaattttattgaaaaattacaggaaaattgagaatagtcaaatacaggtgtacaatatacaaaaacaatgcatttactacttaatacaaaaaatatatatcacaatcatacgcctgtacctaacacgcaaaataataaataaataagttcacccattcaatgagcaaaccggaaaatttacaaaaaagtctattacaaaaaaagggataacagtcacggaaattaaataacacacgatcgtccgcattctcacgcatccacacaagttttttcagtctttttggcctacaattcacctcacaattcatctttaagttcatcatcatcctcacttgagggtggaggtggggcgccacctgtgctctggtacaatttagcgatgatgggctgcacgacatcttccaattccttcttctgtttcttgtagtcttctgaatcagtatcttgattgtcttccaaccatttgatcttctcatcgattgcttcttccattttggtcttttcgtcatctgacaacttagctcccaacttgtctttgtcgttaatttggttcttgagcgagtatgcgtagctttccaattcgtttctggcttctactctttctttaagtttcttgtcttcatcagcgaatttctcggcatcgttgatcatacggtcaatgtcttcaggtgtcaatctgttctgatcgttggtgataacaatcttctccctgtttccagttcctttgtcttcagcagaaacttgcaagataccgttggcatcaatttcgaaagtaacttcaatctgtggtactcctctaggtgctggtgggataccggtcaagtcaaatttacccaacaagtgattgtccttggtcataggacgttctccttcgtatacttggatggtgacagtgtgttggttatcagatgcagtagagaagatctgagatttctttgtgggtatgacagtgtttcttgggatcaacttggtcatgacacctcctacagtttcaatacccatggtcaaaggattgacatccaatagtacaatggcatcagtatcttgttctccagagaggacaccagcttgaacggcagcaccataagcaacagcttcatcagggttgatacctcttgaaggttctttgcctccaaagaattctttgactaattgttgtactttgggaatacgagttgaaccacctacaagtacaatttcatctacatctttcttgttcatgtcagcatcttctaatactttctgtactggtttcatggtagaacggaaaagatccatgtttaattcttcaaatttggctctggtgagagtttcagagaaatcatcaccttcaaagaaggattcaatttcaatcctgttttggtgactggaagacaaagctctcttggccttttcaacttctcttctcaatttctggacggctctgttgtcttttctgatatccttgcccttcttcttcttgtacaacttgatgaaatgatccataactctttgatcgaaatcttcaccacccaagtgagtgtctccattggtagcaactacttcaaatactccattgtcaatagtcaaaagggacacatcaaaagtaccaccacccaaatcaaatactaatacattcttttctccttccttcttatcaagaccataggcaatagctgcggcagtaggttcattgatgattctcatgacattaagaccagcaatggtaccagcatctttggtggcttgacgttgggcatcattgaaataagcaggtactgttacaacagcatgggtaaccttcttgcctaaataagcttctgctgtttccttcatctttcccaaaaccatagcagaaatttcttcaggggcaaagaccttagttccctggctggtttctacttgaatatgtggcttctggttcttttcaatgactttgaaggggaagagcttcaagtcatgttgaactgtatggtctgtgaagtcacgaccaatgagacgcttggcatcaaaaacagtgttttcagggtttgttgtaagttgattcttggcagcatctccgatgagacgctcaccatcggcagtgaaggcaacatacgagggggtgatacggttaccttggtcattggcgatgatttctactctaccatttttgatatacacccacacatgaatacgttgttcccaaatcaattccgatgactgttccaacatcttctttatcctttttctcttctttagctcccaaaacggcagctaaaagaagcagcactccaaatcccaaatataacctcattttgggcgttagtctgacacacttatatttaatttaattcagcctaaaccacaataaatatcacttttcactcctaattccaattctcatgtgtttccttttaaccggtagtgtacaaaaaacatattcttgcaatatggtgaaaattggaattaacggttttggccgtattggtcgtcttgtactccgtgcagctcttgaaaaaggagttgaagtagtagctgtcaacgatcccttccttgatgtcgactacatggtatacttgttcaaatttgactctacccacggtcgctacaagggatgtgtcaacagtgatggcaaaaacttagttgttgatggcaaagtcatttccgtacaccaagaaagagacccagctgctattccatggggcaaagctggtgcagattatgtagtagaatctaccggagtgttcaccacaattgaaaaggccaagaaacatcttgacggtggtgctaagaaagtcatcatctcagctccatctgctgatgctccaatgtatgtatgtggtgttaacttggatgcctacaatccagctgatcccgtaatctctaacgcttcttgcactaccaactgccttgctccactcgccaaagtcatccacgacaacttcgaaatcgttgaaggtttgatgaccaccgtacatgccacaaccgccacacaaaaaactgtcgacggaccctctggaaaattgtggcgtgacggtcgtggtgccggacaaaacatcatcccagcttccactggtgccgccaaggctgttggcaaggttattccaagccttaatggcaaactcacaggtatggctttccgtgtacctgtaccaaatgtatccgttgttgacttgactgttcgtttgggcaaacccgccagctacgaccaaattaaggccaaggttaaggaagccgcagaaggtcctcttaagggaatcttgggatacaccgacgaagaagtagtctcaaacgacttcgttggagacacccactcctctgtctttgatgctaaagctggtatccaacttaacgacaaattcgtcaaacttatctcatggtacgataatgagtacggttattccaacagagtagtcgatcttatcacctacatcgacaccaagaaagcttaaggatgtcaggcacttctttaagagcgtttttccgtactgaggcattaggcgcctcggagaatgtttcatgatcagtgtttaaagcatctttattgtaagggactagatagtagtcctttgttcatgtcaaaattatattatcaagttttatttttatttaaaatttaggattatgtataatatacatgttgaaacaaattgtc

SEQ ID NO: 5994 - DNA, 2812 bp, Diabrotica virgifera
  SmartBlast Evalue=5E-47; Info=Endonuclease-reverse transcriptase n=1 Tax=Bombyx mori RepID=D7F161_BOMMO
cgtccttcggtcataccaggtcaaagacagaaagagacggagaaagactttgaactaaaagtgttaccgggtttggtacgtttgacctactgttggattgcgcgtaggatagaagatgagactgtacatcctaggcacagttgtgtgcttactattgtggcaatgtaacgcaaatccaatagtaacaataacagcagaccacgaaagtaggtctttagaacaaaagtcgccagaagtagaaaaacaaatagaatcacaaggaatagtacaagaagaaacgaaaggagttttcaagactgacgaagctgaggttaaagaaacaaagactgaacaagaaccagcacaagaagacaaagaaattgaaaataaaccaaaagtagaaacagacttggtacaacccgagaaagtcgacgataaaaaaccagtagagcacaaagttgttaaaaaacaaaaggaaaaagtaaaaaccaagggaaaggttaaagggcgtcagtcgggagacgatgacgatgacgacgatgatgacgacgacgatgatttggatttaggagttgatgatgatgacgacgacgatgacgatgatgacagtcccgccgatgatgacgacgatgatgatgacgatgatgacgacgactactttggaggatttttagatgatattttaggcggtgacgatgatgacgacgacgatgatgatgacgacgatgagcctatccaggtagctcaaccccaaccacaaccgatcgagccaattgaagcagtacctgtggcaccatcagagcctgcagatgttggagaggcaggtgctgaggtaaacccaagcgatgaattggacgcccaagaaattgcagcaggagatgccgaaggtgcaactggtacggacgaaacaggcgtgtcacaagactctgactcagccatcgtcgtcaaagatccagtggcggtggcacaaccggtagaaaattccgttgaaccgattatagtacaacaagtgcccgccaccactgacgatgacgacgatgacgacgatgacgatgatgacgacgatgacgatgacgatcctgttagtgacttagttgacgatgacgatgacgatgacgacgatgacgatgatgacgatgacgatgatgatgacgatgatgaaaccggcctggaggatgtcatcgaagcgaagagatcacgtgagtccaaaaaattaaagcatactaagaaggccaaaaaatctaggaaacaccatcgccatcataaagttgctaacaaaatcagataggtagttgacgtggagtagggtagagacactttattttcttctgttttaaagacctgatttctggaactgtacaaaggaggtttgacatgatggacctaggatgttttatagtttttgtacatcattgtttggcatctttaatagaactctgaaaacatatcaaaaacatgctcggatttttaccatgtctaaattttaccataaaaaaatagaatatttataattaaaaatgccaagcataggttctgaggctgaggccctgtaggaaggattattttgagttagcttctttgcggattcctgttcaaaaatatcccctttaaacaaatctgaagggtactagagaactttgtggatagaaattgtttaaacattttttaaacaaatatcaaaacccaccattttctgctccgaaaaaatttttttaggtttcttggtctctttttatttttccctgcagttgataattttcgagctataagcgatttatttatttatgtacctatttatttacgtaaagtatctcaacaattatctgaaaaatacgaaaatactcattttggcatttttcgaggcttggaaactcaataaattattatttttgaggttgccaaatgcttaactttgagtttaaacattcagtttaaagtttctaaagagtaatggcgacagtagctggtaggaaaatctccagtttaagatttgctgatggcactacacttatagcaataaatgagcaagaaatgtttgatctcctgcgaagagttgagtacgaaagcaataaagttgggctgaaaatcaataaagctgagacaaaataatggtggtcgacatattccacactattaaactgactaaaatgttacaggaataccagatagtggacggctttgtctatctcgggtctagtataactaacgatcgtaactgagaagcagaagttcggagacgtactggtatggcaaaaatgcgatgagtcgcctaactaaagattagaaagacagatctatctctcaaaatatcaagatgagactggtgaatgcccctgtattctaatattttaatagggggcagatacttggacttgcgccaaaaattgatacctttgagatgtgctggagaagaatgctgcgcataccttggacagctcataggacaaacgtttccattctaaaccaactcgagattaaaaaaaggctgtccacaatatgacttcaacgaattctgcaattattcggtcacgtggttcgcagaggtgacgacagtttggagagattaattgtttctggaaacgttcgggggagaagatcaagaggacgatcaccaactagatggtccgaccaaattaggacttcagctggaaactcattctgtgatgctcttagagcagctgaagatagagaccaatgaaaaaaaaaattgttaggaatattggaagaaatcacgatcttcagtaatggggaaacgacgagagagagagagagagagagagagagagagagagagagagagacgagagagagagagagagagagagagagagag

SEQ ID NO: 5995 - DNA, 2706 bp, Diabrotica virgifera
  SmartBlast Evalue=5E-47; Info=Endonuclease-reverse transcriptase n=1 Tax=Bombyx mori RepID=D7F161_BOMMO
ggatagaagatgagactgtacatcctaggcacagttgtgtgcttactattgtggcaatgtaacgcaaatccaatagtaacaataacagcagaccacgaaagtaggtctttagaacaaaagtcgccagaagtagaaaaacaaatagaatcacaaggaatagtacaagaagaaacgaaaggagttttcaagactgacgaagctgaggttaaagaaacaaagactgaacaagaaccagcacaagaagacaaagaaattgaaaataaaccaaaagtagaaacagacttggtacaacccgagaaagtcgacgataaaaaaccagtagagcacaaagttgttaaaaaacaaaaggaaaaagtaaaaaccaagggaaaggttaaagggcgtcagtcgggagacgatgacgatgacgacgatgatgacgacgacgatgatttggatttaggagttgatgatgatgacgacgacgatgacgatgatgacagtcccgccgatgatgacgacgatgatgatgacgatgatgacgacgactactttggaggatttttagatgatattttaggcggtgacgatgatgacgacgacgatgatgatgacgacgatgagcctatccaggtagctcaaccccaaccacaaccgatcgagccaattgaagcagtacctgtggcaccatcagagcctgcagatgttggagaggcaggtgctgaggtaaacccaagcgatgaattggacgcccaagaaattgcagcaggagatgccgaaggtgcaactggtacggacgaaacaggcgtgtcacaagactctgactcagccatcgtcgtcaaagatccagtggcggtggcacaaccggtagaaaattccgttgaaccgattatagtacaacaagtgcccgccaccactgacgatgacgacgatgacgacgatgacgatgatgacgacgatgacgatgacgatcctgttagtgacttagttgacgatgacgatgacgatgacgacgatgacgatgatgacgatgacgatgatgatgacgatgatgaaaccggcctggaggatgtcatcgaagcgaagagatcacgtgagtccaaaaaattaaagcatactaagaaggccaaaaaatctaggaaacaccatcgccatcataaagttgctaacaaaatcagataggtagttgacgtggagtagggtagagacactttattttcttctgttttaaagacctgatttctggaactgtacaaaggaggtttgacatgatggacctaggatgttttatagtttttgtacatcattgtttggcatctttaatagaactctgaaaacatatcaaaaacatgctcggatttttaccatgtctaaattttaccataaaaaaatagaatatttataattaaaaatgccaagcataggttctgaggctgaggccctgtaggaaggattattttgagttagcttctttgcggattcctgttcaaaaatatcccctttaaacaaatctgaagggtactagagaactttgtggatagaaattgtttaaacattttttaaacaaatatcaaaacccaccattttctgctccgaaaaaatttttttaggtttcttggtctctttttatttttccctgcagttgataattttcgagctataagcgatttatttatttatgtacctatttatttacgtaaagtatctcaacaattatctgaaaaatacgaaaatactcattttggcatttttcgaggcttggaaactcaataaattattatttttgaggttgccaaatgcttaactttgagtttaaacattcagtttaaagtttctaaagagtaatggcgacagtagctggtaggaaaatctccagtttaagatttgctgatggcactacacttatagcaataaatgagcaagaaatgtttgatctcctgcgaagagttgagtacgaaagcaataaagttgggctgaaaatcaataaagctgagacaaaataatggtggtcgacatattccacactattaaactgactaaaatgttacaggaataccagatagtggacggctttgtctatctcgggtctagtataactaacgatcgtaactgagaagcagaagttcggagacgtactggtatggcaaaaatgcgatgagtcgcctaactaaagattagaaagacagatctatctctcaaaatatcaagatgagactggtgaatgcccctgtattctaatattttaatagggggcagatacttggacttgcgccaaaaattgatacctttgagatgtgctggagaagaatgctgcgcataccttggacagctcataggacaaacgtttccattctaaaccaactcgagattaaaaaaaggctgtccacaatatgacttcaacgaattctgcaattattcggtcacgtggttcgcagaggtgacgacagtttggagagattaattgtttctggaaacgttcgggggagaagatcaagaggacgatcaccaactagatggtccgaccaaattaggacttcagctggaaactcattctgtgatgctcttagagcagctgaagatagagaccaatgaaaaaaaaaattgttaggaatattggaagaaatcacgatcttcagtaatggggaaacgacgagagagagagagagagagagagagagagagagagagagagagacgagagagagagagagagagagagagagagag

SEQ ID NO: 5996 - DNA, 2626 bp, Diabrotica virgifera
  SmartBlast Evalue=1E-172; Info=Neutral alpha-glucosidase AB (Fragment) n=1 Tax=Harpegnathos saltator RepID=E2BII6_9HYME
aataatttatcacacgaatttcataatcttataattttaaagaaaccatattgtttccgttcaacttttccactatatttatactcttcaggggtgtaccatctgctaaatgtgtgtagacggtacgggtgtatctcttctcatctttatcagactgttgatgtacaataacttgacccaatgtgactgtcatgccgctgcaattaccatcgactatactaatatcaatttggtttgattgatatgccaggtttgcatagaagtatctttgattattttggtattcaaaactggtgtaatcgtcaacataaagattaccactggctgtattttccttgtctacgttcacatacaaaacgaaaggatcgtcttgcatttcagcagttgatgatcgttcttcgtctctccttgtaataatacttcctgctttatagaaatatggagatgttaaaatagttacgggtaagatcgcagaagattgcccattgtagattttaaacgaaccatcatctactcgataccactgattatcttctgagccagggaaatttacagtcaccgatcttgctcctttttccatcacaggccttgctaatatattggaacccaataatatatgatagtcctggtcgacgctgccgggatagtcgtagaaaattggtctcaccactggatctcctgttctggtgtgctcgtaaaacagggtataccacaccggtatatgcttgtatctcagtctgagggcatttctgataacatcctggacttctgtggagtatatgtagggttcccttctatccgtgttattttctgcgtgacctctatagaaaggcaaccagacacctgcctgataccatctttggactagctccgtctcaggattgtggaaaaatccaccgacgtcagctccgcaaaataccaagcccataatattagataagatacattctgaataactgacttgcaagaaaggccaatcggccgtattgtctccagtccacattgctgtatatctttgacttccagcgaagtgagatctggtcaagataaatggacgtttggtaccattgtccctctgcatcagtccttggtgtgtagccatggtctgaagaaaaccgtaaatattgtgaatatctctatggggaacatttccatggtgtaaaacatcaaaaggcaacgttttttccagctcatcgtcgaatactgatggctcgttcatgtcgttccatactccagcaagaacgggagttgattttttaaatttctcgtagctgtaccaactggcgtagtagtctcgagcttctgggtccaggaaatcaatatagctggataaacctggccaacaatcacctttaaaatcttctccgttgggctttttaacgaagtattttcctttcgctccagtatacactgggtagtcctcatcaactttgatgtgagggtccaaaatgactaccagttttttgttagtactggacaaattcctctgcaattcttctggatcagaataagtctcaggatcccacgtaaagtatctcttgccgtcggtgtagtcgatgtccaaccaaatggcatccatcgggaaattgttggcgttcatctcggctacgacgaatttggtgtcttcttgggttttgtaggaccatctgcattggtggtaccccagagtccatagttgaggcatatgggctacacctgtgagcttcgtgaactgcctgacgacgtttttgggttgatttccaagcaaaatgaacagatctaaggtaccgctttctaccataaaataactccagcctgatgtagattcttcgtcgtaccaaatgtccacccattgttcagctgcgttgtgcaaaaagatgccagacgtttggttctcagaatgtccatatacaacaggaacagatccatataccgccattggagaaccaacttcataatgatcattatctgcatttctattcctataggggtccatcagtacctttccgtctacatctcttgtcgatggaagttctagcttgactggatggtgatgcaaaccatagagtctcttggcattgatgaattccgttgcaaatgcgaaggagttgtcttccttatcaaacaccagttgttccccgtttagtgcaatctctttggtgttgtcgtcgtaatagaactccactttgaaactagttcctgtagttactacaactttgtacgaatatgatgcgtttgttggtgctatagatacttccctttctgatgtttttgctgatatttctaaagtttgtggttcttccgccaaaacatcagccagttggtatcgtttactacccttttcggcaatttttatccttgcagtttcatggaccagtaaagatatttgcaggattagttcctgactatcggaatttgttagaggaatcgagatcacattgccagtttgacttaatttgtctaattgagctgtaaacttcgagtgattttcaatggttctcaattttttgcaaaatggtattctggaacaatctttgtatatggtgtgattcgcacacgaaacatagctggctatcaaagccaaaagtagtaaaggtcttaacatcttgtctgacctttccatacgttgacactgaacgagttattt

SEQ ID NO: 5997 - DNA, 2622 bp, Diabrotica virgifera
  SmartBlast Evalue=1E-172; Info=Neutral alpha-glucosidase AB (Fragment) n=1 Tax=Harpegnathos saltator RepID=E2BII6_9HYME
aactcgttcagtgtcaacgtatggaaaggtcagacaagatgttaagacctttactacttttggctttgatagccagctatgtttcgtgtgcgaatcacaccatatacaaagattgttccagaataccattttgcaaaaaattgagaaccattgaaaatcactcgaagtttacagctcaattagacaaattaagtcaaactggcaatgtgatctcgattcctctaacaaattccgatagtcaggaactaatcctgcaaatatctttactggtccatgaaactgcaaggataaaaattgccgaaaagggtagtaaacgataccaactggctgatgttttggcggaagaaccacaaactttagaaatatcagcaaaaacatcagaaagggaagtatctatagcaccaacaaacgcatcatattcgtacaaagttgtagtaactacaggaactagtttcaaagtggagttctattacgacgacaacaccaaagagattgcactaaacggggaacaactggtgtttgataaggaagacaactccttcgcatttgcaacggaattcatcaatgccaagagactctatggtttgcatcaccatccagtcaagctagaacttccatcgacaagagatgtagacggaaaggtactgatggacccctataggaatagaaatgcagataatgatcattatgaagttggttctccaatggcggtatatggatctgttcctgttgtatatggacattctgagaaccaaacgtctggcatctttttgcacaacgcagctgaacaatgggtggacatttggtacgacgaagaatctacatcaggctggagttattttatggtagaaagcggtaccttagatctgttcattttgcttggaaatcaacccaaaaacgtcgtcaggcagttcacgaagctcacaggtgtagcccatatgcctcaactatggactctggggtaccaccaatgcagatggtcctacaaaacccaagaagacaccaaattcgtcgtagccgagatgaacgccaacaatttcccgatggatgccatttggttggacatcgactacaccgacggcaagagatactttacgtgggatcctgagacttattctgatccagaagaattgcagaggaatttgtccagtactaacaaaaaactggtagtcattttggaccctcacatcaaagttgatgaggactacccagtgtatactggagcgaaaggaaaatacttcgttaaaaagcccaacggagaagattttaaaggtgattgttggccaggtttatccagctatattgatttcctggacccagaagctcgagactactacgccagttggtacagctacgagaaatttaaaaaatcaactcccgttcttgctggagtatggaacgacatgaacgagccatcagtattcgacgatgagctggaaaaaacgttgccttttgatgttttacaccatggaaatgttccccatagagatattcacaatatttacggttttcttcagaccatggctacacaccaaggactgatgcagagggacaatggtaccaaacgtccatttatcttgaccagatctcacttcgctggaagtcaaagatatacagcaatgtggactggagacaatacggccgattggcctttcttgcaagtcagttattcagaatgtatcttatctaatattatgggcttggtattttgcggagctgacgtcggtggatttttccacaatcctgagacggagctagtccaaagatggtatcaggcaggtgtctggttgcctttctatagaggtcacgcagaaaataacacggatagaagggaaccctacatatactccacagaagtccaggatgttatcagaaatgccctcagactgagatacaagcatataccggtgtggtataccctgttttacgagcacaccagaacaggagatccagtggtgagaccaattttctacgactatcccggcagcgtcgaccaggactatcatatattattgggttccaatatattagcaaggcctgtgatggaaaaaggagcaagatcggtgactgtaaatttccctggctcagaagataatcagtggtatcgagtagatgatggttcgtttaaaatctacaatgggcaatcttctgcgatcttacccgtaactattttaacatctccatatttctataaagcaggaagtattattacaaggagagacgaagaacgatcatcaactgctgaaatgcaagacgatcctttcgttttgtatgtgaacgtagacaaggaaaatacagccagtggtaatctttatgttgacgattacaccagttttgaataccaaaataatcaaagatacttctatgcaaacctggcatatcaatcaaaccaaattgatattagtatagtcgatggtaattgcagcggcatgacagtcacattgggtcaagttattgtacatcaacagtctgataaagatgagaagagatacacccgtaccgtctacacacatttagcagatggtacacccctgaagagtataaatatagtggaaaagttgaacggaaacaatatggtttctttaaaattataagattatgaaattcgtgtgataaattatt

SEQ ID NO: 5998 - DNA, 2598 bp, Diabrotica virgifera
  SmartBlast Evalue=0; Info=ATP-dependent RNA helicase p62 n=1 Tax=Tribolium castaneum RepID=UPI0001C0B395
attggctggcagtgagacggcaatcatctgctattgttgaaaataattttaagtttttcttttgtaatcaacactatttattaactaaagtatttattcagggaatatcgaaacaatacatttgacgccagtaaaatttgctgagtccaccaaggagagtatctagaattttcgttgataaatagaagcgatcgaagatatttaacatgtcatttaacagacaaggaggcggtggtagcacattcagaagccgagaaaacctctcaaatggaggaggcaatgatagatttggaggtggtcgaagcggtggtgggggagggggtggtttcaaaggcggcagtggaggaggataccgtggcaatgacagtggcggcggcggcggaggattcagaagtggtggaggtggccgtggaggcggtggaggattcagaagtggcggcgggggaggaggtggatttcgaagtggcggaggcggcggaggaggtcgctttggcggcagaggcggaggcggcggtagaagtgggccccaaggtggccgcctttacagaccacaatgggacagtatcacactgcgtccatttaagaaagatttttacgttcctcatccagcagtagctaataggtcacattacgaagtagaacagttccgccgagccaaagaaattacgatagaaggtaaagttccaaaccccatacagcatttcgaggaagcctccttccctgattacgtaatgaaggaaattagcaaacaaggctacgaatatcctactccgattcaagctcaaggttggcctatagctttgagcggattagatttagtcggaattgcacaaactggttctggtaaaactcttgcttatatccttccagctatagtacatattaataaccaaccagctatagctaacggagatggacctatagcgctagttctagccccaacgagagaattagctcaacagatccaacaagtcgccagcgattttggaaattccacatacgttagaaatacctgcatattcggaggagcccccaaaggaccccaagcgcgtgacttagaaagaggagttgaaatttgtatagccactcccggtcgtttaatcgatttccttgaaaaaggaaccacaaacttagagagatgtacctacttggtactcgatgaagctgacagaatgttggacatgggtttcgagcctcaaatacgtaagattttggagcagatccggcctgacaggcagactttgatgtggtctgcaacgtggcccaaggaggtcaagaaactagctgcggatttcctgaaagattacgtccagatcaacattgggtccctacagctctctgccaatcacaatattcttcagatcatagacgtttgccaggagtatgagaaggaatttaaactgaaccaacttctccaagaaatagccaataacagtgaccccgactccaaaattctaattttcgtcgaaaccaaaaagaaagctgaagctgtatctagaacggtaagaagaaccggtttgcaagctgtgtgcatgcacggagacaagagccagcaagagagagactttgtactcaatgagttcagaaacggaaaatccacaattttagtcgctacagacgttgcagcaagaggattagatgtggaaggaataaaatatgtagtcaactatgattatcccaattcgtctgaagattacatccacagaataggaagaactggacgatcagatgcctctggtacttcttacgcctttttcacaccgtctaactcgagacaggctagagatcttctgtcggtgctaaaagaagccaatcaggttatcaatcccaaactagccgacatagcaaaccgacccggtagcttcgccaagagcggaggcttcggcaaattcggtggcagagaccgcatgggaggcggcagaggtggcggtggccgtggaggcggcggcggcggaggccgtggtggcggtcgcggcggtcttggaggccgaagcggtggaggagccggaggcagaagcggtggtttcggctctggtggtggtggtggtggtgctcgaagcggcggttttggttcgggcggcggtcgaagcggcggcggcggtctaggaggtggttctggagatggcggatttagatctagagatactagcgcaggacgaccttcgaggtttagtgcacctggaggcggcagtgggcccgccggtggtggtggcggcgctggcggaagtggtggcatgggcggtggccgaatgggtggaggtcttggaggcggcagagctaatgggtttgcgagtcgagcagcaccctactaagttaaccaacgttggaggaaacctctcagtgtatcagtattcttcagatgcattcccgtgcgtccctctttagatcgtttaataactttatttaccacaaaaataatctactgccgtctctctgcagcatgtcgttccatgtttctagttttaagagatcttgaagattaattaaacttatttaattaattactaaaatggtgtaaatctgtgattagattgatcgatgattttaattttgacttaatataatgtaatctattgatgtagtcaaaatatatttata

SEQ ID NO: 5999 - DNA, 2593 bp, Diabrotica virgifera
  SmartBlast Evalue=0; Info=ATP-dependent RNA helicase p62 n=1 Tax=Tribolium castaneum RepID=UPI0001C0B395
ctggcagtgagacggcaatcatctgctattgttgaaaataattttaagtttttcttttgtaatcaacactatttattaactaaagtatttattcagggaatatcgaaacaatacatttgacgccagtaaaatttgctgagtccaccaaggagagtatctagaattttcgttgataaatagaagcgatcgaagatatttaacatgtcatttaacagacaaggaggcggtggtagcacattcagaagccgagaaaacctctcaaatggaggaggcaatgatagatttggaggtggtcgaagcggtggtgggggagggggtggtttcaaaggcggcagtggaggaggataccgtggcaatgacagtggcggcggcggcggaggattcagaagtggtggaggtggccgtggaggcggtggaggattcagaagtggcggcgggggaggaggtggatttcgaagtggcggaggcggcggaggaggtcgctttggcggcagaggcggaggcggcggtagaagtgggccccaaggtggccgcctttacagaccacaatgggacagtatcacactgcgtccatttaagaaagatttttacgttcctcatccagcagtagctaataggtcacattacgaagtagaacagttccgccgagccaaagaaattacgatagaaggtaaagttccaaaccccatacagcatttcgaggaagcctccttccctgattacgtaatgaaggaaattagcaaacaaggctacgaatatcctactccgattcaagctcaaggttggcctatagctttgagcggattagatttagtcggaattgcacaaactggttctggtaaaactcttgcttatatccttccagctatagtacatattaataaccaaccagctatagctaacggagatggacctatagcgctagttctagccccaacgagagaattagctcaacagatccaacaagtcgccagcgattttggaaattccacatacgttagaaatacctgcatattcggaggagcccccaaaggaccccaagcgcgtgacttagaaagaggagttgaaatttgtatagccactcccggtcgtttaatcgatttccttgaaaaaggaaccacaaacttagagagatgtacctacttggtactcgatgaagctgacagaatgttggacatgggtttcgagcctcaaatacgtaagattttggagcagatccggcctgacaggcagactttgatgtggtctgcaacgtggcccaaggaggtcaagaaactagctgcggatttcctgaaagattacgtccagatcaacattgggtccctacagctctctgccaatcacaatattcttcagatcatagacgtttgccaggagtatgagaaggaatttaaactgaaccaacttctccaagaaatagccaataacagtgaccccgactccaaaattctaattttcgtcgaaaccaaaaagaaagctgaagctgtatctagaacggtaagaagaaccggtttgcaagctgtgtgcatgcacggagacaagagccagcaagagagagactttgtactcaatgagttcagaaacggaaaatccacaattttagtcgctacagacgttgcagcaagaggattagatgtggaaggaataaaatatgtagtcaactatgattatcccaattcgtctgaagattacatccacagaataggaagaactggacgatcagatgcctctggtacttcttacgcctttttcacaccgtctaactcgagacaggctagagatcttctgtcggtgctaaaagaagccaatcaggttatcaatcccaaactagccgacatagcaaaccgacccggtagcttcgccaagagcggaggcttcggcaaattcggtggcagagaccgcatgggaggcggcagaggtggcggtggccgtggaggcggcggcggcggaggccgtggtggcggtcgcggcggtcttggaggccgaagcggtggaggagccggaggcagaagcggtggtttcggctctggtggtggtggtggtggtgctcgaagcggcggttttggttcgggcggcggtcgaagcggcggcggcggtctaggaggtggttctggagatggcggatttagatctagagatactagcgcaggacgaccttcgaggtttagtgcacctggaggcggcagtgggcccgccggtggtggtggcggcgctggcggaagtggtggcatgggcggtggccgaatgggtggaggtcttggaggcggcagagctaatgggtttgcgagtcgagcagcaccctactaagttaaccaacgttggaggaaacctctcagtgtatcagtattcttcagatgcattcccgtgcgtccctctttagatcgtttaataactttatttaccacaaaaataatctactgccgtctctctgcagcatgtcgttccatgtttctagttttaagagatcttgaagattaattaaacttatttaattaattactaaaatggtgtaaatctgtgattagattgatcgatgattttaattttgacttaatataatgtaatctattgatgtagtcaaaatatatttata

SEQ ID NO: 6000 - DNA, 2477 bp, Diabrotica virgifera
  SmartBlast Evalue=0; Info=V-type proton ATPase catalytic subunit A n=13 Tax=Endopterygota RepID=VATA_MANSE
ttaacaataatgatgcatttatttgttcaaaacagaacaattacactacatttattgattctaacaatctaatagatgttataagatactcgtttatcttaatctgtacaattaactttaattgggtaatgtaatatacaagattaaaagggtaaaagaaaaatttaaaacaatttacatgaagaaaaccaagtaatactgaaaatataaacgatattaagcacctgtatatttaaaaaagtattaaaacgaaaaaacttaatagtaattggaatggcgggaaaaatgtttaaaaagtatttaataagcactgtaccctcacccaaaaaaactatacacatattcaacaatttacataatttattttgtacaggataatatcaaaaaagagaaaacctatctttagttactatcattagtacggccatattaatattcacagaagtgagggatagaggccttattattctttttgataaatatcgctatatttttaaacttacactgatgaacaaaataggaaaatttccttaaaaagatttaatcttctaagtttctgaaggcctgctgaatatcttcatataattgatcaaaatctgccttgattttagcttcaccatcttttacgggatccttaaatttcatactgctaagttgatataaaattccactcattgaatctcttattacgttccaagtgatcttattttctgattgtgcggttgattctacagcgtgtctcgccatgtcgtacaaaccgatcatgtttctcaacataccgacagttttatagaatggacagaatctgtcataagaagagtatgagttttgttgcaagaaatcttctttaagaagcctggcaatttccaaggtgattttgtccgtttctgccagagatgctttacctaccagctgcacaatttcggctagatcatcttcttcctgaagaatttccttaactttggttctaagaggaataaactcttggaagtttttgtcataaaagtcgtccaatgctcttaaatatttggaatatgatccaagccagtctactgaagggaagtgcttacgttgggcaagtttcttgtccaaaccccagaacacctgtacaataccaagagtagcagtggtaacaggatctgagaaatcaccaccaggaggtgatacggctcctacaattgaaacggatccttctctgtctggattacctaaacatttaacgcgaccagcacgttcgtagaaggaagccaaacgggcacctaagtaagccggataaccggaatcggcaggcatttcagccaaacgacctgaaatttctctcaaagcttcggcccaacgtgatgtcgagtcagccatcatagatacgttgtaacccatatcacggaagtattcagaaagagtaataccagtatagatagaagcttcacgagcagctacaggcatgttagatgtgttggcgaccaatgcggtacgtttcataatagattcagtgtgcccgtcaatttcaacagtcaattcagggaaatctctcaatacttcagacatttcgttacctctttctccgcaaccgacgtagataatgacatcagagttggaatatttggaaagagattgtgaaattacagtttttccacaaccgaaagctccgggaatggcagtagtaccaccctgtacacatgggaaaagagcatcaagtacacgctgtcctgtaagcagaggatggttggcaggtaatttttcactgactggccttgcttgacgtacaggccatacttgcaacatagtatatttggtacgatcaccatcaaattcagtttccaatactacttcatcaacagtgtagtttcctggttctgcaatgtaggttacagtacccttagctctaggaggcagaatcattttgtgtttgacaagggtgttttcatgaactagaccatatatatcacctccagttaagtgagatcccaacttgatgttgattgggttgaagtcccattttgctgttctcgataaagaaggtacgttaatacccttggggatgtaaatactatcagtagcgtcacaaatgtctttcaatggacgttggataccatcaaaaatggaacccataataccaggtccaagttctactgaaagtggtttaccagttcttaatactggatcaccaacagttacacctgatgtttcttcgtatacctgaatagtagccatgtcaccttccaatctaatgatttctcctaccagctcatagtatccgacacgtaccagttcgtacatagcagaaccagacattttctcagcagtaacgactggacctgagacagcatggacataaccatactgcccttccttctcttcatctccgatccttactttcgacatatttgtggatggatgttatgtttctcttggaacctcacccactcaactatcgcgattatggacgagttttcccaaactgaacaacttgtcataag

SEQ ID NO: 6001 - DNA, 2475 bp, Diabrotica virgifera
  SmartBlast Evalue=0; Info=V-type proton ATPase catalytic subunit A n=13 Tax=Endopterygota RepID=VATA_MANSE
aacaataatgatgcatttatttgttcaaaacagaacaattacactacatttattgattctaacaatctaatagatgttataagatactcgtttatcttaatctgtacaattaactttaattgggtaatgtaatatacaagattaaaagggtaaaagaaaaatttaaaacaatttacatgaagaaaaccaagtaatactgaaaatataaacgatattaagcacctgtatatttaaaaaagtattaaaacgaaaaaacttaatagtaattggaatggcgggaaaaatgtttaaaaagtatttaataagcactgtaccctcacccaaaaaaactatacacatattcaacaatttacataatttattttgtacaggataatatcaaaaaagagaaaacctatctttagttactatcattagtacggccatattaatattcacagaagtgagggatagaggccttattattctttttgataaatatcgctatatttttaaacttacactgatgaacaaaataggaaaatttccttaaaaagatttaatcttctaagtttctgaaggcctgctgaatatcttcatataattgatcaaaatctgccttgattttagcttcaccatcttttacgggatccttaaatttcatactgctaagttgatataaaattccactcattgaatctcttattacgttccaagtgatcttattttctgattgtgcggttgattctacagcgtgtctcgccatgtcgtacaaaccgatcatgtttctcaacataccgacagttttatagaatggacagaatctgtcataagaagagtatgagttttgttgcaagaaatcttctttaagaagcctggcaatttccaaggtgattttgtccgtttctgccagagatgctttacctaccagctgcacaatttcggctagatcatcttcttcctgaagaatttccttaactttggttctaagaggaataaactcttggaagtttttgtcataaaagtcgtccaatgctcttaaatatttggaatatgatccaagccagtctactgaagggaagtgcttacgttgggcaagtttcttgtccaaaccccagaacacctgtacaataccaagagtagcagtggtaacaggatctgagaaatcaccaccaggaggtgatacggctcctacaattgaaacggatccttctctgtctggattacctaaacatttaacgcgaccagcacgttcgtagaaggaagccaaacgggcacctaagtaagccggataaccggaatcggcaggcatttcagccaaacgacctgaaatttctctcaaagcttcggcccaacgtgatgtcgagtcagccatcatagatacgttgtaacccatatcacggaagtattcagaaagagtaataccagtatagatagaagcttcacgagcagctacaggcatgttagatgtgttggcgaccaatgcggtacgtttcataatagattcagtgtgcccgtcaatttcaacagtcaattcagggaaatctctcaatacttcagacatttcgttacctctttctccgcaaccgacgtagataatgacatcagagttggaatatttggaaagagattgtgaaattacagtttttccacaaccgaaagctccgggaatggcagtagtaccaccctgtacacatgggaaaagagcatcaagtacacgctgtcctgtaagcagaggatggttggcaggtaatttttcactgactggccttgcttgacgtacaggccatacttgcaacatagtatatttggtacgatcaccatcaaattcagtttccaatactacttcatcaacagtgtagtttcctggttctgcaatgtaggttacagtacccttagctctaggaggcagaatcattttgtgtttgacaagggtgttttcatgaactagaccatatatatcacctccagttaagtgagatcccaacttgatgttgattgggttgaagtcccattttgctgttctcgataaagaaggtacgttaatacccttggggatgtaaatactatcagtagcgtcacaaatgtctttcaatggacgttggataccatcaaaaatggaacccataataccaggtccaagttctactgaaagtggtttaccagttcttaatactggatcaccaacagttacacctgatgtttcttcgtatacctgaatagtagccatgtcaccttccaatctaatgatttctcctaccagctcatagtatccgacacgtaccagttcgtacatagcagaaccagacattttctcagcagtaacgactggacctgagacagcatggacataaccatactgcccttccttctcttcatctccgatccttactttcgacatatttgtggatggatgttatgtttctcttggaacctcacccactcaactatcgcgattatggacgagttttcccaaactgaacaacttgtcataag

SEQ ID NO: 6002 - DNA, 2477 bp, Diabrotica virgifera
  SmartBlast Evalue=0; Info=Hsp90 alpha2 n=1 Tax=Brachionus ibericus RepID=E5DVR5_9BILA
gctgagacagcgaacgtcacttgcggaagtgaatttccaaagcagaaaattatttcaaagcggtttttacattgtgacttgtggatattttgtgaaaaaactagtccaaaatgcctgaagaaactcaaagcgcagatgtcgagaccttcgccttccaggctgaaatcgctcagctgatgagtttgatcatcaacacattctactctaataaagaaatcttccttagagagttgatctcaaactcctcagatgccttggataagatccgttaccaatcactcacaaatccatcctgtctcgactctggaaaagatttgcacattaaaattgttccaaacaagagtgaaggaaccttaaccatcattgatactggtattggtatgacgaaagcagatttagttaacaaccttggtacaatcgcaaaatcaggaacaaaggcattcatggaggccctccaagctggagctgatattagtatgattggtcaatttggtgtaggtttctactcagcctacttagttgctgatcgagtagtggttgtatcaaaaaataacgatgatgaacagtacatttgggaatcatctgcaggaggtagcttcacaataagaccagatgttggagaaccattgggacgtggtacaaaaattgttctgtacatcaaagaggatcaaactgaatttttagaagagaataaaattaaggagattgtaaagaaacactcccagttcattggttaccccattaaattgcttgtagaaaaagaaagggaaaaggaactaagtgatgatgaagcagaagaagaaaagaaggaagaagaggaagacaaagataaacctaaaattgaagatgtaggagaggatgaagatgaagataaaaaagatgagaaaaagaaaaagaaaaaaactattaaagaaaagtacactgaagatgaggaactaaacaaaaccaaaccaatctggacaagaaatgctgatgatataacccaagaagaatatggtgaattttacaaatcattgacaaatgattgggaagaccatttagcagtaaaacattttagtgttgagggtcaacttgagtttagagctttattgtttgttcctcgtcgtgtaccttttgatttgtttgaaaacaagaagaagaagaacaacatcaaattatatgtacgcagagttttcattatggacaactgtgaagaccttatcccagaatatcttaactttattaagggagtagtagactctgaagatttacctctaaacatttcaagagaaatgttgcaacaaaataagattcttaaggtcatccgcaaaaatttagttaaaaaatgtctggaactttttgaagagcttactgaggacaaagatggatggaagaaattctatgaacaattctcgaagaacatcaaattaggaattcacgaagattcacaaaacagagccaaacttgctgacttattgcgttaccacacctctgccagtggagatgaagcttgttcactaaaagactatgtcagcagaatgaaggaaaaccaaaaacacatctactatatcactggcgagaacaaagaacaagtagcacattctgcatttgttgaacgtgttaagaagcgtggttttgaagtagtatacatgactgaacccattgatgaatatgtagttcaacaactcaaggaatatgatggtaaaactcttgtctctgtcaccaaggaaggtctcgaattacctgaagatgaagaagagaagaagaaacgtgaagatgataaggccaaatatgaaggtctttgcaaagttatgaagagcatccttgataacaaagttgaaaaggttgtggtatctaaccgtttagtagaatctccatgctgtattgtaacctcacaatatggatggactgctaacatggaacgtatcatgaaagcccaagctctccgtgacacatcaactatgggttacatggcagccaagaaacacctagaaatcaaccctgaccattccatcattgaaaaccttagacagaagacagaagttgataaaaatgataaggctgtgaaagatcttgtcatcttgctcttcgagactgccctccttagctctggttttactttggatgaacctcaagtacacgcatctagaatctacagaatgatcaaacttggtttgggcattgatgaagaagaatctatgcttactgaagaaaccccatctggcgaagctcctgctgccgaggctggtgatggagaagatgcttcccgtatggaagaagtagattaaatgcattcatttaaagagcatgtgttgtaatatgttcaaatgacaatttctctcattccttatttttgtaaataatttatttcttttttatacagagtattactagcatttgaaaggctactggaatagtctggctgtgtagagtactaatgaccaattgtcatcaacaactgtactgattttccgttaataaaccaaataattgaaaaa

SEQ ID NO: 6003 - DNA, 2472 bp, Diabrotica virgifera
  SmartBlast Evalue=0; Info=Hsp90 alpha2 n=1 Tax=Brachionus ibericus RepID=E5DVR5_9BILA
caattatttggtttattaacggaaaatcagtacagttgttgatgacaattggtcattagtactctacacagccagactattccagtagcctttcaaatgctagtaatactctgtataaaaaagaaataaattatttacaaaaataaggaatgagagaaattgtcatttgaacatattacaacacatgctctttaaatgaatgcatttaatctacttcttccatacgggaagcatcttctccatcaccagcctcggcagcaggagcttcgccagatggggtttcttcagtaagcatagattcttcttcatcaatgcccaaaccaagtttgatcattctgtagattctagatgcgtgtacttgaggttcatccaaagtaaaaccagagctaaggagggcagtctcgaagagcaagatgacaagatctttcacagccttatcatttttatcaacttctgtcttctgtctaaggttttcaatgatggaatggtcagggttgatttctaggtgtttcttggctgccatgtaacccatagttgatgtgtcacggagagcttgggctttcatgatacgttccatgttagcagtccatccatattgtgaggttacaatacagcatggagattctactaaacggttagataccacaaccttttcaactttgttatcaaggatgctcttcataactttgcaaagaccttcatatttggccttatcatcttcacgtttcttcttctcttcttcatcttcaggtaattcgagaccttccttggtgacagagacaagagttttaccatcatattccttgagttgttgaactacatattcatcaatgggttcagtcatgtatactacttcaaaaccacgcttcttaacacgttcaacaaatgcagaatgtgctacttgttctttgttctcgccagtgatatagtagatgtgtttttggttttccttcattctgctgacatagtcttttagtgaacaagcttcatctccactggcagaggtgtggtaacgcaataagtcagcaagtttggctctgttttgtgaatcttcgtgaattcctaatttgatgttcttcgagaattgttcatagaatttcttccatccatctttgtcctcagtaagctcttcaaaaagttccagacattttttaactaaatttttgcggatgaccttaagaatcttattttgttgcaacatttctcttgaaatgtttagaggtaaatcttcagagtctactactcccttaataaagttaagatattctgggataaggtcttcacagttgtccataatgaaaactctgcgtacatataatttgatgttgttcttcttcttcttgttttcaaacaaatcaaaaggtacacgacgaggaacaaacaataaagctctaaactcaagttgaccctcaacactaaaatgttttactgctaaatggtcttcccaatcatttgtcaatgatttgtaaaattcaccatattcttcttgggttatatcatcagcatttcttgtccagattggtttggttttgtttagttcctcatcttcagtgtacttttctttaatagtttttttctttttctttttctcatcttttttatcttcatcttcatcctctcctacatcttcaattttaggtttatctttgtcttcctcttcttccttcttttcttcttctgcttcatcatcacttagttccttttccctttctttttctacaagcaatttaatggggtaaccaatgaactgggagtgtttctttacaatctccttaattttattctcttctaaaaattcagtttgatcctctttgatgtacagaacaatttttgtaccacgtcccaatggttctccaacatctggtcttattgtgaagctacctcctgcagatgattcccaaatgtactgttcatcatcgttattttttgatacaaccactactcgatcagcaactaagtaggctgagtagaaacctacaccaaattgaccaatcatactaatatcagctccagcttggagggcctccatgaatgcctttgttcctgattttgcgattgtaccaaggttgttaactaaatctgctttcgtcataccaataccagtatcaatgatggttaaggttccttcactcttgtttggaacaattttaatgtgcaaatcttttccagagtcgagacaggatggatttgtgagtgattggtaacggatcttatccaaggcatctgaggagtttgagatcaactctctaaggaagatttctttattagagtagaatgtgttgatgatcaaactcatcagctgagcgatttcagcctggaaggcgaaggtctcgacatctgcgctttgagtttcttcaggcattttggactagttttttcacaaaatatccacaagtcacaatgtaaaaaccgctttgaaataattttctgctttggaaattcacttccgcaagtgacgttcgctgtctcagc

SEQ ID NO: 6004 - DNA, 2450 bp, Diabrotica virgifera
  SmartBlast Evalue=1E-170; Info="Milton, isoform C n=2 Tax= Drosophila melanogaster RepID=E2QCQ3_DROME"
ttaaatgataacaaaactaagctcaaattaatctactacattattaaattaagtggaaccgaatcttcataacaccaaaaacaaaacaaactagcaaaaagatctataaacataaaggttatcaaaagaaatagaaatgtaagcaacatctagtcagatccattattacctcgtttttctcgagtctttccctcttgtgtttcggaagaggaaccttcttcttggcccctcctccgatagtgtccctgaggaatgtcggaaccgagctcaagataagctgcggcaggcttaattcctcgtaaggttcgggagaaccagatcgtgttgacatcggactactatcggggctgttgtgtggggtcgccgttggcgtgaaactgttggggccgcttggagtcggcacgcatgatggggttattgcttttatacctctttcatttaacatcttcgctagtcctagagtggtggagaatgtgctacaagaattgcgcctactcgaagccatgggtgtttgtggaggtgatggctggacgctggaacatatcgaagccatcctgctgcccctctggctgtgcgtcaccgacgtagtaccatcatcgggatgcattatggtgctattagtataggtgtatgtgtgcattgacgtatcgaagagtttaccgggatttgagtattcctcgtcttcttctaaatcactgagggcgtacgattctaggccgagttcttctaattcttttcctcctcttattttaacaccgggtctttcgtctaaaataccaccgaaggtaggttgagctagctgcgaccactggtgtaacgtctttgaaccttccattggctttacgatctgaagtttctcaggcaacttccaaccaagatagttacaggagcctgttgacattaaactgtcaggtgttcgacaaccgaagggcaggtacgaatcgccttcgtaacctccgtatgtaggtccatgttggagatttgctcttcgcgccagaatctctgcaggcgttaatctcttcaatgcagcctccagctctgtagcaccaggtactcccggaatgcccttctgggggccgcctggatatccttcttccgagtctgtatgactagaatccgtatcagaatatcccgtggaatctatactaggatatcctaaagaactgctactatatatagaaccagaagatcgtcttagatcggcaccagtttgcatcctcgacgacgttcgaggtctagagttagcaccagtactgctgacgtaaccgcccatgccagaatggaagctaccgagactatcactgccgcttaaggagttctgtgaggcacaacgtactgtttcgaagactttcttatattggggcatcatatcggtactggatattccagaatcagtactgggttcagaatgcattgacatggacagttcgctctgtaaactgtcgtatggcccaagggccgtctgtccgagagaggaaaacatgttgattctggcaccgggcgtttgtttctttctgagcttgcgcagttgctcttgcgcatcacggaacagcgcttcgacttcatagtagcgcgctttgaattctgacagttctaccgctaagctgccttgattttctttggtgatttgtagaagaccgttggcttcatcgttttcagctaataccttctgtaatttgccttcagtatcttgtagttgagattgcagtgccaaaatttgctcgtgctggagtctgctttcttcttttaatctatccaattcgtcctccaaataagtcatacttgaattggcacaagttaattgtcctgtgagatctttgagtaacctggcttcttgggcttcaatatcatcagcgcaggatgctaaccggcaatattcagcttttaaggccttgttttcatcttccagagaagatatctttttgttcatgacgtccaaatctacttttcccgatgatccgttttccaatccagtatcatccatatcattggtaagtatctgaatgagttccgtcttcttgtgaatttcatggcaaagttgggtaattttctcgtgagccgctttcaagtccgtttctaacgaagctaccgtattttctagcttgttgttgtttaccagaagttccttaccgatcctcgctgtcagttctagatccttttctttctcttccagaagcctagtgaccgcttcaatgtcatcgtaggtctttgtcatttggctcacgcgattgctacatagaagaaaataattcaaagtttcccggatttgatccggcgacaacttgaggtcggcctcgtcaacttcgagagccggtgacggtatgaaccagtcttgattttcgtaacctccgaacttggtcagagtatcagttctcaacttgtacttcggaatctgctcctctaagaggctgatcaactccacttcaggcaacgattccgcactgcacaat

SEQ ID NO: 6005 - DNA, 2241 bp, Diabrotica virgifera
  SmartBlast Evalue=1E-167; Info="Selenide, water dikinase n=1 Tax=Harpegnathos saltator RepID=E2BK45_9HYME"
ttctatgtagcaatcgcgtgagccaaatgacaaagacctacgatgacattgaagcggtcactaggcttctggaagagaaagaaaaggatctagaactgacagcgaggatcggtaaggaacttctggtaaacaacaacaagctagaaaatacggtagcttcgttagaaacggacttgaaagcggctcacgagaaaattacccaactttgccatgaaattcacaagaagacggaactcattcagatacttaccaatgatatggatgatactggattggaaaacggatcatcgggaaaagtagatttggacgtcatgaacaaaaagatatcttctttggaagatgaaaacaaggccttaaaagctgaatattgccggttagcatcctgcgctgatgatattgaagcccaagaagccaggttactcaaagatctcacaggacaattaacttgtgccaattcaagtatgacttatttggaggacgaattggatagattaaaagaagaaagcagactccagcacgagcaaattttggcactgcaatctcaactacaagatactgaaggcaaattacagaaggtattagctgaaaacgatgaagccaacggtcttctacaaatcaccaaagaaaatcaaggcagcttagcggtagaactgtcagaattcaaagcgcgctactatgaagtcgaagcgctgttccgtgatgcgcaagagcaactgcgcaagctcagaaagaaacaaacgcccggtgccagaatcaacatgttttcctctctcggacagacggcccttgggccatacgacagtttacagagcgaactgtccatgtcaatgcattctgaacccagtactgattctggaatatccagtaccgatatgatgccccaatataagaaagtcttcgaaacagtacgttgtgcctcacagaactccttaagcggcagtgatagtctcggtagcttccattctggcatgggcggttacgtcagcagtactggtgctaactctagacctcgaacgtcgtcgaggatgcaaactggtgccgatctaagacgatcttctggttctatatatagtagcagttctttaggatatcctagtatagattccacgggatattctgatacggattctagtcatacagactcggaagaaggatatccaggcggcccccagaagggcattccgggagtacctggtgctacagagctggaggctgcattgaagagattaacgcctgcagagattctggcgcgaagagcaaatctccaacatggacctacatacggaggttacgaaggcgattcgtacctgcccttcggttgtcgaacacctgacagtttaatgtcaacaggctcctgtaactatcttggttggaagttgcctgagaaacttcagatcgtaaagccaatggaaggttcaaagacgttacaccagtggtcgcagctagctcaacctaccttcggtggtattttagacgaaagacccggtgttaaaataagaggaggaaaagaattagaagaactcggcctagaatcgtacgccctcagtgatttagaagaagacgaggaatactcaaatcccggtaaactcttcgatacgtcaatgcacacatacacctatactaatagcaccataatgcatcccgatgatggtactacgtcggtgacgcacagccagaggggcagcaggatggcttcgatatgttccagcgtccagccatcacctccacaaacacccatggcttcgagtaggcgcaattcttgtagcacattctccaccactctaggactagcgaagatgttaaatgaaagaggtataaaagcaataaccccatcatgcgtgccgactccaagcggccccaacagtttcacgccaacggcgaccccacacaacagccccgatagtagtccgatgtcaacacgatctggttctcccgaaccttacgaggaattaagcctgccgcagcttatcttgagctcggttccgacattcctcagggacactatcggaggaggggccaagaagaaggttcctcttccgaaacacaagagggaaagactcgagaaaaacgaggtaataatggatctgactagatgttgcttacatttctatttcttttgataacctttatgtttatagatctttttgctagtttgttttgtttttggtgttatgaagattcggttccacttaatttaataatgtagtagattaatttgagcttagttttgttatcatttaa

SEQ ID NO: 6006 - DNA, 1968 bp, Diabrotica virgifera
  SmartBlast Evalue=1E-22; Info="Msr-110, isoform C n=8 Tax= melanogaster subgroup RepID=Q8IQ63_DROME"
tgtgttgggcagcgaccggtgaaaaacacctgaggaatacttaaccgctttgcgcaacttttacttacctcttttaagtagtataccgagtgctttcgaaaagttcttgcgtcatggagaaggaaccgcaaccagagtccatggcgacggttaccatcaagccggagtacaccccttcggagtattcggcctccgaaccaccaccggcatacatgaaaatgcgtagtacttcagtccaaatagccaagattatagcagtaaccgtcgtagcttgttctgtaattttgggaggattcttgctagcttctgcctacgtctcagctaatgcttcatgcaggcagttggagcatgaacttgagctcctcagcgaagctgcagacaggtttcagtccccattgcaacccgaagcgcttatccaagacccaccatcatccgtcaacgccaaacgtcaagtagaaactctcaatgttgaagagcaatcacctaccacaaaagaactaaccaaccatatcgacgatgactcctcctcttcttcgtcggagagcgagtcgaccgattccgaagatcttcctaccaaagaacccaagggtgccaaagttccagtccagatggatatggaagagctgatttctcatttactcgagaagaaccaaaaatcaaaaatgaactgcgtagtggaaaagaagagagcagaagaatttgtggatcatcaacctaaaacggtgaggttgccattcggaatcaaccttaccacgaatcctaggttcgagaaattgaccggagaacgtatggttattgtttgtgaaagtggaaccatgcaaggtgctgaatcacctatgagaccaaaggaagaaagagaagacgattccgatgaagaagaccaagaaacgattatgattcaaccagtaatgatccccattccccaaagcccattcaacacccatatgccccagcaaatggcaccaatggctccacaacgactaatgggagaacaaatgcgtccaatgggagctccagtatttcatattgaaaacatgagaccacccatgatgcaccagcaaccaccttctcaaatgccagtacgccctccaatgcaaccacagatccaaatccaaatgcagccacaacaaccccaacaaggcgatttcccaccaaacccaatcttgcaacacatcgtacaacagattgttgcacagaaaatcatggaaagccaaaagctacgtgagcaacaaatgagagaacagcaacaacaacaacagcaacaacagcaacaaaaagaagtcagacctgaaccaacacaagaaattgaagaacgcccacgatttcttcagattgaacaaattgggcaaccagtcaatggacaaagattaccaattccagaagaagttttgactcaactgaacagattacccaaccgtgatgttatcgtagctgtatcagaaactgattctgaagatgctccccaagaggttcagtacgttcaagagcaaagacaaagtgccaacgaaatgaacggtagacaaacgtatactagagctcttcccattaaccttcctgtacacgtagctcctcaagatcaagaatctcaggaacaggagcaacaacaagacgaactcagacctcattttgttcaacccagatcagtctgaagtctgtatattccctccaagaggagaaactagtgtgatttaatgaattacctaatcacatgtttaccaataaaaatcacttaagtagataactagtgacacagttaatagtactaattaagattttctaattgtaaatataatattatgggtaggttgtacctctattgatgtgcattttgtaaagattattttcttaaaaacaaataaagtagcagctttcatatattttgtatggtttaaatgtaaataccttgataaaagtatttcgaaaactaatgtgattttattgttgaaaataaattaaatatattttcct

SEQ ID NO: 6007 - DNA, 1959 bp, Diabrotica virgifera
  SmartBlast Evalue=1E-22; Info="Msr-110, isoform C n=8 Tax= melanogaster subgroup RepID=Q8IQ63_DROME"
cagcgaccggtgaaaaacacctgaggaatacttaaccgctttgcgcaacttttacttacctcttttaagtagtataccgagtgctttcgaaaagttcttgcgtcatggagaaggaaccgcaaccagagtccatggcgacggttaccatcaagccggagtacaccccttcggagtattcggcctccgaaccaccaccggcatacatgaaaatgcgtagtacttcagtccaaatagccaagattatagcagtaaccgtcgtagcttgttctgtaattttgggaggattcttgctagcttctgcctacgtctcagctaatgcttcatgcaggcagttggagcatgaacttgagctcctcagcgaagctgcagacaggtttcagtccccattgcaacccgaagcgcttatccaagacccaccatcatccgtcaacgccaaacgtcaagtagaaactctcaatgttgaagagcaatcacctaccacaaaagaactaaccaaccatatcgacgatgactcctcctcttcttcgtcggagagcgagtcgaccgattccgaagatcttcctaccaaagaacccaagggtgccaaagttccagtccagatggatatggaagagctgatttctcatttactcgagaagaaccaaaaatcaaaaatgaactgcgtagtggaaaagaagagagcagaagaatttgtggatcatcaacctaaaacggtgaggttgccattcggaatcaaccttaccacgaatcctaggttcgagaaattgaccggagaacgtatggttattgtttgtgaaagtggaaccatgcaaggtgctgaatcacctatgagaccaaaggaagaaagagaagacgattccgatgaagaagaccaagaaacgattatgattcaaccagtaatgatccccattccccaaagcccattcaacacccatatgccccagcaaatggcaccaatggctccacaacgactaatgggagaacaaatgcgtccaatgggagctccagtatttcatattgaaaacatgagaccacccatgatgcaccagcaaccaccttctcaaatgccagtacgccctccaatgcaaccacagatccaaatccaaatgcagccacaacaaccccaacaaggcgatttcccaccaaacccaatcttgcaacacatcgtacaacagattgttgcacagaaaatcatggaaagccaaaagctacgtgagcaacaaatgagagaacagcaacaacaacaacagcaacaacagcaacaaaaagaagtcagacctgaaccaacacaagaaattgaagaacgcccacgatttcttcagattgaacaaattgggcaaccagtcaatggacaaagattaccaattccagaagaagttttgactcaactgaacagattacccaaccgtgatgttatcgtagctgtatcagaaactgattctgaagatgctccccaagaggttcagtacgttcaagagcaaagacaaagtgccaacgaaatgaacggtagacaaacgtatactagagctcttcccattaaccttcctgtacacgtagctcctcaagatcaagaatctcaggaacaggagcaacaacaagacgaactcagacctcattttgttcaacccagatcagtctgaagtctgtatattccctccaagaggagaaactagtgtgatttaatgaattacctaatcacatgtttaccaataaaaatcacttaagtagataactagtgacacagttaatagtactaattaagattttctaattgtaaatataatattatgggtaggttgtacctctattgatgtgcattttgtaaagattattttcttaaaaacaaataaagtagcagctttcatatattttgtatggtttaaatgtaaataccttgataaaagtatttcgaaaactaatgtgattttattgttgaaaataaattaaatatattttcct

SEQ ID NO: 6008 - DNA, 1944 bp, Diabrotica virgifera
ttaatagtttgaggtgtttccaagatattttaagaccccgaaattcggtgttgtgatacttcgatctactttgagatcatcgttatatgatacaaattaatcgaggataaaggctgtagctaactgaacacaacaataaaacaattaaagaaatatgttttgtatagtaacttttatttattcgtagacattttattcatagattttacctaaaataacgtaaaatcaacaatagtaagtgtcaatacacattaataagtagtatatggaggtcttgcatatttcctatacaaattgttccaaaacacaattttgtcagaattgggaagacctttcaccgtaagatcattgttaatttctaaaaatttcaagttttcggccttttcaacaacagaattttctggccagatgacattctgcagtaatgattcacgctttggagttgggtcgccatatttaataaagttcgcccatagcctcactgttcgttctcttgccaagtaatcttcttcacttccttttttgttatagtcaaatatgtaggccaaatcttcagtatgaccaacaccattataagtacgattggtacgaccccatagtggtccttcatagcagaagtgataagcatatacttttgtgtaagcggaatacagtctaagagcttcttgaataggtttttcaaattgggtgtctgcgataaacctcatgagttcttctgtactcaaagcaactggtagtaaaccaaaatatttactcttaatactttcggctataatactttttataattggtaggaggttcatatcattaggtacaagttgtggatgatataaatcgaatttcgctacccatagtctaaagattgctgttaattgattgaaatatccttccaatgatgtatatcctgctaggatgggtacatggtgaaatttcccttgtttcagtagttcgtgagaatattcagttattacagcatcgtcgtgatttggttctataaccggggtaaaaaccaaaccttgcagaggattacgtaagagcatgttctgcttcattacagaagacgcagcttcttgcaattctttgacatcgatctttcttaatgattctagaatattcgtagaagatgttcccgtatttacttttaattttttcgccacttccttggtggaagcgggaagatcttttgccaaagaccaagggctcaaactagatccagagttgagaattgctttactaaagaggcctcttgtttgttttgcctgtagtaaataagccacagaagcggctccagcgctttgaccccaaatggtgattttattgggatctcctccaaagttcctaatattttccttaatccacttaagccctaatatctggtccttaattccattatttcctggagctacagtatctccaagcgacatgaaacccaaatatccaagtctatattgaacagctgcgacgattacatcttcatgaagaaggaaatcaggtcggtgatcgtcaaagtctgcagagccttcaaagaaagcccctccataaatccatactactactgggagtttgtgcaatttgcttggtctgtgacggctatatatttttagatacaagcaatcttcattgccagctacaggtgaaccttgaatacattcctgagctttatgtcgtacatctaaaactcctgaccaattggcttttggtacaggtgcagcaaatcttaaatctccaactggaggttcggcaaatggaatacttctaaaccaatatagaatttcatctttatttgcatgtgatctagctccaaagccaccttttatttttccattattggttttcacagttacggtataatcatctgaaataacaaatgattctacacagtacgcgactgccagcaatcgcagtactatacctaagattttcaacatttttggtgtgtcattg

SEQ ID NO: 6009 - DNA, 1787 bp, Diabrotica virgifera
ttttgtatagtaacttttatttattcgtagacattttattcatagattttacctaaaataacgtaaaatcaacaatagtaagtgtcaatacacattaataagtagtatatggaggtcttgcatatttcctatacaaattgttccaaaacacaattttgtcagaattgggaagacctttcaccgtaagatcattgttaatttctaaaaatttcaagttttcggccttttcaacaacagaattttctggccagatgacattctgcagtaatgattcacgctttggagttgggtcgccatatttaataaagttcgcccatagcctcactgttcgttctcttgccaagtaatcttcttcacttccttttttgttatagtcaaatatgtaggccaaatcttcagtatgaccaacaccattataagtacgattggtacgaccccatagtggtccttcatagcagaagtgataagcatatacttttgtgtaagcggaatacagtctaagagcttcttgaataggtttttcaaattgggtgtctgcgataaacctcatgagttcttctgtactcaaagcaactggtagtaaaccaaaatatttactcttaatactttcggctataatactttttataattggtaggaggttcatatcattaggtacaagttgtggatgatataaatcgaatttcgctacccatagtctaaagattgctgttaattgattgaaatatccttccaatgatgtatatcctgctaggatgggtacatggtgaaatttcccttgtttcagtagttcgtgagaatattcagttattacagcatcgtcgtgatttggttctataaccggggtaaaaaccaaaccttgcagaggattacgtaagagcatgttctgcttcattacagaagacgcagcttcttgcaattctttgacatcgatctttcttaatgattctagaatattcgtagaagatgttcccgtatttacttttaattttttcgccacttccttggtggaagcgggaagatcttttgccaaagaccaagggctcaaactagatccagagttgagaattgctttactaaagaggcctcttgtttgttttgcctgtagtaaataagccacagaagcggctccagcgctttgaccccaaatggtgattttattgggatctcctccaaagttcctaatattttccttaatccacttaagccctaatatctggtccttaattccattatttcctggagctacagtatctccaagcgacatgaaacccaaatatccaagtctatattgaacagctgcgacgattacatcttcatgaagaaggaaatcaggtcggtgatcgtcaaagtctgcagagccttcaaagaaagcccctccataaatccatactactactgggagtttgtgcaatttgcttggtctgtgacggctatatatttttagatacaagcaatcttcattgccagctacaggtgaaccttgaatacattcctgagctttatgtcgtacatctaaaactcctgaccaattggcttttggtacaggtgcagcaaatcttaaatctccaactggaggttcggcaaatggaatacttctaaaccaatatagaatttcatctttatttgcatgtgatctagctccaaagccaccttttatttttccattattggttttcacagttacggtataatcatctgaaataacaaatgattctacacagtacgcgactgccagcaatcgcagtactatacctaagattttcaacatttttggtgtgtcattg

SEQ ID NO: 6010 - DNA, 1929 bp, Diabrotica virgifera
  SmartBlast Evalue=1E-126; Info="Glucose dehydrogenase, putative n=1 Tax=Pediculus humanus corporis RepID=E0VK19_PEDHC"
atcgcaacttaacagttgagctacaatggcggagtgtggttgcactgatccaggatactacggaccttatttgggtaacaattgtggagcaggcagcttcatagtatttatgagtttagttgatgctataataagaaatacgtgtgatatatcagatgtctgtggaagagttcaacccatagaagagccagatttttcttacgactttattgtaataggtggtggaagcggtggatcggctgtgactggacgtctgttagaacataaaaagtctagagttttacttatagaagctggagttgacgagcctgaaacctaccaagtacctggactgattttgaagtattacaataacccaatcgtggactggagctatcgtacctccgacgaacctgtggcatgtcgagcaacaaatggtagctgcaattgtttaagagcaaaaatgctaggaggatgctcttcaattaatggaatgatgttcacaagaggaactccaccagattttgataagaggtggagtggcgaaggcattaaaggttggacctggaacgacgtcctaccattctttaggaaatttgaacataatttacagccttcagaatatgattctcactaccatggttacagtggaccagtggctgtgtctgaccaatattatgtacacgacctatcaaaatccatccttaaaggagctgcagaagctggttttccaatttctaaagatataaacggtaaagactacactggattcgctaattcgcagtcctatattaaagacggtgtcagagtcagtatggctaaagcctaccttagacctcaaagaaataatccacacttacacgtgatgttgaactccactgtgacccgcatcctattcgacggccacaaaaaagcttacgcagttgaatttctttacaacaatcaaaccttcacagttaaagctaaaaaagaaatcattttagctgccggaacaataaactctccaaaactattactacaatctggagtcggaccaaaagatgctttggacgctgttggaattaaacagattcataacttaccaggtgtaggacaaaatttaactaaccatgtatctttcaaagtgaattactggattaacagtaccgttgatactagaatcatcacatggaaatctttagaggattatcttaacgatcggactgggcctctctctaccataggaattacggttacatgtcgacttccatctaaatatacaacagcagatgatccagatattcaaatgttcttctctttgagtcaaaatacttgctcaccagatggcgcagttgatgaaccagttgatccaaccaatccccaaaaaccacaacatgttgcaatcagtgttgttaatttacacaccaagagtcgtggtagaattacgctgaagtctaaagatccacttgcacctccacatctggtaggaaactatttaacggtaaaagaagatgaagatagaataattgatggtataagacttgctcaaaggcttgtaaacagtacaacattaaaagacacagtgcaatttgtttttgacaatgtcactcaaggcacctgcgccgaccaatacacctgggattctgatgattactggcgctgtgcaatccgttacaacacttttgcggaaaatcaccaatccagtacacttcgtatgggctccactgacgacgaatggtctgttgtagatgaagaacttcgggttattggtctccacaatttgagagtagcagacgcttcggctatgcctgtggttacaagctctaatactaatgctccaattgtcatgcttgctgagagatgcgctgactttattcatcatagatggggacattatggcaaaaactaactgtatacattaaattaattatatataggtaataataataataaatatagttgaaagcccct

SEQ ID NO: 6011 - DNA, 1908 bp, Diabrotica virgifera
  SmartBlast Evalue=1E-126; Info="Glucose dehydrogenase, putative n=1 Tax=Pediculus humanus corporis RepID=E0VK19_PEDHC"
ttattattattacctatatataattaatttaatgtatacagttagtttttgccataatgtccccatctatgatgaataaagtcagcgcatctctcagcaagcatgacaattggagcattagtattagagcttgtaaccacaggcatagccgaagcgtctgctactctcaaattgtggagaccaataacccgaagttcttcatctacaacagaccattcgtcgtcagtggagcccatacgaagtgtactggattggtgattttccgcaaaagtgttgtaacggattgcacagcgccagtaatcatcagaatcccaggtgtattggtcggcgcaggtgccttgagtgacattgtcaaaaacaaattgcactgtgtcttttaatgttgtactgtttacaagcctttgagcaagtcttataccatcaattattctatcttcatcttcttttaccgttaaatagtttcctaccagatgtggaggtgcaagtggatctttagacttcagcgtaattctaccacgactcttggtgtgtaaattaacaacactgattgcaacatgttgtggtttttggggattggttggatcaactggttcatcaactgcgccatctggtgagcaagtattttgactcaaagagaagaacatttgaatatctggatcatctgctgttgtatatttagatggaagtcgacatgtaaccgtaattcctatggtagagagaggcccagtccgatcgttaagataatcctctaaagatttccatgtgatgattctagtatcaacggtactgttaatccagtaattcactttgaaagatacatggttagttaaattttgtcctacacctggtaagttatgaatctgtttaattccaacagcgtccaaagcatcttttggtccgactccagattgtagtaatagttttggagagtttattgttccggcagctaaaatgatttcttttttagctttaactgtgaaggtttgattgttgtaaagaaattcaactgcgtaagcttttttgtggccgtcgaataggatgcgggtcacagtggagttcaacatcacgtgtaagtgtggattatttctttgaggtctaaggtaggctttagccatactgactctgacaccgtctttaatataggactgcgaattagcgaatccagtgtagtctttaccgtttatatctttagaaattggaaaaccagcttctgcagctcctttaaggatggattttgataggtcgtgtacataatattggtcagacacagccactggtccactgtaaccatggtagtgagaatcatattctgaaggctgtaaattatgttcaaatttcctaaagaatggtaggacgtcgttccaggtccaacctttaatgccttcgccactccacctcttatcaaaatctggtggagttcctcttgtgaacatcattccattaattgaagagcatcctcctagcatttttgctcttaaacaattgcagctaccatttgttgctcgacatgccacaggttcgtcggaggtacgatagctccagtccacgattgggttattgtaatacttcaaaatcagtccaggtacttggtaggtttcaggctcgtcaactccagcttctataagtaaaactctagactttttatgttctaacagacgtccagtcacagccgatccaccgcttccaccacctattacaataaagtcgtaagaaaaatctggctcttctatgggttgaactcttccacagacatctgatatatcacacgtatttcttattatagcatcaactaaactcataaatactatgaagctgcctgctccacaattgttacccaaataaggtccgtagtatcctggatcagtgcaaccacactccgccattgtagctcaactgttaagttgcgat

SEQ ID NO: 6012 - DNA, 1921 bp, Diabrotica virgifera
  SmartBlast Evalue=0; Info=Tubulin alpha-3C/D chain n=18 Tax= Bilateria RepID=TBA3C_HUMAN
gattaattgttatcatcttaaaatcaattttttaatcttttgtaggctagttcagaatcccgtataatttatatagtctcgttttgtttttataactataaaatgaagaaacctatataaaatcctattaattttcggcaccgtaactttagtcataaccattaacgattcaaacaaaatcttggaggaagacggagaaataacggcccgttttttcgttacactcacatgacaacgttcaaccaatcaaaactctgagaatcgggcgttggcactgcgttggctgctgacgtcatttgtcatataaatagcaaccgcgccaagaaaatcatcaagttcgtttggaaagctgcattactagctaatctgaacgtctgtcgtaattttgtttcatttgtggtgtaaaagttaaaactcatcaaccaaaatgcgtgaatgtatctcagtccatgttggccaagccggagtccaaatcggtaatgcctgctgggagttgtactgcctggaacatggcatccaacctgacggtcagatgccatcagacaagactgttggaggaggagatgacagtttcaacacattcttcagtgaaactggtgccggcaaacatgtacctagagcagtatttgtagatttggaaccaacagtagtagatgaagtacgtaccggcacataccgtcaattgttccacccagaacaactcatcactggcaaagaagatgccgccaataactatgctagaggtcactatacaattggtaaagaaatagttgacttggtattggacagaatccgtaaattggctgatcaatgtactggacttcaaggtttcttgattttccactccttcggtggtggtactggatctggtttcacttctttgttgatggaacgtctatctgttgactatggtaaaaaatcaaaactggaattcgccatctacccagctcctcaagtatctactgctgtagtagaaccatacaactccatcttgaccacccacaccactcttgaacactcagactgtgcctttatggtagataatgaagccatctatgacatctgcagacgtaatctagacatcgagcgcccaacctacaccaacttgaacagacttattggccaaatcgtatcctcaatcacagcttctctaagattcgatggtgctctaaatgttgacttgacagaattccaaactaacttggttccttaccctcgtattcacttccctcttgtcacctatgccccagtaatttccgctgaaaaggcttaccatgaacaactttccgtagctgaaatcaccaatgcctgtttcgaacctgccaaccagatggtaaaatgtgatcccagacatggtaaatacatggcttgctgtatgttgtacagaggggatgttgtaccaaaggatgtaaatgctgctattgcaaccattaagaccaaacgtaccatccaattcgtagactggtgtccaactggtttcaaagtaggtatcaactaccaaccaccaactgttgtacctggaggtgatttggctaaagtacaacgtgccgtatgcatgttgtccaacactacagctattgctgaagcctgggcaagattggaccacaaattcgatcttatgtatgccaagagagctttcgtccactggtatgtaggagagggtatggaagaaggtgaattctctgaagctcgtgaagatttggctgctttggagaaagattatgaagaagttggtatggactccggagaaggtgagggtgaaggagctgaagaatattaaatttgattccaaacatgacaaatcacttgtttttaagacaaaaaattcctttcaatttttttacactttttcattacttttctgtgaaacgattatttaaagtctgatttaatttaatacagaattttttacgagcaaaaa

SEQ ID NO: 6013 - DNA, 1916 bp, Diabrotica virgifera
  SmartBlast Evalue=0; Info=Tubulin alpha-3C/D chain n=18 Tax= Bilateria RepID=TBA3C_HUMAN
gctcgtaaaaaattctgtattaaattaaatcagactttaaataatcgtttcacagaaaagtaatgaaaaagtgtaaaaaaattgaaaggaattttttgtcttaaaaacaagtgatttgtcatgtttggaatcaaatttaatattcttcagctccttcaccctcaccttctccggagtccataccaacttcttcataatctttctccaaagcagccaaatcttcacgagcttcagagaattcaccttcttccataccctctcctacataccagtggacgaaagctctcttggcatacataagatcgaatttgtggtccaatcttgcccaggcttcagcaatagctgtagtgttggacaacatgcatacggcacgttgtactttagccaaatcacctccaggtacaacagttggtggttggtagttgatacctactttgaaaccagttggacaccagtctacgaattggatggtacgtttggtcttaatggttgcaatagcagcatttacatcctttggtacaacatcccctctgtacaacatacagcaagccatgtatttaccatgtctgggatcacattttaccatctggttggcaggttcgaaacaggcattggtgatttcagctacggaaagttgttcatggtaagccttttcagcggaaattactggggcataggtgacaagagggaagtgaatacgagggtaaggaaccaagttagtttggaattctgtcaagtcaacatttagagcaccatcgaatcttagagaagctgtgattgaggatacgatttggccaataagtctgttcaagttggtgtaggttgggcgctcgatgtctagattacgtctgcagatgtcatagatggcttcattatctaccataaaggcacagtctgagtgttcaagagtggtgtgggtggtcaagatggagttgtatggttctactacagcagtagatacttgaggagctgggtagatggcgaattccagttttgattttttaccatagtcaacagatagacgttccatcaacaaagaagtgaaaccagatccagtaccaccaccgaaggagtggaaaatcaagaaaccttgaagtccagtacattgatcagccaatttacggattctgtccaataccaagtcaactatttctttaccaattgtatagtgacctctagcatagttattggcggcatcttctttgccagtgatgagttgttctgggtggaacaattgacggtatgtgccggtacgtacttcatctactactgttggttccaaatctacaaatactgctctaggtacatgtttgccggcaccagtttcactgaagaatgtgttgaaactgtcatctcctcctccaacagtcttgtctgatggcatctgaccgtcaggttggatgccatgttccaggcagtacaactcccagcaggcattaccgatttggactccggcttggccaacatggactgagatacattcacgcattttggttgatgagttttaacttttacaccacaaatgaaacaaaattacgacagacgttcagattagctagtaatgcagctttccaaacgaacttgatgattttcttggcgcggttgctatttatatgacaaatgacgtcagcagccaacgcagtgccaacgcccgattctcagagttttgattggttgaacgttgtcatgtgagtgtaacgaaaaaacgggccgttatttctccgtcttcctccaagattttgtttgaatcgttaatggttatgactaaagttacggtgccgaaaattaataggattttatataggtttcttcattttatagttataaaaacaaaacgagactatataaattatacgggattctgaactagcctacaaaagattaaaaaattgattttaagatgataacaattaatc

SEQ ID NO: 6014 - DNA, 1831 bp, Diabrotica virgifera
  SmartBlast Evalue=0; Info=Chaperonin complex component TcP-1 beta subunit CCT2 n=1 Tax=Glossina morsitans morsitans RepID= D3TMR1_GLOMM
ctcttcgtggggtagaatttcagacttttgacaaattaaaattttgaacaatttattttattaatttcaatcacattgcagttttaaaaagaattaaaaatggtatccctaaatcccgtaagaattctcaagcaagaagccgaggaagaaagggcagagattgcccgactcagtagttttgtaggtgctatagctataggagatttggttagaagcaccttgggaccaaaaggaatggataaaattttagtatccagtggtagatctgcaggatcagttgaagttactaacgacggagcaactatcctaaaatcggtgggtgttgataatcctgctgctaaaattttggtggatatgtcaaaagtccaggatgatgaagtaggagatggcaccacatcagtgacagtattagcatctgaactacttaaagaagcagaaaaacttgtagaacagaaaattcacccacaaacaatcattgccggttggaggaaagcagtagatattgccagaaaagctcttctagaaactgccaaagacaacagctctgattcagaaaagttcagagaagatctgatgaacattgccagaactacactcagctcaaagattctttcacaacataaagaatattttgccaaactggcagtagatgctgtgctgagattgaaaggtacaggtgatttacaatccatccagctgattaagaaaactggtggtactttggaagattcctttttggatgaaggttttttattggacaaaaaacctggtgtacatcaaccaaagagagtagaaaatgcaaaaatcctgatagccaacactcctatggacacagataaaatcaaagtatttggttctcacattaaggtagattcaatggctaaaattgcagagctggaatctgcagaaaaggaaaaaatgaaagataaagtgaacaaaattcttaaacataatgctaatgtatttattaatagacagttgatttacaattatcctgaacaattgtttgctgatgcaggagttatggctattgaacatgcagattttgatggaattgaaaggctagcacttgtcacaggaggagagattgtctcaacatttgaccatccagaattggtaaaacttggaacttgtaagcttattgaacaaatcatgattggagaagatatcctgctccgtttcagtggtgttgctcttggggaagcttgcacaattgttatcagaggtgctacacaacagatcattgatgaagctgaccgttcccttcatgatgctttgtgtgtattagcagccacagtcaaagagagtcgaattgtgtatggaggaggttgcagtgaaaccctaatgtccacagcggtatcaagagctgctgctaacactccaggaaaagaagctgtagcaatggaagcgtttgccagagctttgttgcagttgcccacaattattgcagacaatgcaggttacgactctgcccaattggtcagtgagcttaaggcagcacataacagtggccagagcaccatgggacttaacatggaaaagggtgaattgggggatatgaaaaccttgggaatcacagaatcttttgttgttaaaagacaagtattagtctcggcatctgaagcagctgaaatgatcttgcgtgttgataatatcatcaaggctgcaccaaggaggagaacagaagacaggggaatgtgctagttaaggaattactgatatttttatttaaggctttacttacatatttcgttataatattgcattattactgatcattctgcataagttttctgcactcattcttgattttctaataaagcgaccgttc

SEQ ID NO: 6015 - DNA, 1818 bp, Diabrotica virgifera
  SmartBlast Evalue=0; Info=Chaperonin complex component TcP-1 beta subunit CCT2 n=1 Tax=Glossina morsitans morsitans RepID= D3TMR1_GLOMM
agaatttcagacttttgacaaattaaaattttgaacaatttattttattaatttcaatcacattgcagttttaaaaagaattaaaaatggtatccctaaatcccgtaagaattctcaagcaagaagccgaggaagaaagggcagagattgcccgactcagtagttttgtaggtgctatagctataggagatttggttagaagcaccttgggaccaaaaggaatggataaaattttagtatccagtggtagatctgcaggatcagttgaagttactaacgacggagcaactatcctaaaatcggtgggtgttgataatcctgctgctaaaattttggtggatatgtcaaaagtccaggatgatgaagtaggagatggcaccacatcagtgacagtattagcatctgaactacttaaagaagcagaaaaacttgtagaacagaaaattcacccacaaacaatcattgccggttggaggaaagcagtagatattgccagaaaagctcttctagaaactgccaaagacaacagctctgattcagaaaagttcagagaagatctgatgaacattgccagaactacactcagctcaaagattctttcacaacataaagaatattttgccaaactggcagtagatgctgtgctgagattgaaaggtacaggtgatttacaatccatccagctgattaagaaaactggtggtactttggaagattcctttttggatgaaggttttttattggacaaaaaacctggtgtacatcaaccaaagagagtagaaaatgcaaaaatcctgatagccaacactcctatggacacagataaaatcaaagtatttggttctcacattaaggtagattcaatggctaaaattgcagagctggaatctgcagaaaaggaaaaaatgaaagataaagtgaacaaaattcttaaacataatgctaatgtatttattaatagacagttgatttacaattatcctgaacaattgtttgctgatgcaggagttatggctattgaacatgcagattttgatggaattgaaaggctagcacttgtcacaggaggagagattgtctcaacatttgaccatccagaattggtaaaacttggaacttgtaagcttattgaacaaatcatgattggagaagatatcctgctccgtttcagtggtgttgctcttggggaagcttgcacaattgttatcagaggtgctacacaacagatcattgatgaagctgaccgttcccttcatgatgctttgtgtgtattagcagccacagtcaaagagagtcgaattgtgtatggaggaggttgcagtgaaaccctaatgtccacagcggtatcaagagctgctgctaacactccaggaaaagaagctgtagcaatggaagcgtttgccagagctttgttgcagttgcccacaattattgcagacaatgcaggttacgactctgcccaattggtcagtgagcttaaggcagcacataacagtggccagagcaccatgggacttaacatggaaaagggtgaattgggggatatgaaaaccttgggaatcacagaatcttttgttgttaaaagacaagtattagtctcggcatctgaagcagctgaaatgatcttgcgtgttgataatatcatcaaggctgcaccaaggaggagaacagaagacaggggaatgtgctagttaaggaattactgatatttttatttaaggctttacttacatatttcgttataatattgcattattactgatcattctgcataagttttctgcactcattcttgattttctaataaagcgaccgttc

SEQ ID NO: 6016 - DNA, 1832 bp, Diabrotica virgifera
  SmartBlast Evalue=0; Info=Chaperonin subunit 6a zeta n=1 Tax= Bombyx mori RepID=Q2F6C3_BOMMO
aaaattttgggttggctcaacacgagttttctattttatttgaaaaatagtattttaaataatggctatcagtttgttaaatccaaaagctgaagtggctagagctgcacaagccctagccgttaatatatcagcggcaaaaggcattcaagatgtaatgaagtcaaaccttggtcccaaaggaacagtgaaaatgttggtatctggtgccggcgatataaaaataaccaaagatggaaacgttctattgcacgaaatgcaaattcaacaccccacggcttcccttattgctcgagcctcaactgcccaagatgatatgaccggcgacggcactacatcgactgtgttagtcataggtgaactattaaaacaagcagatatttacatagcagaaggtctccaccctagattgttaacagatggctttgataaggctaggacaaaagcgttggaagtactggagaaaatgaagatttcaattgaagcgaacaaagaaactttaacagatatttgcaggacgagtttaagaacaaagctgcatcaaaaactggctgatgttttgacagacgtttgtgtggatgccgttctagctataaagaaagatgacaaacctgttgatcttcatatggttgaattaatggaaatgcagcacaaaacagaaacagatactcagttaattaagggtttagtcctggaccatggctcccgtcatccagatatgcctaaaagtctcaacaactgctacattttaacatgtaatgtcagcatggaatatgaaaaaagtgaagtcaattcaggattcttctacaaaactgcagaagagagagaaaaattagtgactgcagagcgtgaattcattgagcagagagttaagaaagtcattgaactgaaaaggtcactctgtaatggaactgataagacttttgttgttattaaccaaaaaggtattgaccccatgagcctggatatgcttgccaaagaaggaataatagctctcagaagagctaagagacgtaacatggagcgtctatcattggcttgtggtggagtagctatgaacagctttgatgatctgcaagaatctcaacttggtagagccggacatgtatatgaacatgtgttgggagaaaataagtatacatttgtggaagattgcaaaattcctcaatcagttactattttaatgaaagggcccaataaacatactttgactcagattaaagatgcagttagagatggattaagggctatcaataatgccattgacgataaagcagttattccaggtgctggtgcatttgaagtcacagccaataaagaattgctagcatttaaagacactgttaagggtaaagctcgtctaggagttgccgcttatgcagaagctttactggtagttcccaagactttggctgttaactctggatttgatgcacaggacaccattctaaaactacaagaagaatcccgtttgaatccagacccaatcggtttagatctaacctctggggaacccatcaatcctaaagatgctggcatctatgacaactatattgttaaaaaacaaataatcaattcctgttcggtcattgccagcaacctcttattggttgatgaaattatgagggctggaatgagcagcttaaagggataaaatcgaagtattcaaatttaaatctgtatttttgtgcttgttttaatttatcattacattatgtattttcttaacctctgaaaggttgctacttaatatttagtggacatacacataatgctgtaacgttgataacatacacacgtaacatttataatatttgcaataataaaatgtc

SEQ ID NO: 6017 - DNA, 1817 bp, Diabrotica virgifera
  SmartBlast Evalue=0; Info=Chaperonin subunit 6a zeta n=1 Tax= Bombyx mori RepID=Q2F6C3_BOMMO
ctcaacacgagttttctattttatttgaaaaatagtattttaaataatggctatcagtttgttaaatccaaaagctgaagtggctagagctgcacaagccctagccgttaatatatcagcggcaaaaggcattcaagatgtaatgaagtcaaaccttggtcccaaaggaacagtgaaaatgttggtatctggtgccggcgatataaaaataaccaaagatggaaacgttctattgcacgaaatgcaaattcaacaccccacggcttcccttattgctcgagcctcaactgcccaagatgatatgaccggcgacggcactacatcgactgtgttagtcataggtgaactattaaaacaagcagatatttacatagcagaaggtctccaccctagattgttaacagatggctttgataaggctaggacaaaagcgttggaagtactggagaaaatgaagatttcaattgaagcgaacaaagaaactttaacagatatttgcaggacgagtttaagaacaaagctgcatcaaaaactggctgatgttttgacagacgtttgtgtggatgccgttctagctataaagaaagatgacaaacctgttgatcttcatatggttgaattaatggaaatgcagcacaaaacagaaacagatactcagttaattaagggtttagtcctggaccatggctcccgtcatccagatatgcctaaaagtctcaacaactgctacattttaacatgtaatgtcagcatggaatatgaaaaaagtgaagtcaattcaggattcttctacaaaactgcagaagagagagaaaaattagtgactgcagagcgtgaattcattgagcagagagttaagaaagtcattgaactgaaaaggtcactctgtaatggaactgataagacttttgttgttattaaccaaaaaggtattgaccccatgagcctggatatgcttgccaaagaaggaataatagctctcagaagagctaagagacgtaacatggagcgtctatcattggcttgtggtggagtagctatgaacagctttgatgatctgcaagaatctcaacttggtagagccggacatgtatatgaacatgtgttgggagaaaataagtatacatttgtggaagattgcaaaattcctcaatcagttactattttaatgaaagggcccaataaacatactttgactcagattaaagatgcagttagagatggattaagggctatcaataatgccattgacgataaagcagttattccaggtgctggtgcatttgaagtcacagccaataaagaattgctagcatttaaagacactgttaagggtaaagctcgtctaggagttgccgcttatgcagaagctttactggtagttcccaagactttggctgttaactctggatttgatgcacaggacaccattctaaaactacaagaagaatcccgtttgaatccagacccaatcggtttagatctaacctctggggaacccatcaatcctaaagatgctggcatctatgacaactatattgttaaaaaacaaataatcaattcctgttcggtcattgccagcaacctcttattggttgatgaaattatgagggctggaatgagcagcttaaagggataaaatcgaagtattcaaatttaaatctgtatttttgtgcttgttttaatttatcattacattatgtattttcttaacctctgaaaggttgctacttaatatttagtggacatacacataatgctgtaacgttgataacatacacacgtaacatttataatatttgcaataataaaatgtc

SEQ ID NO: 6018 - DNA, 1828 bp, Diabrotica virgifera
  SmartBlast Evalue=0; Info="ATP synthase subunit beta, mitochondrial n=7 Tax=Endopterygota RepID=E2C3U0_9HYME"
catagattagattctgcagtctgcgttcttgtcgaagttggaccatgttgggtgctgtggcaagagcaacttccagccttttggctggaaaatccatcgaaaaagttggttccgaatcccttaaaattgtctcttcatacaatgttcaaaaaagagacttcgctgccaaggctgctgccggtaaggcacaaggaaaagttgtagcggtcattggtgccgtcgttgacgtacaattcgatgaagaactacccccaattctaaatgcattggaagtacaaaaccgtcaacctaggctggtccttgaagttgctcagcatttgggagagaacacagtccgtactattgctatggatggtactgaaggtattgtccgtggtcaacaggttaacgacacaggatacccaatccgtatccctgttggtgaagcaaccctgggccgtatcatgaatgtcattggtgaacctattgatgaaaggggtcctattgatacagacaagagagcttccatccacgctgaagcccctgaattcgttgacatgagtgtagagcaagaaatcttggtaactggtattaaggtagtagaccttttagccccttacgctaagggtggtaagattggtctctttggaggtgctggagtaggaaaaactgtactgattatggaacttattaacaacgtagctaaagcccatggtggttactcagtattcgctggagtaggagaacgtacccgtgaaggtaacgatttataccatgaaatgattgaatctggagtaatctccttaaaagataagacctccaaagtagccttggtctacggacaaatgaacgaacccccaggcgctcgtgctcgtgtagctttgactggattaactgttgctgaatatttccgtgatcaagaaggacaagatgtactgcttttcattgacaacattttcagatttactcaagctggttcagaggtatctgccttgttgggtcgtatcccctctgctgtaggttaccagcctactttggccactgacatgggtagcatgcaggaacgtattaccaccaccaagaagggttccattacatcagtacaggctatctatgtacctgctgatgacttgacagatcctgccccagccaccacattcgctcacttggacgccaccactgtattgtcccgtgccattgctgaattgggtatctacccagctgtagatcctttggattccacctcacgtatcatggaccccaacattattggagccgaacattacaaagttgctcgtgatgtacaaaagatcttgcaagattataaatcactacaggatattattgctatcttgggtatggatgaattgtctgaagatgacaaacttactgtatctcgtgctagaaagatccaacgtttcctttcacaacctttccaagttgctgaagtcttcactggtcatgctggaaaacttgttcctcttgaagaaaccattaagggattccaaaagattcttgctggtgaattagatcacttaccagaagtcgccttctacatggtaggacccattgaagaggttgtccaaaaggcagaaaaattagctgaatctacataaatgctaggataactttgtatatttatttgtatgtgattccatcaatctgcagagagaaagatgtttctttttattaagatcatgtaaagaacttttcattacactaccagattttttttatatcgaaaatttttgtttattagccctaatttcatctgtcatgggtattgttgtatttttaattaatccataaataaaatagatctaaaaaatgaaaaaaaatactgctagtc
